United States Patent Application Publication US 2009/0119022 A1 - sequence listing, part 9

SEQ ID NO: 11275 - DNA, 2744 bp, Emericella nidulans
ttaggtatatgtcgccaaatactatcattttggagaacctcgaaataataacttggaccattcttttctgctgcgttcaagtcaaaattaggctgattttcgccacgccggagaccgtacgcatctgtatatacacccgcgctgatcataaacgaggtagtttgccggtagtcatgaagtaagcgataagccactcttgagacaattattgaattggtgaggatacttctctgtaaacccaccagccatgatcggctcgttggggacggaagtaggaaggaagccgagtcgttcttgacgaccttcagctatctaaccttgttaacgatattggagtattggcttctggtcatctgagctttccttctttcctttatattttccgttgtcctcttttatcccatgccccgctcgtaaatgagtatggattccacttagagtgtttattttgatatggttggttagctagcttccaaagccttcttctaaggctgcaatcagtatatctagcttctccagcctctaatatgtcggtatcctcttggtctaagacccacgagcgcatggccgttctgcactttctctttaggattgtttgacagaaactcagctgtacggtatacggcggtctggttgaaatgtcatatgccgtatatactgcgggttacagccttggcccctcgggagcggaacgtccagagcggaatgtatagagcgcgacattcagtatctgttaactttcggcatccgcactcaactccggacagcagaccggataaatcatggctggccactgaccggctaacgaacagttagttgcccctgtgggagtggcgtgcatgacaggctgaacatgagacgtctcaccttgaaaccctctgacaatgaccgttgttcatcactaccgagcacggacattggttccagcgatgctgccccggcacttgctcgtattgccctgaaacccggcattaggttgacgccccagatcgctttgcaaggccgataaacagaggtcactatcattggagtgctccatctgggaatctgaaactaacgtgactgaacaaccgtttagagtaacccttggagtttgtccatgatggagacttcagcacggtcttaagtcacaggacataaccgcactatgcctctaatgaacggcccagggaaggacccaagagagccctctcagggcctgaggctcccaacatgcgggatcaggggttcgaggagctgcgccgaaaagaaaggattgttggacgtgagatgtccatgcgtgagattcgtattgctatacgaaatccgcagttgcccactataacgtaggagaggctcaaggaggcgactactgaaattggattaggcggaggagtagatggagctcaacgtggtaatactccggagtatcgccgataaaggtgggtctggattccaattcttcaggcaggcgacggaggtattgcctgaactgggcatcggaaagcggccgccagacgacaaattagccctagaaactccggccggcccctggctgcaccgatcgaacggtggggctgggcagcacatcagcgcatcttcttgtcttggtcttgcccttcctgccagtgaccgctcgatctagaccaggcaccggggtactattgttatcatcgcactctgagaatcctggtgagaaagtggatggagaaacctgagctcctcattggttaggtcctattcctggcctcggaagctggccgatcttcaggcctgaggcaccaacaaccttcggacgacattcgacaggagatgtaaccagcagtcaaaagacggcagatatgaaacagatgggatgctgtgtggggtgttctgctcaacaggtagaccagaagaaaacacaggaggacgaggtagagggcctctggtctcctattgtgatgggaattggagtgccaaagggcggatggctatcgcaacaactgcctaatcgggcagcagtgtttgaggatttgggagatcgtggatcgccagccgcgacaaggaggtatggcgttccagacatcgtgacttttgatttccagtgatggcattgtacccactcaagactcagcgaacattggctgcttgattttagctttgcctttgactgtgcattagcagctttggttgttttgtgtccgagtcgaccgacgcctactctgagtatactacggcaagaatacgggaggactacggcagggagttaggatgacgacataggagactgtccatcaatgagagtcaatgggaaacgttaggacaagagccggctgctctgtcgaagctggtcgagatctgtggaatgcgtgaacctgtggattccaaatcatattggctcaaaaggagcaaggaataggcccaggccggcggatacgatattcgacggcggatcgccgtggatccctttggcgtgaaaatctgggagattgaattgggcgctgatccacgtcgactggaagactaagactcttgacagaccccctggccctcatcttgcctctcgcacctcattcgtattccgtctgtctagtgattgagatcccgctcctagcgggcaggtgactcccgagtcgtctggaaaaaagctagcttgttgcccttcttctgtctgcagatcatggtccttgtttccccaattgcctaacgccaccatcaccaccactcacaactgcatgcccgcaaactgtaagagcctagagtggaacagttaaatttgcaccaga

SEQ ID NO: 11276 - DNA, 287 bp, Emericella nidulans
  unsure (1)..(287): unsure at all n locations
agacgacccgaagtatcttcacacagtgtcaatagggagantggccagacttcatagtccaactactgactggtcaccagatctgggggttactacggcggctcgtantgaatggaagctacgcgagaggatctccctatcgnacaggntcagttaacagnaggtgattgagtcaaaccgntcgatagcggactggtcgataccgggcttcataagtagccaggaccgagtttgacacgacagtttntgacactggaattgatccctattcaaagaggtagttacag

SEQ ID NO: 11277 - DNA, 2235 bp, Emericella nidulans
  unsure (1)..(2235): unsure at all n locations
ggccggcttcacccgatattccgtccatagggttctggtttccggtattagaggaacttggctcggcgccctcggaagacgtagtcgttggtgtatcgtccgaagtctcggagcctggacgctcaacaacagcttcttcaggcttagaggtgatagcaactggcgtctcaggatctttcatcgcgaagtacttggcgtcgccttccatcaagtcagtaagttggatgattttcaaagtagctaaatagagaaactcaccgtccgacacgatctgcatccagtaacgcacagggttcaacggcaggtcgacagtagccgtgagatcagaaacgcgcttgagtgaaacagttgccgagcaatcgcgtgcatggccaatttgccagagacgaatattctccgggctgacctctgctcctgaacgtgtagaagcccaaagccctatcctcttgcgaacctctatgagatttgtggagcgaggcacgctcatgtacatgacactgtttgcggccttggcctgagacatgagatcatatgaatcaaacagactgctgagattatcatacttctccaaggagtaaacttcgacctgaatatcctcaacctctgtcttaccttcgtttttcttctgagaggtaacttcaccagtttcgtagtaatgcttgagttcatcagaaacctcccatggcccctgagggccgggtaggaagtccgcaataacatcgctgcgaatatacataacggcaattgcaatgtcatggcctgtcttgtgatccggcgtcttgtcaggatccaagccaagatgcggtcctaaagccgtcttccgcgtcaagcactcaactcggttgtcacttccgtcatcgaacgccagccacttggtaccaggcccgcctgggcggaggatgctgaagaactttccagatgtgcgtcgtccgcggtgaacgatgtatccgtacagtatatatttcccgcactgaccgtcgagaagccaaggtgataaatcaacttcttcatccagatctactcggttgtagagtagacgccattgccgagcagctttatcgagtgtctggcggcccaactcaaggtgcaagactgggggcagtaaccatcgcccgggcttagcactgagataccaggtgaacgcttcgctcgtggttttggctttgtcggcaggaacgaaaatacgggaattgaaatccttcggaaccgtgtgcacaggagtcggcagagcgcctgaagggaaagaggctggggaagggctgtcgaaaagccgggaaaggtcgtctgccgcgggagtacctgcgagctctagttccagagaccggcgcaaccgctcccaaaactcgcacacgtcactagacttctcatgcaagttgctgagagtggttgtgattgtatccgtgtcgacatactgaagagattggtcacgccggcgtaactgccagagaaacctctgtagcgcatcgcacaacggcttgggtttcagatcgcaattcgtaaggtgttctaggacgttcacattctgaatgaccttggagaagggagcaatatgcagccaagtggcaagcccggcaacatctgcgctgtggttaatgactgagtcaccaagtggccggtagcctgtcaagccaaggctgtcccaagtgggttcggagtcactgggatgccaccaaagagacctggtaggatcgtcaaaaatgcgaatgtacgcatcgaacgctagggtgtcgttgcgaagcaatgcttgatgctggagacgctgacgacggtggatttggtcccagggaccatggaagttggtccacccccaatcaaggttatgagggttgaactgatggcatgaggactgcatccaccctgtacgaggctcgttcgggttataaacaatgactccaatctgcgcagaaactctccaagtctctgtcgttggttcagcttggttagcagccgctgggtattgagacttgaacatctcagtccatgcttctgtatccttggttttatcgaacttaatatcgagatcgggtttgttggtgtccagttctgtctccgcaggtccacggagaaccttgaactccgtctcaggcaaagtatcatcgggcttgggcatcgtggatgagcattcaatatccaacgctcaagtggctaacgttgttaccgaacgaaaagaacttgattgtccaccagtgggggcgatgtatccgnaggggagcgcattacattaaccggttggag

SEQ ID NO: 11278 - DNA, 140 bp, Emericella nidulans
  unsure (1)..(140): unsure at all n locations
tgaacgaccaattgcatttcagagaccgtgatggtgttaggtaaatcaggatcatgacggatattctactgtgnggattgctgtagagttctcagatcactgcgtgtcagtgtgctnaaatgggactttgactctggatg

SEQ ID NO: 11279 - DNA, 246 bp, Emericella nidulans
aagccctactgtgctgccaaaaaagacatagcggtcacatgaacgtagttattaagcaatcctatctggagcctcatgctgggatctgtacgtaggctaggtgactatctgtgcgatccaccatgaacaatgaaccagctgaacctgactggtacgctggtgaatcactgcaaaagatgtaccgggcataacacctctggccttaccaactcgcaggcctaacagaatagtaatggcggatgctga

SEQ ID NO: 11280 - DNA, 1716 bp, Emericella nidulans
  unsure (1)..(1716): unsure at all n locations
ctcctgctcctaaaccacaaacactaaccctcatcagcccccggagcacgaaacctccccttccctccaccgttccccccgtcgtccgggccatggggcacctccaggagcaggcccggctggtctcccaactccgcctaacatgcctcccaacatggctactccccccgcgtccgcgcctccacctggccaatttcctccaccgccaggcggctttcccatcccacctccaaacttccagggcggatttccccctatgcctggcgcgcctggccaaggccctgcagggttcagtcccagtcctggtcccggactttctggacctcctggcggcggatctggaccagatgcgccaggcgggtttgcgccgccccccggtatgggccctgggggcttctcaggaccgccgccggctttgggggataagcgatgatccttccggtaccttcctatgaacgttgttactgtcgatgtcagatagactttttatcttccgtcttttcttcatgttttcggcgtcaatggtgttcgttatgctagtttcttaaagagtgaaaaagctgggaacaatatacgaggtagctattacatgataaatactcagttgaactcatcagaaatagtacgtagcaggctcaacaattccagcagctcgtctcaaatatagattggcgcaatgtaggcattacggtgcgctcattacagttgctgtgtgggcttagcagaggaagtacggaagaaatatatattttcccgagtaaactaggcccagcaagaaagtaagtctcagtgttaacctgactggtcatataacacgctaaaaaaccaaagtgatctatgcgaattgacagctttctgcgaaattgtctactgcggtgtccaccccatattgatcaatccggtaggggtaccttgcagatagagtcccggacataggcaagcggtttaggctgcgtcattgccgtctgagttaacccttatggcgtagctacctgcaaatgttcatttccttatccatggcgggctcgtctgttttgtagtcaagggaagctcatcacttgagggaatgctgttgcggggttcctcatatcccgcccaatatgcggaggcgctggggtaccaagtaacagttggagaactaaagtaggcatctccgcattccccctttctttccgcttgggatttggtaactcttggggtctcagttcactgagggaaatgtactcgctactagagcatttagcttattgttcaagtgctgaatttgctgccttggacaatcactccatgtcttgcatgtagaccacctgcatgaattgacggcattatccttggagatccacgcggctgggaatcatacataaaacatcgtggggtactccatagacactgccaactcagcgaaataataggcgtagcaggacccccaggtaaaccaatgggccgggacggcgagtcgatccctgagtggacagcacactgtggaaaccgattcttggaagaagaaagaagatgggaaattgaggggcctccatgtaactaggaacctatttactgcgccgctcatagagtctaggttactttgagagcatcaggtgatactagaaagagtggcagtcaaggtgggaaggaaaataccatggtctgtccgtcatgatgtgtccctgtgtcctggccaggccacctagngacttcccggggtgaaatcaagagaag

SEQ ID NO: 11281 - DNA, 2005 bp, Emericella nidulans
ccctcatgaccaggtccaaacccacaagtgcaaatgccatccgaaaaacaacatcataccctgctttatcataaacaataccacctaacaacggaccaagcagaaaccccagcgcaacggcagacccctgatacccaatggtctgccctaaattatcgagcggaacggagtccgtgaggagtgcgaggcccgccacagcgaccatagccgtcgcgccaccttgcaaaaggcgtgcgatcacaaacatgaccgttgtcttggcaatagccaggaggcccattgaggcaccgaggaagatcaggcctaggaggtaggggagacgtcgggtaggcgcgatgtcgacaaggtagccaaagagcgggcagcagaggaacgctgtcaaggcttcgctcattaggagcaggcttacccagtagccacctgtgctttgttttagctctttgttgttgatggaggatggatcataaaattacggtcttgatatggaacatgcgctcgttcagccagggctgttgggaggatcggcaccacctagacagatgtcaaccggattcgtcagagtttgaatatggttcttaccattgcatagagaaagtagccctataacaaacgtcagtaaggcgtcggatactttgcgattgacggcgattgacttactgtgaacgaggagacccaaactgtcgcaatgataaagaccgttgatgaacggaaccggaggagccaagggggccgtgtcaactgcattatgttctcttaacttttaattgatacgttgcgccctaaagatatctcgatctcttcaatggatgtactctcacagatcgcgagcaagggagcaagggatcgccgctaagcttgactactgacatcagttccccaccacgcctataaatcaccggctgcagctctccaactcaaaacacaagaagcaattccactgcctgcttatacacaatgcgctctccacacctccagtatcttcaaaaatgcctttccctcgccgagcaagctccttctcttcccacaaatttccgcgtcggcgccctcctcgtctcccgcaaagacggcgatctcatgaccgaacacgatgagcttctctcgacgggctacacaatggaattacccgggaacactcacgccgagcaatgccttctctcaaattacgcctctagaacactccgttccggaggaccgtgtgtcagaagtcctccctgacacgccaggccgcaaactagtcctctacgtgacgatggagccgtgtggaaagcgcctatcaggtaacctaccctgcgtacaacgaattatccagacaaggaagaatggacggagaggtatcgagaaggtctactttggcgtaaaggagccaaccacgtttgtaggggagtcggaggggtgcaagatgctgacagaggccgggatccagtggagggttgtgcaagggcttgagagggagatcctgacagttgcgacggcgggacatgagaattcagagaaggaggtcaaggaggccttgagcaaagtcgagacaaacctagatgatattagtgaagatgaggcaaagaggcaggatttgttgaggcggaatccgatgaagagggtgatggagacgaccgttccccggtagtaccctatactactaataaaaatgtacagtaataataatgagctgtatctgcttccggatatattattcttcctgtccacctcagcgttggggactcgggatttggtgtatggcgtttggcgctgactgggttagactgataagataaagctgggaggctgcggccggccatcgcttgcggccatcggaggtggccgatggtctttcatcaggccatgcgccgcagatttcctgtcccggttctttaaagacggtgatctgcccgtgaagctatcgtccgcagctagactgcttagatctcttcatccgtatcgtctcgtccgttcactaagcccatcaccatgtcgaccgttgcagctgcccgctatggtaaggacaatg

SEQ ID NO: 11282 - DNA, 364 bp, Emericella nidulans
ccatgcccatgatcaggcgcagctagctaatcttgagaacaccatgcagcactcgctgtacgcaatgactgatggtgactacacatgccgtacatgtgacgcaggtgccttacgatcatgggactttgacgtaccatactgtcgctgtatccagacatactatactggacattttgtgacgcacaatctgaaggctgcactacacacggagcagcacttctggcgagaggcttgcactgctgccgcctgagacgctgtcacatatgccgctgggcaactgttctggaggagctggaacttggcccttaaaaacaacaatcgcctaatgggagacgcttgaggcaccgtatgtgcaacctgaggc

SEQ ID NO: 11283 - DNA, 291 bp, Emericella nidulans
  unsure (1)..(291): unsure at all n locations
gaagggaaaatggactgtgctaaatgaccaggatgaggctcactgttatcgtctantcgcggcgagaacggggacatttcggtggaggacagtgatgacattgagctgagcaacgacgaccgagagaacgtgtggtgtcgcgaaatcctcatgtgtttctcgaggggaccaggatacagagctcgattattcgantcgtagatgggcatgagcatgctgctgatgagcatgaggaagagcagaggtattctcatgaagaggagcgtgcactggtgcgttgaacggggaaga

SEQ ID NO: 11284 - DNA, 178 bp, Emericella nidulans
  unsure (1)..(178): unsure at all n locations
aagtatggcactatggtccgcgnaaattccggaacatgtgagggcgtagtccatctcccgttcgcgaggacacgcgtcataggcctatacataagggaagttctggtatgctgattttagcggtgatttattgtgggtctcgaggtattctgctagttcgcgctgctctatcagaaag

SEQ ID NO: 11285 - DNA, 991 bp, Emericella nidulans
gtattaaggtcaacgagctgggcaaggccgggacttgacacggattggttggaatgggcgactccatgagcagtgactgaaataattgaattgcgtgtgctccattcgctacgctccgtgatgggtgtcaaactaggttcccgaaacttcccacggccactgtgggagcgagagatgccttcagcgcctcgaggcccaaaatagcctccattggtgagctcagagttagcgccgtatgcctgcgcgtaaaaaccaaactcatgtccgtagaacccctcatcatcattttccagggcttcggcgttggcagcagcgattatcggatcatcgtagagtaagtcatcattatcatcgtagtcaaaatcgtccaatacctcttcaaaccctactgcttccattgcttggctaatgcggctttcgtctgatacaagccctggttgtgagtccgcagtgtgagcactctcttgggccatggaccgttcgctgacgcttgtggtatgtccgagacggtcatttgcagcacactggtttgctgcgtctgccagagcgttatggaaagcttccaaattgtgctccgacagtattccgctgtgagaattaacaagcccaggattaggcatgttcccgacaacgctgccgtatcttcttggtgcaaatccttggtgatgatcactagctgagcttgggacatgtcccaggccaccatttgagcctgcctctatgccagatacttcacttcgaagctgatctggagctgtagattgcttgcgctcatacaggtggcttgtcgggtcatcaaagatagactcgtcgaactgctcccagcgtctttgtgtccagctaccgaatccccgtcatcaagtacaatcatcttcatccggatcgttgcacggacagacccgaattccggctttttgaggtgaaccagccgggctgtttcgtcattagatgctgtggtcgtcaaatgactatcgatgctctttagcttggg

SEQ ID NO: 11286 - DNA, 807 bp, Emericella nidulans
ttcatccaagaatatttgagcagcaatcaatgtactgaccacgctcggtaagactttctatccgttcgtcaagagtcaactgattcccagaaggtagatccagcctggcatctatcgtagcaatatctgcatctgggtccggctgtcgaacgacatattttggtttgaggcttggcggaagtggtttggaaggaggtatatctgtcttgggcccatgccgtaacctattgagtttccacccaagttctgtaacgagctctgtgacctcttccgattttgttgcggttccagtcatagagccgactgaggccggcgaattggcgccatccgtcgtacaggtaccaggactttcaccgggagagccattcccgtcgtaccccgtgctagggtatggcgcattcctgtaccttttctcgctctctttccatgcttccagtcccataaattcgcctgcttctgctgcttccatcatccgggaaattcttctggctgcagacgtagcatcatatctcggagcggacgtttgaagggctcgcttattctcgataatgcgctccgcgacggagactcgtcggtgcacatcgtaggtgatcgcagcaaccgtgcaaaagcttccaactgttgagcccgcaacggcaagattccgaagcactctcagggcgtttcgcgaagggacggccggagggccatgggcagacatgatatgtcgggaggctgcaccgcgaacggcgggcggcgtgttggaatatcaccaattgctcatgcaggataaagagacaaatatattgatcttcaaattgtggtaag

SEQ ID NO: 11287 - DNA, 2174 bp, Emericella nidulans
  unsure (1)..(2174): unsure at all n locations
ctgtctttagctcctaagatttcttaaacaatcagcccgctcaagaccagcaatattgatacggggcgggatttggcgccgtctccgtgtggaaacgggctgggtagtttctgccacctttgcgagcgacgatgctattgggagtaagatccgccgacggagctgagcgtattcttgatagagtgcaggttctgattctttcagggcagaaatgtctgctttgaggtcaacagtgaggccagcaatgactcctctcccagcctccaatatctgcagggcgcttgccggcgacccgtctacttgaaggacgacggaggccgccagcgatgtgaagtgggatatgttctttagcaggtgttgctggtcagctctgctcatccagcgaggaactagcagtggaaagagcgctacaacatcccttgcgactgaatttgcaacgctccaagccctgtctctgacacaggagtggaaggcatgttgacccgccttgacgcggtccaggggaggagaattctcgtggtgcagggcctcaatgagcagagatgcaggcctatgttcttctgcatgaatgctgcccgaatcttccggaaactcctgcatgagcatccctaccaaatccaggtacattgcgcgattgggatggctttcaggggccgcatccagcgcctcccatgcggttttaagagcctcagtaagatttcgtggctctcctttgtgccggtaaaggtcggccaggctggcactgacattatagagagcaatgctccgttctgggtcattacgaggaatgagtcggagagctttgcgttgtacctctattgctgcttcaaggtcttccagcgaatccgtaacgccgaaacgcaatctgaagagtagcccaaggctgttcagaatactgactttcacggaatcttcatcagtgtacagctccagcgcttcatttgcggttgtgattgcttccttcaacgtcgacatgtcactatttcgttcaaagagatacccaagctgatcacagaagacctttagacacgacacccgcccgattttgttactctcaggcatgttagctttacactcttgcattaggtggatcgcttcctccagatcaacaagcgcacctagctgctcatagcggtgggtaagctgcacgcttaagctgtgcaggatgtcaacccggtcaagaagaccgaccgatcccgtgacaagggcatcttggttgatgcttattgcccttctaagtcggaaaggaagcccacagcccataccgcgcctcaaaggcaagactcaaaaaccagaggcaatatggaatccgngggtgtcccggcgagagcaactcaattgccttcttcgcaagcacaatcgagcgttcgatatcgctttcatcgttggtaaaagtgaagcgatttctgaatcggcgactgagagtacaaagtcgaaggggtcggtcacggccatgaggcaggtaagcctcaatggcttgctgagcaaatgcagttgcagaatcaaagtgctccttcgaccctgacttcatgtacttagagtactcaaagtcactgatatccagcagcagatcaatccgccggtggtcatcttgctcaacgctccccaggacctctagccctaaagagattgcacggtctagatgcatcgcctcaccggagtattcgaagcggcggttcaaggcaagagccatatgccacttgaactgagccttgtcaagatcattgccattcctcatggaggcggaggcgtccagggtcttctgcgcccatttcaaagactgctccaagtccctcatttcgccgctgaagtcgaacttctgcccatacaatgtccccagatggtcccaatgtgtgggtaaccgagggtcttcctgggcgatattcctaacagcggacttttccagcttgatccccttgtgtagatctttcatgtcccctagtcgcttgaaccggtccgccagcagaaggctgacgttgtgaagcagttctggccatcgtgggtgaccgcgaatcagtttggcagcagcacgtccaagtttaatagcctcttcgagatcccgcagactgtcagagacttcgaatcgccgcccgaacgcgttgctaaggtttttgaggtatagggagcgttcaactggattgacctcatgaacatcattcttctcaccctcctcc

SEQ ID NO: 11288 - DNA, 417 bp, Emericella nidulans
  unsure (1)..(417): unsure at all n locations
aagcgagacatgtgtcccaattgagtgacntcacgagcactacgacgcgtgacggntgtgctcctaggttcgagattccaacggtgcagtgggaagcttgtggcactggaatactagaggctgnagggctatcgctgagcaactangtggagangacggagacgatgatgttgttcgacgaatgttggagcttgagggttcatgtccagagaagtgtcgcctctcgggacatgaaaaagggcgcctgagtggangtgacaagttggtgccttcatacncgttggtgataaaaatcgtctccgtagcgagacttcggagtcaagaattacatcaaaagagtagctgaacgcagatgggctgttcggggtatcgtgctagcgaactaatcaaacggaaacttgaaacttgtggtgcact

SEQ ID NO: 11289 - DNA, 461 bp, Emericella nidulans
aagaatccgcgagctgggcactgtgctgacaaccttggtacgccggttgtgcgaggaaggagacaaatgggacctgagtatacaccgttgcgagaagggcaagacggtgagctctgaacaacggctgggcagatctagttaaaatacactgctatactccgcgatctatgacatgagagggaggctgagtgagacgccagactagggatctgataacgggatatgaactaacagaccacggagacactacgcttgagacttactcttggatgcgccatacctaccacgcagactattatgcgaacgcgagcttatctgaacagcactgtggtgtagttttcagcggagtgctactgatatataagatggacagaccttgtaataagcgcatggaggtgtgtattgttacggacggaacgtgtggcgagattaaagcgcctgtgatacgcatcactagctta

SEQ ID NO: 11290 - DNA, 508 bp, Emericella nidulans
  unsure (1)..(508): unsure at all n locations
accaacgcagaggaacttgcgaagagaagatcgacagcaatctgataaaagacagaaagacaaaaagcggctggaaaaccgaacgggaagtgccacgncgcaaacacaggcacggcagcgtcaagcaacgatgatatgatggagcgcgcggaagcaaggcctcgcaaccaacaacaaggcgtaagccgaaacccacgcatcgcattggccggacccagccgcgcattgctattggctaccaccgtgacccgcgaggaagacccagcgagacccctgcgcggcgggaggagaacgacgttgagagcgtctcaaaccccgaggcggcgaacatggaccacgtgtcttggagcagcaagaaataacaagtagaacaaaacaacgtgaagagaccgaagccccagagagaaagactgcccgcaaacaagtgcagcagccatgccagccgggactaggaaaacctggcctcacacacccagcaatcgacacgaacagaacgggacggcttgcg

SEQ ID NO: 11291 - DNA, 701 bp, Emericella nidulans
  unsure (1)..(701): unsure at all n locations
agaacaaaggaagaaaaaagaggannggggggaaaaggacaaagaggaccaccaccaccnggcacgcttgccgaaaaaccaaggcagcccagactgacagagcgacgagcccgcgccgacgaaaaagcgagatgaaagtaaagcagcagagagaaacacccgtacgaagggcacacgaacgacggtagaaacaggggcacgcacgccgacacgcaaacgacgagcggaaacgaaagctgcgccgccgacgaccaaagcaagccgacccaagaaccgaagggagcacaaaagcccgggaccgagggcagacaacgcagggagcaaaacgggccctgacacgccgaatctggccaggaaaaaaggcagcaccgagaactgaaagaagcaaatgccgaggtcaaaaaaagccgcaatagcaacgcgcggacaacaaaaagcagcagcaaggcggaggggaaagccagccgacgtgaacccagcgacaccacaaacgcagccgggggggcaaaaccccgacccggaagccccgaaccacaaacccaacacgggacaccgaaaaccaaggggcaaggccaatgggcaaaaaaccccaacagagggagcccaaaggcagggggctccggaaagaaacaagaaggagaggcggccgggaaaaacccccgaaaaaagccccccgggctaagacccggagcgaaaaaaaa

SEQ ID NO: 11292 - DNA, 161 bp, Emericella nidulans
  unsure (1)..(161): unsure at all n locations
tgggagaggatctaagtantgcactggntgcgtcaacagnacgtgattgagtacacgggctgcatacggacgtggtnganagcggggttgatacgtacgtcgcacggagtccgaaaccaactccntgagtctggaattgatcggtattgcaagaggtcgtc

SEQ ID NO: 11293 - DNA, 2268 bp, Emericella nidulans
tcgatggcggattgacagccggggagccttgggatgtggaggatggaattgacaataacagtgagaaagagaatgaaaatggagacgggacaaatgcagcagttggattgagggcagggggcggactacagttctggggtagagcggctctgcttgccctggtggttgggatggtgttgtagatttcttcccatgctctatctttagaccttgtatacccagtttctgttcattccctagtcctaataggtgacgcattcctttccttgagagaaagctactctatcaaagaacctcaatcaccctctctcctggcctcttcaacctcatcatcctaccactcatgtccgccttcgtccaggtagcacaccttcactgatttcgccagctataatccatgctccctcaggtaagcaaagatggtctcataatgccccgtagcattcacatgcatcgtcaacgcatgcccacttccaggctgaatatgcacattgacatcgccagcttgcggaaacatctcatctcgcaacattgtcagattatacgtccctttacagtccccaagacaagtccccatatcgtactcggccaaagcaaacagaatcggccccttgaacccagcagcaggctttgctagtgctacagggaaactcacgaactcccctgcggtgccagtctccttgatgctatttgcgtacttcaacaattcaggctcaaagaatcccttcttgaagaagatctgctgcaggctgctctccgtgctctgaacaaggtaaccgctgcctcggtcaccgaagcgggacgggttgctggcaggcgcgtactcgagaccaaaggcacgctggccggcggcgccgaactgggtgttggggatcaaccccgttgagactgcgccgtcggctagggaagggtaatttgccaggacggcgatggtgaggcccgagccgtaggagtggccgacgaggacgactttgtcaaatgaggggactcggatcgacgacgcattttcagcaagggcaccagagcgcgcgaggatcgccagctctttcaggatctcagtttcgacgggtacctgtacgacctcgtatgcgtcaggcttgtcggaatggccgacaccgagccggtcgtaggttaggatcgagtagccggcatgcagcgcggcgtcaatgtaggagtatttatccgggtgtagttccgcatcccagtagctgcgagagtgtcagatctactgtagatgtatcaaggcagagagtataccgtttgtcaaatccaaagccatgcgtcgcgatctgcaggatgcccgctttattcgagtcccgaggaacgcagagctgggcgctgattgcaaaagtctcgtgtacaggtcttgcgcctctaacacgctcggtaggattgggcgcggaccagtgatcgagatcccagacatagtcgacggcgtcgatgttgttatctacacgagcaatgtcgtagatggagttgtttgcggtgatgggtatggacaggagcatgtcaacgcagggccgggaggcgtttgactgcgccgttggagcggcagccacctgccatggctggctcaggacggaaattgccgtcaggaagagtaaagatgtcatgattaatggctaggtccggtagcgtatgtttgcgaaaatgctgtttgtagtgcttggttttcgagcacgatgcttgctctatttatatatggcaacgagtccacaaggcttactcgattctgagcacgatatctagatctgtacggattctcctagcaccgcgattctaaaaacgcatacgtgtaaacgtatgggatccgtagacagagtatgcgcgatctgatcttatgggcgtatgcgtattcgggtacgtaccgctggagttgtgattgatgaccggggcaaggtgaaatcaagactagcatagcatgcacactaccaagtacttacatactcagtaaagctgccatggccgtccagagcacggagtaggagttgtctcgaagtcattcaaatctcggcagggacgagacgcaacagtcaccattgaaggggtgcattccatagttttcaaagagtttaaagctgaaaagttgctctgttagctgatatgaaagaaaagaaggctcttccattttctttttgcatcataaaaaagcgaaagctatatatatctgtttgcgaaggaagttcgatgtgaagaaaaaacaaaaatcgacgacaaaggagcgattcgaacacccgatcttcgccgtagcccttccggattttccac

SEQ ID NO: 11294 - DNA, 918 bp, Emericella nidulans
tcaggccctacacattgatctagaagtgcgggtcgggactttaagtgctactcgtccaagatggattacttgccctttttgcccttctctattctgtggtttctcgggggggttacgaggccagagctgtaccctcacttgacggcaatatggacatgacatatactttcaacgaagaggatttggcctcttccgttccaggtactccaaggtcggggttaagaactcctcctacctccccgctatggtctacgggatccgcaatcacaactcccggaagcagtggtgagatattcgtagaatactatatacactctagctaacaccacatcgtcaggaacaaccgaatatagccactggcaggcagaagtctttcagcctggctcactaacccaggccaagcgttaccacaataataaagcatttcagggtaatgacggcaagccgtcggggattgaggagaaaagatatgcgttctttgcgtcgatcagggaaactgttcttccacttctaggcgctgaccacagccctgaaaggctattcgagatcgaagagtcttcccatgcccaagtcacagactacgtgttactggattcgcagccgacagggtaagtaaccttctccagtacacatggctcagtcgtgagttgattgatggtattttcaggatacgggcaaccttaaagtcttatcaattggagggactttcgaaaatgatatattggcgcaacaacggaataggcggtatacttgccgatgatatgggcctgggcaaaactctccaggcccctctctctcttccagtacgtcaaggacaatgaaaaagcagacaaaaagttcctggttgtatgcccattgagtgttttggacacttggaggaatacctcgtagtctcgccatggcagggcattttttttc

SEQ ID NO: 11295 - DNA, 1656 bp, Emericella nidulans
tagtgttgttaaaccaccccatgcctgagggcacagagtccacagtcataccccaaaagtccaatttctctctggaaccctgttcctgagtggccggccctatggcatcatgtttctagaacagacgtagaacatctttattccagagtgcgggggagtgcagcaagggagttaataaccgtcgaatgagcattcagaatctcgacctaacggctcggggcaccgtagtcttcgactccatgtggagtgagacaatggcgagccactgagccgaggggatgaggtgtatcgggcaacaaagaccgggacacgatgtgatgagacagcccgcgctcgaatgcagcatcgagctcctcttgccataacagggcttgtggcgttccgccggtgagcggttacgtcgcatacagtacgttccagcaggtgctgtgggccgttcacaccgatccgaaggggaggagtccgagagttgacccggtgctatctttcaaacggaatccaacccaggtcgggaccgatcgtcctcttgcgcttgccacttcagctctgtacatgatcttcccagctcctcgaggcgccggtgccagaactaggtcttaacgagtgtggatcggcgtatgctgtccaccatgctgagaagacagaaaagggggttactgggaatcagggaagtatatatatatacgcatatacttattctattctattttattttattttattttattttattttattttattttatttttggcttgagttgagaaactgctgaaaaatcctcgcccgcacatacgcggacaaaggggcggttgcctcatgttttcagtcatatagctaagaacactagtactatcacgcaatatgaacagcgctaattctgtcttttagagaaatatcgtcttgagcgttcggcaaggcgcgctcatcagcaaaggttggatagcttccaaagcctacactcagacgatcagagctcgaattcgggaacaccgatcacagaaagggaaatcgaaaaaacaagaaactaacctgatgcatgaaccccattcatcccattcctcgctagccatcgagcactaagcttatcgagcgctgtcttgaaatcgtcgagaataatcgtatcgcacaagcacttgaacgtgaagcatagctaatcctctattagtggaaggccgcatatcaaaactgatataccttggtcagaactggatctaggggaggacggcgtactttccaaaacgggttgatgccgagcggcatggcagcgtcgagggctccagtcacgctgatcacgtctaagacaatgaacacaatggagagacacatggaggccagcatgagcccaaagcgagggcattcgcgcaccagctcaaggatgccaaagttgtagtgtgtcttgacgacccagaagatattgcatgtggtgtaaatccaccaaggatcacttgtccagccgtggttagctgaggcagtcaccgtcatgctgatgagactagtaggatggtactgtaccgaaataaggcttcccagggacggattttctggtaaacggtaagatttatgttgttaaaataggcaaagtttgcgtaaatctcggccacccagtatggctgagccaggacaatggtgccgacgtagaaaagggaaagcgtcg

SEQ ID NO: 11296 - DNA, 841 bp, Emericella nidulans
cggacagaagccggggaagggttgtgccaatggggcagatgggacgaataggctgggtggatctgattctagtgccactgatccagctacgtcaacaacccacttctggcttctttcagttggtcgtgggattctgatggacgcgggaactggcgtgaactttgagtttgtcaaccgctcatacggtggtctcaatgctactgtcgaggatgattcggatgaggagatagaggtagaacgatcgcaagatgacacggaggcgaacgttgaagaagaggctattcaggatattagcctggccatcaaccgaggatctagtcagcagagtcatcgtgccagatcggatgagataccggaatcccagacacccatgagcaccgatacgggaagtgaaatggagaactttgggattgccgttgcctccagctcctcggatgagcatgaaaatgatgaagatgatgacgacgacgacgatgaagacatggacgacagttcagaatcagatgctgcagagcgcctgttccggagttacggcttcgaaagaagcggacgagaggacgtggagaaccatgttccgtgctcatcgcacacaagggtctatcgcggacactgcaacgtcaaaacagtaaaggacgcgaatttcttcggattaaacgacgagtatgtggtgagcgggagcgactcaggtcacttattcatctgggagcgagacacctgcaagcttgtgaatatccttaaaggggacgatgaagtagtcaatgtcgtgcaaggtacgttgtcagcgtagaatgagccttaatgagactgggcacgtctaacgtgcgcaggacatccttacgag

SEQ ID NO: 11297 - DNA, 3107 bp, Emericella nidulans
tcggccagctcgttcgctggagctggggataccgtgttcttcttgcaccaaaggagcgatacattgaggagggggaaagagataatggagagacggtagtcgcgcaaggccgagagcgatataccgacaacccagagcaagtggatccggacgaacccttgataaggacaagggactcctccgatggctctactgagcaagcaactggctcgaatgatgactccgatgtattccactccggggaagcaactcctgtgaacacgcgcagttattcctacacgaaattgccgcattctggacatgaagaccaagctcacgaccagtcgcccatccttgggccacctccaagtgggccgtttctcccccgtcaggactctcgtggcgacatcttgtatttcccgaacgtggaagtcaaccctcaagataacaccctcgagcaagggccactgtcccgattcaaaacttcgatgggtcgtctcagggttcgaatcgccagcggttgggctcggtggactagcgcattatacagtcggctgccaccaagtctccagaaggtgttatcgaagtgctcagactctactagcagatttgttcgaggtgtatgggactttatgaacccgccactttgggcaatgctggttgctatcatcgttgcttcagtgccttctctccagcgcctattctttgacgacggcacatttattccaaactcggtgactcgcgcaatcaatcagaacggtcaggtcgccgttcccttgattcttgtggttcttggcgcaaatctggaacgtaacacgatccctcaggaagcgcttgaagatacagaagatgctgaaacggagaaaaagcttattatcgcgtcgttattggcccgaatgcttctgccaactataattatggcaccgtttctggctttgatcgcgaaatatgccccggtcagcattgtggacgatcccatcttcatcatcgtctgcttcctgctcactggagctccgtcggctctacagttggcacagatttgccaaatcaacaatacttatgttggcgcaatgtcgaaattgttgttccaaagctacgtggtttggtaagtcctcagaacctaaaacaggaacaagaacaagcaactgacgtatgtaggattctcccatcaaccttaatcctcgtgatgtgtgctctagaagttgtcgaatgggcggcgtaaagttgtctgcgttgggggttctttacgtatcattaaattcttgtattcttactggtgttgggagtacagggtgtttcaagcaacggtggtatgggaagggattcctttggatttttagaatgcgatccatacttttgtattgagatcaaatattccatgaataacgatgatataagccgacaagttcggactgaacagctagcagcaacctggtcctgccgggctccaatgcgtagaactacatggttgcttcaccaagaatctctgccttaggccaagatcacgccatcaactcctcttttcctcgtgcccatcgtctccgaactccggtcaacctccagctccttcgccttcatctgtggctcgtccggttacaattgttctgagttaattagttcagttgtcggtgtatcgtcatcaacttcgcttgcttcgcttgctatcccgacttaaaccatgagcatggtttgcctatcgtttagccgcctctattcagtacttcttgcccgaacgctgaagtccgacggcaatagcagtgcggggagacgggtggaggacaatcttgtgtggctggccgcagtaaccccaacaaactcttcagagacgtcattctaagcttcaagatagctccatctaatgcactgatctgatgatcgccctatgcaacatcgtggatcgcgatcgtacagaatctgatccctgcagtggtcttgacggtctactccgtaggtatctgcgactggtctccagagacccaacaccatgataaggcagcgagcctatcatagcattccagtcccaggttgcggtcgagatgcctagaaggtgtcgcgtgacagctgcgcggatccgatgtatctgaacccgataaactccatggatcgttgcggctcatgctctccttttccccatgcgccaggagcagcaacatgatcacgccacagaatgcgagatgacgctgcttattacattcgcatgcaaatcatgcgtcgacctagaaactcagttggtcacttctctataactctataaggtgcaattgttggagtatgatcaacttgaagttttcaacttgggaacctaaacaagtccgctgataagcctgattataaggtgattttaagtactttcgccttctggtcttgtgatctccctacgcgacttgacgcccctacgcaacaaccagcacattcgtcatctgggccatttgatatatgtacagagtatacctaccttcctcctttcgatctttcatcgctggaaccgttcctgtcgaatctggttctttgtgctccacaagccgaccgctgctttctaaatcccacatcatttctttgggcccgctatcgtgcccccacccggtacccctcgtcctcagcgcttgttctctcttcttttctcttctcagctgctaatatacgctgtcctcctgctcgagcatcactgtcgctctgaaagactgctgagcgaacaaaggctgttagatgttcgaaccggcgctgataagcctctgcgacaagtgaaacgtgatcgacttccaccccggacgagctactctggactggacttatcttaatctttgctcccaagagactggagatgccttcattcactgagcatgagcttcaaagtagtgtcccgattctttgattgcatcgggcctgcctctttttttttttgtctggttttgccgcccaaatagcgtttagaacctccgggccggccggagcttagacaacccccttgcccaaattccaccatttttgcaactttatctgggaaagccataaagctctggtttcaatttaaaggccttttggggaggttctccccacccccggtttcattttaaaacccccaacgtgttttaatggcgccaccttattttcttctttgcttttcctcc

SEQ ID NO: 11298 - DNA, 149 bp, Emericella nidulans
agcttggacacgattgaggatgaggtgctccgggatgctcgtacacgtcgtacgcgcatgatagtctacggacggagccaagcaaacatcggcagagctttacacttgaggtgaaagcgaccacctgatcttcgcctacggagactaca

SEQ ID NO: 11299 - DNA, 799 bp, Emericella nidulans
ttggcgattttgtctttgcggaaggggattcggacttcttcacagttggctggcgtgtaaactttgactttcactgtcttctctgcgttgaggctgagcaatttggattttaggcgcatcatttggtgcttctcgccgtggactaggatctatggacgttaatggcgcagtcgagaaggaacgtgttagtggaaggggacataccacgacaggtgcagatacttcttcgatgaagtttcggttctcgacgccgtcaacgtgggccgcaaaggatatctcgtcgacagtgcatcgtctaggaatcatgatcttctgttcctcgtcgttgccgttcatgcgcgttctacccatgccggtggctgcccgtgacatcacggcatggatctggtctggctcgttgagcaattgcttagccatcgtgccctccacgctatatcccgtcatgacaacgccatttcgttcgttcggagcccatcgttccaatagttctcgacttgtaccagtctgcagcatacccggggacgctagcatgacgcatcctccaacgtcgtcaaatcgttcaagactgcgcagactgcgaacatatttaaagtcccagggccccgcgctgacacttttgtcaccgctcgcttctgcttcggccattcgctggcggaaaagccgcttaatgttatcattcatggctccgatataagtctggtagacaaccatgcacctcctagccgtgttaccaatgtagtatatagggatcttttgcagctcggggtgtgtccccagtattctcaaggataagaaggag

SEQ ID NO: 11300 - DNA, 2603 bp, Emericella nidulans
tcctggaagttcggttccatccgcaagagcgggaggcgggccaggagcaggaggtcccgaaggtgcatgagtcttgtgatcatctgtgatcatgattgagttcgtgatcgcttgagctataacgttgtccttgtagtccttcagcgtgaaaataaccctgcaggcagacgttagctttacaacgacagcaactgaaacaactggaaatctgcttactggaatccaatcttctcgttctggtgcctgcagtagcatgctatccgcattggcagctccacctgcatagcacctgggatagttaccgaaccttcgcttgaactggtggttttggacggttcagcccaatccttgatctcatgagtgttgaagacaataacacgcttgtcctcatgcttttgaaacaactcatcttcctccggtttccgttgcttttttcgaaaagcccgctttcgctcccgttgtatgcagccagcgcatatcttcacctctccaccttccaaaggtttctcatcatccggtccctcatcgctacccatcggtgaggagctggatgagcgatatataggttcgcctctcgccttcgctagcgctttcttcaacttctccttgtcttgtaaagcacttgtgcaaaagaggctcgtatgcagctcaactgtatcagcggagcgctcggtggccggtggtgctaggaacttgggttttgagatcgtgtggctgggcaaacgtagctttttaactccatagggtaatgggtataaagtcaacttgatcggtatctgcgtctccacgcgtgatttgagagaggtcggatgaacagttaagatgggctggtgagcaggactcgggtttaaggctttctgtgcgggtgggggtacgaatccgaaaccaaaaggaagactgttggtggaaaagttgatgtctggatttggttgtgacccgccgttcatattgaaaccaccgaaactctcctcaaggtaagacgagggtgactttccgtcccatggacttaatggtgatttcacttgagacatccttgaagcctggaacggggagtgtgtgtcttttgagatgtgggaaatgaacggagcagttgtctggggaatccgctgcaataagtcagtcagcgcacatactatattagctagcaggttctataactcactggcgaagcagacttccgtttcgcggaaccaggcgcaccacctaaccgcgatcttgagcctttatgaaccctggattgagagatggatcctgtcttcagaggactagggctgctggcagcactttcgaagtcaaaagcggcgtccatggctttgttgctcgattcaaggtcggtttccgcagaataggggccttcaatatttggaagcgaagcgtcaaatccaaacaaggactcatccttcacatggtcgtaatccgtatttacccagtcctcggccgtataaccgaaaggcatgactgtgttttcactgtgtaccgcagaggtggaggatgcaaccgatgggtttcggaggtggtttcggggcgattcagaactcgagctccggctcgagtcttccggtgattcagcgggtgagtctgatgtgaaaacttcgggatgccgcaagggctcgtgatcctggtatgaccttttgagcgacaattctgacggtgagagacatggtggatttgattccgcgaccgtacgggaagatgaggcacgcgagaataaatcgtcaaagtcctgtccagcattctctgacgaaaattgtagcctcgcggtatccaagaagtccatgtcggtgtcccggtatgggtttaccatgtcgtcgtccacgacaatcggatccagaggcgggaaagtaggagacgaagtagagcccatcgttgggccccaaggaagacgagaggttgggggagaaggagcgaattcccttgagactattcaacaagatcccagcgcgcacttccaaccctcctccacaaccaaaatcctatgcacgttcggtttctggtacccgtccagacgatcagattggccaggagaccaactccacggggcgcactgcgtaatgatctcgagcttagtagcttaagcggccctccctatataccatgaaaaacgaatcggttaattgtgacaaaaatcggcgaaaaaacggtgaaacgagaatatatcagtaatcgtcaatgatctggggaagcgaaggcgtttgttgagaggggagcgtcagcggtcggcgtaacagtaagagcggagaccggagcgcgggtgggaaaaggaggaaaagggcggcaaaaacaaaagggccaaaattctaaggcgcagagatttgcttgcactatttgatctgtacagagttggcgagccggacacttatcacttgcgagaagaggataggaagtgcggtcacaggtgttgggatgccaaacccttaaggccacctcgacctcgatatcagactccgtctggatgactccgttcaacggacctgtcttggtggttgatggtagaagagggcgctgcttagtcaacaatcgcggtgagccacactaaccatattcggtaccagccacagaagccaggttaccgcattttgatggtcggaaatatcgatcagcgt

SEQ ID NO: 11301 - DNA, 2731 bp, Emericella nidulans
gggcagttattgatctctctcgccggccatgggcagtcatcaacattggcttcaaacgcgaaaagatcggtttttctcagcacggagatgattacgcacgggctgcagagctttgcgcaggcggctggtgttacccttcacattggctgcacctacggcgacaatgaccatcaccgggcggagagcgcgttcaaggcactggctgctgctattagggcggcttgtgcgcggagggttgagggcgaagtcggtgccggtgatgtggccagcaccaaaggtgtgctctaattgaataatatatacaacatacgatgctactccatgccatgcgatgacacgccactcaagacgcagccatgaacaccaatattttgtacacgttgaatacaacaaaagtaaacaccacgagggaaacaaatcaggcgtgccatcggccccacctcagccgcatctgcaggattcaggaacccatttatggggtctaagcccccaaagccttaacagcactagtccagtatcccttccgctcgtcgttcgcatctgttcccacgcagtcaacaataaacccttcccagccttgctctccattgttgcgaagcccttccctcacgctctcctcacactgcgtagtcagaaaccaaacccccgaaccaaagtccctcactgggtcttccagtaggaggtccagaaccggacccggctgatcctggatttcttcgaaacggtcagctatttccggaatagaggccgcgtatttcttgttgaagtcgacggattgcatgttgcgcgctgtacacatctcattagcatttccccgaaatattaggtcttagaagtatacgtactcccttttccctccacccctggcgaagggaaatggtttttattgtagcgaaactcgccgctctcaaaggcaatgatgcccagcacagcagcctgctccgccttgtttgtaaggccatacttcttgaaggctgcggaaagagcaggtgcagcctgggatgcggtagcacattcggacacaaagtcggtagcgttggcgcaagattgagacttcggtgctatcgcgagaatttgggccggtgttacggttgttgaaggggagtttgacggtggagctggctggcagggggaggcacctgctagggttgctgccaggaaggggaggatgagtgtgttgaatttcatggtggcggtatttgtagtcgctagggatatttcttgcaagtagaatatgaggaaggctggagagaactgaaagatgctggattgcaggagtagaagctaggtgaggaggctttatagggctttagaacagagcacacccgcttcagctgaaggtgattgtaaccaaataggtcaggaggattcctttcaacatgccaaagagttgggtcggtatggagccgcaggccaacaaggcgcaggcgaacaagccacccagacggcgagaatgctgatcctgtaagctgacagccccattgttctataaaaacgtggagatgcagagccctgactggtcaccgtgggcgccttctgaaacatgcgtcggcacaaggccgctcgcctgaaacggtgcctgaaactttactccttccattcacggaccattcagggtccaaatcaagggtctattggaatcggggtctgcagactctaaaatcttacattattattatctgtcggcggctcagcgagctccaggcaattgaaacgctgacagcacatccaccaagcggggcaagtctatataaacctttctgacgttaaaaagcataaggtataaaggggcacaagaagcgaagacgctcacgcgaagaaaagtctagtaaatcaagacatccaagagagaaaggcagatagtgggcggactgcgctgcctggcaaatcacaccgtatacagatcacaacacatcttgccaaaacatgtacaatgaaccaaagctctaataagcgctcggccaaacagtatcccaaaactccatacatgcgctgaaaaagaaaaacaatccctgggacatcttgtggtcgtcctcacgatggtagagtcattcacaattaaagcaaaatacaacccgctgaaaggccgtgtgttagagacaagcaattgagacagaaatagcaggtgctcagtcgcgtcggctgacgtattcgtaagaagtttcggtagggcctgattcttcatctttgaagctaacccggcggagtaaaatgggcatcatgccacgcgagcgacgcgacggggaaggtaagcgaagacctgggattgggagcttgctataccgatagcggtacttggcaccgaggaggagtaaccgcccgtaagccctaccacaaacacaatccaaccgcgccggcaagtacaaatccggcgacggtcaagagcatccagtgctgtcccatccagaagatcaacctggcatcctttccgtgccagctgttgcccacatggtgggtaaagaaactccaggagaaccggttgtattcatcctgcatgagtatacggacacgcgccgcttcggcaggactctctgccatgtattctttccaaatcacggataagaaaagcggaccggtcgagtacatgactgtaatgtacgggagaagccagctacggtcgtacgattgcagcatttctatcacgcggagaaagaacgggtgttgaggaacagatcccatggcgtcgttagaaatacctgtgggagcggtcgacgaaaacacgcagggagct

SEQ ID NO: 11302 - DNA, 119 bp, Emericella nidulans
  unsure (1)..(119): unsure at all n locations
cgatatgatgcccctgcgaagtggccgacatatgcttaagctagggatccagccatggcatacgcgcaaggacgaaantacgcttgtttgaggaacgctgatgggcgtnagatggcgga

SEQ ID NO: 11303 - DNA, 1649 bp, Emericella nidulans
gatgctatacgggccttcttgaggtctgcttcgggttctcagactctgaccaggccggccttcttcccttcagcctgtccctcaaggacgatcggtcaatccatacagcgctgaaagaaatcgacactactatgaagcacgcagagactcgccgactgcctctcgctgatgtgcttaagatgcgccccatgcccgagtccgagctcttcaacactgttctctatctgaatgagcgcaaaggctcctctgcaagacgtagctcccacatgagagggctcggcaaggagacatatgctgtggctgtacgggcagaaatgtcaaagagtacatgcgtggttgaatttttattcttgcgaaattcactcccggaggcctacgcggatgccatcaccgtatgcttggaatgcgccctctcccaggtcagagctgccatgtccagcgaaagcactattggggatattgacctgctggacgagtttactggtgctttgatcggcgactggaaccgcagccttcccaatcggagtgagcgctgtgtccacgacctcatccaggagcaagcccagcgtctgcccgcttcagcccaggcaatctgtggctgggatggcaacttcacatactcgcaactagagatactggcgacccgccttgcacagcatctccaacgactgggtgttgggcctgaaagcttcgttgcactctgcttcaacaaatctgcctgggccattattgctcagctcgcagtgcttaaagcaggcggagcgttcgcttctttggacccagtccatccagctagccggctgcgagctctcgtcgctgacctgggtgccaagattgttttgacctctagtgcctgtttggacaaggcctctaacctgggggcgcagccatttgtggtaagccaggcaagtgttgaacaattgcctcttggtgggcatgatacaagcctccacgaagccaggccttccaacgcggcgtacgccattttcacatcaggcacgacgggtatgccaaaagcgacggttatacagcacacggcacttagcacaacctctctccagctcgccaagtatcttggacttgactctagcacgcgaacgctgcagttctccagctatactttcgacgtcagtgtcgctcgatattcacggaacgctgatcaatggtggctgtgtgtgtgttcccagcgacagtgagcgggtaaatgacatatctggtgctatccgccggatgggcgtcacgcactggaacagtacaccaggaatagcgaatactatcaatcccaagaccgtcccgtccctggccacacttgttacaggaggcgagaaaatgtccccgggccacattgagcgctggagcgaccgagctgtgatcaacgcgtacgggccctcggaagcaacaatcatcgcaaccgtcagcatcaaggtcgataggcagggtaacctctctaaggagagccgcagttctattggaaagccggtctgtggccgagcctgggttgttgatccgtacaatcctcagcgtctcctgccattgggggcggtaggggaacttgtccttgaaggctgcaacgttgcgaggggctacttgaacaacgaggaaaagacggccaaggcctttatcgagcatttagggttcctgacaatgaa

SEQ ID NO: 11304 - DNA, 378 bp, Emericella nidulans
  unsure (1)..(378): unsure at all n locations
gtgtagtatgtgttgccctaagtttaatctgcccaagctcgctctacaggaatataatatcgcctaatgtcatttttgctgtgagtggcaggaaatctgtggttccgaatgtgctggtggaaagtgttctagcgcttancgtatnatggattgaccagaatgaattgatttttacaacctgggtaggntcgagcggttgctggaccagaggttatgcgctctcgacatatcttttgtacggtctcgctcatttactatatacgtttggatacctaatagactcgtgtatggtttgagacatcgtttatgcatggctcacgttttcgtggtgtcgacctggttantgtcaatacgacggatagtctactggtattgcat

SEQ ID NO: 11305 - DNA, 155 bp, Emericella nidulans
  unsure (1)..(155): unsure at all n locations
tcgtcacggtaaatgaggataatcgagcgatatgctactgtgcggactgatgtctaggtctcacatcattgactgtcagtatgncccactggcatttcgatctggctgtgaanacgccagcgantngattatgccntgtagtctgtgaagtttga

SEQ ID NO: 11306 - DNA, 112 bp, Emericella nidulans
  unsure (1)..(112): unsure at all n locations
gtgcgttaactcgtaatgatgtttgtgcgactcgttactcgactcgtatgctctccttttgttcagtgacctgtactacgtaggcaaccttgagacnagtcgtaatggaaag

SEQ ID NO: 11307 - DNA, 2644 bp, Emericella nidulans
aaacatggggggcctaaggaaaacccgcccaaaaaaattgggttaattaggggaaacccggacccggcaggccagtttacaaggataaaaaaagatggttattgaaagataacaggttggttagcgttagcgaagttaggccttggaattggaatttttaaaaagctgggtacagccaattaaggtgacctaaaaaagaggccaggatgtactgggaaaaggaccggtatgaacaccgccaagacttccaggggtattttgaaactgatctgattcttgaaattcttataagggccctctcccaagcccttcgcaaacacatcgtccgtatcgccatttgggtcattggccgcttcatcttccaaacaagctgaagacgcgaagcccgctacatctccagcggcatttgcctcctcaagtttagctgcgtttgctggctcagagcaatcacccttcggctctctcggtgcgtcaacgccatcggttttcaaatcatcaacgagtcccgttcccgcgggttcagacaagcccgctgccaccggatttgcctcggcagccaaatcgtctggctttgcagggttgggaggagggttctcggggttcagcggcggcttcggggctgcagctgcgagtacagggggtggtctgaccagttttgctgctcctggtggctcggctcttctgggtacttccagcgcgaagccttttggtgctgaagctgactcggatgagggggatgataaggacgatgagggggagactgggcctgcagagttcgagcaggataagaccgacgaaagattctacgagcggcagagtaagttacctgacgaatgcctattttgcggcccttgctgattggcaatagttgaaaccggtgaagagcaagagaagacatacttcacctgcaaagccaaactcttccacttttcgaacaaggaatggcgtgagcgaggtctcggtactttcaaggtcaacgtcaaggtcaccgacgacgttgaagacaaaaagggggcgcgtatgatcatgcgcgctgacggagttgggcgcgtcatgcttaatacgcccttgttcaaggggatgaaggttggcgatgccgcgggcaatgagccgaaatccacaaaacagattcacttggcgagcttggaggacaaccgttctgttccgctcttgctaagggtgagtcacatatccaacataatatgtctcgcgtttgatagagattggaaagaggctaactgttattgagcagacggggagtgaagaccaggctaaggagctgtaccatacgctccaggacttgttaagccatcagtaacttggagactcatttgtaccttagcagagtgcccgtgagcaaccaacagttcctgtatgtgtatcttctacgaagagtgatagcataaggtctgcaggcggctattttgcattcggaatgggattgggaagtaagttaagccacgaagtagttggaaacctgggtactacttcttcataatctattgttagttagtatttgcatataccaagtacgttatatgatcactcttgacctttgtcgtacctgtccacgctatccgtaattcgcaatatagattgacatactgagcacgtgactgcgcgtttgcctcagtatgactcgagatgacattttcagcattctttcgtctacggacgttcggttcatcaaccacaatggggcgcccaaatggcccgacagaagacaaaaaagacggcatcattcactggcgctggacccgctgagaatagaaaccatgctgagcgaaccagcagccaacataatctgaccactggcgtgtcgggatgcgcgctgcaagtgcaacaaagcgcagaggatacaaatgctgcgagacagaaacgtaaacttgacgagacggtctctgaaactctgaattctcaagagaatattgatgacaatgtagcccccgtggaagaagaatctgcacaaagcaagatcgcgggttcaatgagcgcgacaaagcagcccggcaagaggcgcaaatcggcggcgagctctgaaaggcagcaacaaccgcggaagccatcccctccatggccagatcatttcaaacacttatctcggacccaccgggccttgaatctaatctacaccttctgctgcacgcggaaacacttcgcgacgacattcgacaatatcaagaaggctgtacaagcgcagacagggacagaacttacaatcgaggatattgcgcgagtacgtgtccttataccgcgggctgtgagattcgagtatgtgaatgaggcgaggctggatgttttgagtgctggagagagagaggtcaaggggtggggcggggccatcgataatggaaatggagatgaaatgaatggtgaggcggatgcgaaattagacggcgtcatgtacgcgttgttattcgagtttctggatggagacttgaagaaggagaagaaaagtcttacttcagggaccagagacaaagacgaggatctgaggatgccggtttacagccagaagcagatgctgggtctgattgagaagcggaatggaaagttcgcagacgcagttgatgcgtttcttgtcaggtgcgaggatgaaggggttgacgctgtcgagcggctggaaagagagaaggatggattt

SEQ ID NO: 11308 - DNA, 259 bp, Emericella nidulans
  unsure (1)..(259): unsure at all n locations
ctgggctgtgcgtggagtaggcccgccgactttactgtcaccaggcgcagccggttccgtgaggcggatgccgtagacgtcagtagggtcncatagggcacaggcgcgtatgatttactactgcgtagatctatcngccacttgacgtgtnacancggcccagatcatgacgtcgttgcactagtggtcgtggctcgcatgatcaacancaganccctcnggacgaaacctgcattgtaagccgtcacgccagggctgg

SEQ ID NO: 11309 - DNA, 561 bp, Emericella nidulans
gatcggcagcgcctggcgatttgaccggaggtattcggggggtgctagccggtgtgcaccgaggacgtaaccacaaccggtgtcacaagggggagggaacgatgctgtcaattatgcgataccaacaaggggaccatacacatacatagcctgctgcctggacagagatagcttggaggacatctgaccagacataaccagcaactcacaaaatcggagcacagatggcagagaggatgacatgcaagcattacagtgccgacacgagggccatcgccatagggacagggcagatggggtgctacacggactatttgaggagccgagaggacgcaactgtctaccgggcatgcgggcatcatagacatcatacgacagagatctggccgaaacacgatgcatatggtgcagcttaattcagcaaaaggaccggctatgcatggccataaaggacgccattataggagaagtatactagacaatacgagtgcccgggacactactggtacagtggtgcactgtgaccaggagcgcagcgatgatgatcgatcgggtcatgta

SEQ ID NO: 11310 - DNA, 592 bp, Emericella nidulans
cagagggttttgctgagagcccagagcgtggctgatggacgagacatgctgtagaaagacgctaccttgtttgttcggatgaatgcgcatatctatactagggggcagttctacaggaataatatgactcaagaaatgatgctacacgccggaatggataaatagaggtgggactcggagacgatacgggctaaggcggagggtgctagctgatagcccgatatgaaggatgcccattgctagccttgcgacgagatggagagcctagcgacggcaagcagagctttggccctgacgaggaatggggccctcactagaagaggagacttgacgatgccgatgacacttacccgatccacaccgaatcctttctgaccggatctctaatgggagagcaaaaggcgcagatttacgattgactgatgcacagcgctcgagcgcactctcgtttaaacagcctgatgcaagccgagttccaaaagaaactttgtcctctgaaggccagacatacaatcaaaaatctgggccataataattaccccgcccagtagcctggaccatctgaatacctcgaattggaaactaacttaag

SEQ ID NO: 11311 - DNA, 604 bp, Emericella nidulans
  unsure (1)..(604): unsure at all n locations
ctcgggcagcactcccgacaatggtggacgctaaacaggcagaccataccaggcgtgtactggcacacaagatactgatttgtcatatgtcacaggcgtagacagaccgtggcaacacgcccagcatcatggcctaagtagccaaactccactaccaggctccgaaactttttagctcgctaccctcgccagagatacatagctgcagctgcatcaatatagaatggatcatcgacactacctcgggaatacgacagcggggcccagacataaccctatacgtcaaaccgagactcgcaggaccaccaacgcactggcccaagagccaactctcccacgcgtgacctgttatgggcgatccatggataccggaattcgttcctggctcatatgaactatcccaccgcgaaatgtatcgcatcgcagaaaggactgtgggcgccggcggctctggatgaggttggctatcaattataatgtatgaggcactgactacaccggcgcagaagacgacagagtacactgcgaccctacgcgcntagcacgaattgcaggtaatggatacaggatacggacagaaggcaagggccacgagtgggacaag

SEQ ID NO: 11312 - DNA, 3178 bp, Emericella nidulans
cttttccactgccgtttgagctgatttaactctcgagtacatcacatattgctttgcatgaatggatgaatggatttggtaatactagtttttccatcatttatgatagatagctgcgcaaagtgacgtgtttgtggagggcataattggcatttgctagatgctatctagaaatacggtctagcacctagacttcctccaacctttttttttttttttatctttggtgtttgcttctgtttctgctttggtattttttctttttttttcttcttttcttcattttccctgttcttttctttcttcgcattcttcccccactggtttcttttttctggcttctttccccttccagccttcattcacctaacctcatcccccgagtcgtacccagcgtatattttatgtacgcctttcttcggtccattaaaaactggccgagaaccacccgcatgcctaacatgcttcaagttgagtcataattaggcatatccacaacatttgcgggaacttgattggcgtgtgcgaacaggaaacaataatgcatcggatagcataagccgtccaatatcaacttggaaagccatcgacagccttttcccagctctgaagtccaggccgagtatgaggctcagcggaagtaaaacgtaagagcagcaagtaacggtgtaacaacgcagagacgaagggacgaaagtgaatatctcgccctcgtatgattgcgccgaacgcaataacgccttgcgccgatgcacaataaagaacaggacccgagaaaatagcaaatcaagcctggaaacacctgaatatatgtgccataacctgcccgtaagcagatttgaaaaatcattcaacatgggccagcgaagtgtcatcaaatgatatgtcaacagccgcccatctagcatctccccaaagccaagaccgagaactccgaatcatgctttgaaaaaggggcggatcaaatggcgataacttgaacgtatttacactggtgataggggaaaagaagtcagatttctgggacacttgacatgccacaaatgtgcttgaactgtgttgtgagcgacgaggaggatagagaagaataaaggaatatgcatgcaaaaaaaaaaaaaaaataacacccgggataaactcaatgagatgaggtgttcccggcgccatgggcgttagacgaaatacacaagcactgaaaaccaggtaacgggttggagtatggaagcttggtgaatcgattcggtatctcagacgaatggagatagcagagaagaagaaaaaaaaaggaggcgattacaaaaactggaattttcaatatagacatccagtttacgaaacctgagccgggggttgagccttcccgccggtttgtccttgcgcggcgttgaatttagtcccatcattttgcatgttgcgacgctggccttgtccacgtccacctcggtatggacctcgtcccttggactgataatgtcccccgttcgtgtggtgattatgacggcggtcactggggtttgatgctgcagtggcaccctgggattgttgaggcggattcgagattggccgaggaatggtgtcgggagaatcgtacacataaagcttcttatcgatattctgcggaattggttgtatctcggttcctaattcctgctcaatcttatacaggttgaagcgatcatcccaattaataaggttgattgctaaacccagatgtccaaaacgaccggaccgaccaatgcgatgtaggtaggtttcggcatttttgggaaagtcaaagttgataaccacgttgacagcttgaatgtcgatacctcgggttagcaagtcggagcacactaaatgcggcaaacgccattccggaaatcgtggaacacgcgattgcgatgttgttgcagcattcgggcatgtgaatagaaacacgaatagccgagctctgtaatctttttcgccagaagttccactcgatttgttgaattgcagaaaataatggactggttgatctgtaattttgagaaaagtgtattgagacagtgaactttctgtttctcttccacaaatgcataatattgtgtgataccgcgaagggtgagttcgtccattagattaatctcgtaggggttgcgcatgtgtctatcctgagctgggcgtcagaacgcgggcgaacaagaaggtacccaaggaaactcaacttaccttgaaggacttgacaatcattgggaacgtagcactgaagagcatgacttgccggtctttagggtgaaatgagagaagttgttcaatgacaggggtgaattcgggagaaagcaacttgtccgcctcgtccatcacgaaggtagggcattcagacaagtccgcaacacccttactggctaggtcgaggactctgcctggcgttcccacaaggatgtggacagcatcattgagtctgataatatcgtccatcagtccggtacctccggtagttaccatgacgttgatcccgaggtgtttcccgagggttttgcagacgtgagaagtttgtagtgcgagttctcgtgttgggacgaggataagcgcctgtgttttagtgcttttgggattgatgcgctcgagtgtaggaatgacgaaagcagctgttttgcctgtgccattctttgctctggcgaggatatccctcccggtaagggctaccgggatcgtttcctcttggatgggcgatggcttttcgaacccagcctcgaaaattcccatcattaactctcgcttgatatagaagtcttcgaattctaggcctttggtagcggtaacgtcctggaaaagatgttagattgacgaagcatatcctgtatgaaatacaacaaacctccgtctgcggtctgccatcttttgctgggagctttagttgttccttccactttggatctggatttgcatcactaataataggcaagcagccttagtaaagggttatccaaaacaattcaaaacggtctccataccccaaacttgtgttaagctgcgtcgcgacagaatcggccattgtggtttacagagggttggccttatttggagtctgaagcgtggttccaaccctgaaggatgagttggattttacgccaagagagaatttgtcaaccacaaaatgtaagcgggctgtagaagaaatttcttaactgcgaggttgtacagacgagcaagt

SEQ ID NO: 11313 - DNA, 170 bp, Emericella nidulans
  unsure (1)..(170): unsure at all n locations
ggtgagatatagaggaggcgntgaatggtaagaacgaaaaaatgtcngttgtgaaaatgagcacggatgggatgaagttggaaacgacgttgccgaagactgagtggtgattgaattagatagagtgagggttcaaccaagaatgcatatcatatactatgatattaatc

SEQ ID NO: 11314 - DNA, 2323 bp, Emericella nidulans
gctgatacctgcaattaccattaataccttcaggcaatagttgtggcgatatactcacttctcgctctttgcatgaaagtatataccggaaacggtcccttccacttgattgaagcagatgtaataaaaaccttcaaacgtagcgccggatatcgtccgtacacgatggtccggaacaaggaaatgttccttccagcgcatgaaaatgtggtcacgctcagcaaaatcccaatacgtgaagtcggatctcttcgcttgtttggccaacggtcgccaagccggaaaccttgcccagtgaagcatgtcggtcttctccgaagcaccccatgattcgtttcgggtcttgaaggtgtgcttcgtaccgatgatctctccctcgaagaaggttgtcaaggtaggatggtcctcggtaagacctgcaaggatgacaaaagtcaatcgcaactgtttgataggaagaccgggttgatctacaaaccttggatacggagataaccgcaaaggtaggactcagccatgtccacgtgcttgatttccacatcgacattataaacctgtcgatcagactgctgtgtgccagtgaacttgctacccggtcgcaagaaagaagaagtataattgggaagaagctggtgcatgttagctacctcacataaaattgccaccttgagatttgattgcctcatacacgtatgttggaaaattcgtaactcagtaatgatgcgttaggcgacgaggtcaccgccgaagaagaattggcagaacgtctagacgcgctcattcttcccatatcgcgttcatcttccgccctagacatactgctgggagaagcactagtatccatctccaccttcaacggctccgaatccgcacgggcgatcgcatcgtccgcccgcgacaacgcaggctgcggcgaaacaacgcctggggaaagagcattgtcgggagtcgagtcacgttcggtcacagaggcagactccagctcttgcctccaggacggcaacggctccggaggacaggtcgtgcgagcggaaatctcctggatgaccgacgtggcagtcaagctaggcgtgctgtcactcggagtcggcattgagacgagttaacgaggggatgacatcggatcgaactgactgttggatgggtggcgaacgaaagaaggcgagtgaacagccagacaatgcatacaaggagcacaaagacgagtgaaagagtttgttgaggttggtcagaaggagagtgaggggtttcggatctgcaagaaagcaaagaagaggaggatttagactaggggcagtaaaagcaatagagagaccagggaatagagggactgatcatggagtgacagagcagtgagcgcaggcctccctctgcccaaagaggataggccgatcattggccgcggtggccgcagtggccgctgggtcatgcgagctgcgggggcggcaattattcaggcaatcaggcacccaagccatggaggtgtggagggcacgtcctgtcatctatctggggctacagactctagcaagctctatcttaaagagattcattctcattagctaccagccgggtattttacagccttattccatgatactgcatgtgcaactaggggcgctgatgcagtctgcctctttagatcggcttgatctagatcgttgttagaccaacgtttcaatacatccacgagcctgaataagcataccttgaagtgaagcgatatcagggaaaagatcagcgccttcagatcctgcactaggtagtagaacactcgaagaccctccgggtctgctgattctgtcacatccaccagggagccgattttcgcggtctgcgccatgtcagaaagcaagtctaacaacgactcatttaagaacacacctcaaatgaaatgtgttcatttcctaatcggatttccagttcttgtcgtccgtccttgttcttctgaggccacttcgaatcgtcctccctagccttgtattagacggacagtatcatgacaataggacaagcatgcgtactttaaaatttcgctgttctttataatgcgcttgacttcctggatcattgccgagctcacacacactatcgccagcccattagcaacgcgcagcaccattttcggtgtgtcctgctcactttctttacggatgagggagtcattgcgatagttggagttgttcgcataccgaacggcagcgctacggccatcgccaagggtgcgaaaatcgaattctgccatatttagtaaattgtaatatctcgagtattcggctctagactcacctagaaactcatgtccgaaccgcccagagtgacc

SEQ ID NO: 11315 - DNA, 262 bp, Emericella nidulans
  unsure (1)..(262): unsure at all n locations
tattctgtgtaaatggacggatctggaggatcgctcgatcaatgccctgggtttgagattaatagtcaaaattgctaaggaatagangaatantaganggcganattttgcgctggtttgnactntgttcgaataacgatggcagggaccaaggtttgtntagggatttgtgagaggttnggcgtccgttaatgcgtcgcagagccttgaaanttatactgacagtcatgtaacgatagcagtgattacttgattacaagta

SEQ ID NO: 11316 - DNA, 1094 bp, Emericella nidulans
cgatacgcaaagtcgttctctacttctaccagcattccagccctgttacacgtaaaccgtgaagcacggagcgaggcgttgcgcgtttaccggccgtcctttgctgggataccaactctacccctcgaaccacaggctcgatctgaaacgtcggatccacagcacgaaattcggcctcagtccgaggttgaggctgagaatgtgccgaccgagaatgtacaagtgcataccgcagatccaaggccaatctacatagcattcaaccatgaaactcttcagctccgcgaagacgtgctctcctacatccccgagccagaactgcgccttatagagcggatgatagtcggaattgccgatttacaatactttggacacttttatttggacgttatacggcgaatgagcaggttgaggaaattggagttaattgtgggagttacgcgcagtgaacacttactcgctggaaccggacgatcgactgatgttggcgaagctgagaacattgctaacgtttgggagacgatgaggaggtttgaatgggaggtggaactgctaaaggaggtgtttagggacgcaagagaagagcatcgaagctggcgttgtccggatgtgagaattgttatgagaaggactggagctgtgcttgggattattgagggggggggaggtgctgaataagggaaagcgcgtgctttgagccagatatacgtatctgatgagctgaatcttgcgctggatgattggaccttttataccttgatctcactctgagaaacgatgtattagaccagggagggttgaactgggctactttcttgcccgcgccgagttagggaaagccctagcctagctggtgatctcgtctcaacagcacctgtaaagtgactctctagtcatatttagcgtaattggcagttagaggtagttttaggtagaacatatactgtagaaggagtcgttggaaaataatggagcatcctattatcgttacagcatacaaatatttggtgcttcgttgagaatcttgagatcatgcaatctagcaaatttgcagcttcgattcgtctctcgcgcgtttaaataaatacatgggt

SEQ ID NO: 11317 - DNA, 1348 bp, Emericella nidulans
tggctatccttaggtgtacttgcttattaggatataggctttaaagaatgtagggacaagaacatgaactcaaaaagccacgcatatcagttgacattatccaaaattatccgcatccttgtcacgtatgaatattatgccagctaaagcatatggcaaataccatagctttgaagaccagcagagaaaggggaatgatatcaaacaaacaagtggtatcgcaacagggcatcaagccatacaataatcaccaggagatgtataggttgagaataggtatggacaagattcctgaaaacacgcagtcagattgaaggaaaaagaaaactccgcacaacgcctcctgacccgtagaatggaaccaggtcgaaaaaaagcagcgcatgtcttttgcactagatggtaagagacgaccaagaaagggcccaaaataacaggagaatagaagaaaacaaaaaccaatctgaacctctccttggttcagttcatgctgttcatttagccatttcagatcgtcatatgcgcggctgagaacattaaacagctgcaatcagagagccgtatcaacaagaccgctgcgcaattcgggctgagtgttgcggacttattgcaatcagtaccgcctgtgaattagctagttgaggctcaggagtggaatagatcccaggcacgtgcgcataagcccaaaaactcctccttctttctccgctgcgtctctggcgagtctcttccagctccaaatggcccgtatgcagcatttgatccatgtcccaatgccggattaggtctgtaatgagagtcaggcccataacctaaaggagggctaccgttatccctttcatattcacttctggtgcgacggcgagcggttccttcagccgcatgcggcgctgggtggtgtgtagcctgtgcgctagccattgatgttgtctcaagatgaggcacggcagacttcggaccgttggtggcacgcggagacggtggtgtgggaggttggtgtccaccgtaatgcacgatacgcggcagtaggtcttcacgtccacctgacatatcttgaaccgcctcctcagcagagcgatactcgcggggtctgttagtctgctgtgaacttcctggaattctgggcgatggcatgggaggtaagttgttctgctgatagggagtgcggtttgcgtcacggtctctggaggccgccaagcgatcggatccaaaaacatctgagagaggcggaaggcggttgctggtctgcgtcgcgggcacatggtggatatgtgaagtggaaccagcgttgggctctgattgacgacgtggcgtgtaacggctgcggttggtgcgaccgtaaatgttt

SEQ ID NO: 11318 - DNA, 157 bp, Emericella nidulans
  unsure (1)..(157): unsure at all n locations
gggattttgatgtcgatgtccacatcanagaganttgattatgncnttgagtatgtgaagcttgagntgntcntaggcttcgactgattgagatataaatacgttccgaacacgttaacttatgtcctatccttgnaagatctggttgagacgaagg

SEQ ID NO: 11319 - DNA, 3270 bp, Emericella nidulans
  unsure (1)..(3270): unsure at all n locations
gcaaggaaaccaatgaggtcgaatagcgacacctcgtacgcgggttcccccaagggttaaactttatgttgatcacaccgcgctaaagtaattattatttttaaaaaatttatactaaaggcctcccacccccataaatccataggcctccggtcaaccttgcaaggccataaaatgcggatacatgccaatactccccagtttgaacaggggtcggttggtctcccccccatagctagctaagatgtcagagatcgtcatactgacatgggggtgtcatcaattagcttgcaaaggccgtgtatgtgcaaatggcttcttgactttcggccggaacaaacgggtatgtcgttactgcgatggcgcaactggccttgatcgctgggtaagcccgccggataaagtggaaggaaaagcctcgagctcggaagaagtccagcactgccttttcaactgtcggataggctgcacattctggcttgctgaacgggatcccgcggtggaactagacgagtagtttgcggtattcgtctttgtcttcttccgtgctgtgcagatattggatattcgacatgtgcggctgctccctaataccggcagtgtctagcgtctaagttgcttcattaggatggtcgataggattcgagaggacacaggtcagagtccagcctaggcattttcgaagccgtcaaattagtaaggaatgatcggtgaccgttctcagcattttgcaagattcgcctgcggttctgtagtcagtacttctcggcaggtcttaaatagataaccaaagcaatcctgccggagctatgctctagcgccctcaaaggatgcctatcgccatataccgagggttgctccgagatctggttccaccagacatgggtcagtagtacagattctgatatatctcgctttgcaagcatgtgagctacagatgggttccaggagcacagatctcggtgagtttatcccagacttgcccctgacagcgggcattcaccgtgctatcttatccatcgccgtaaatagcttttgctaccaccttgaggttcgacaggttcgtaactttcactctacaccggtaagcctgccaagacccttgggttgccgtctggtacgtaacggggccaggactcataattaatgttaaagggaatcctcctctttgctgagaaattccacgcttgcccattgtccgcactttcacggcgcttcttaagcgaatgagctgttttatacaaagtatgcaaagtctaccgacctcgccacggcctacaaaaaagcccgtcaacactctcgacttgctaacgcatccggtttaatgggttgagtatctgcagtacggtaattttctgggtgcgctgcagccagggaccctgtctgttagtcatgatggccatgtctgggacctgactacactcggtgtattttctggctcggaactcttattgtacaggcttttccaccacacgtgactttgctcgcgggacatattagggtttgaaccggatgcatgcgtatatctgacctcctacagttggcagtacctgaagagatctggaaagtaacgaaagttatctagtttgtagagcagtgggtacatttacgctgtacagcggggttgcaagcaaacccattgtatgcacatcaaccattttctctcattcttcctcccccgtctcccttcctcattctaagaaagaacgtgaactaactcgtatccagacctgcaatttacttgaattggctaccgtcgggcgtatccaaatcttcactccacgttctactccagagtattttaaaaagctgcaccgcatattagggctagtagattgagcgagatcagacactggtcctcatcagaaacactgatccccggtgacaccgcgatcaacttgcttcatacggtacattcagacctcagagcactcaccgcgctcataaggtagcagttgaaccgcgaacgaatcgccaggtagatatcgttcatgctatctccagcacagcggaacatatccaagaatatagactgaacagaggataattgttagccgtgatgagagaagattgactggacggaagtccgccggtggactgctttctgtgtaatatgttacctctgcgaattccttccatagcatacaatggccttgcaaattcgtgtttataaattaggggccccatctcccgccactgagtctgttcagacgcccagttgaatataggccgctagctcatccgccaatatacctggttgctgacactgctgagtggtccctgactagagacggatcagtcgcaagacggacaggtatctgcagcccatttgaacgcgagttctgttagtctctcccgatatcagtaaagagaaggatagaatcactatgcggtatgttcgacagatttcgataatctggcattaatagtaccgattattggaagccaaacccccgtacaatcggctatagggtctacagcagagaagccagtggcattttctacttactgaacaagtagagatgcgattccttctgtccttccttccctccttcctttttcttttgcataatcatggcgactttctaaaatttcgcgcctttatatttttcgtcaatttgattatcgaatttgtattatagatttctttctattttatcattcttaatatattgatctttcacttatttattgctcgcttatttatttctagcagagtatccgtgttcgctagatactatatactctcttgacgacggcgatgaggctgatattgcatgacatgccggagatagccgaaccccggtcaccctagtctgaatatagaccagcgccgtctgactcgaaacctggccattcagagtgtgtaaactgtcaccgcagcgcttggtgggggctgaattggtggaaagttttctggtctttaaggatccaggcacaaggcacaagcagcaggcaactccttggataaatagaaaaagtgagcccctgccctttgcgccctctctcgtctgaaggactcagggaactcatacctacgagttgatacaactcaaaataaaaaaaaataagatcaacataaccagcaaaatgggccagatccaactttccccctcgccctcggtcgtggccgcagaacccttcacattggacgagctcccttcctacgatgaagtcaccagaccaatcgagccctaccacgacagcgaaggcgacgatctcctatccccttcgnctgacgcgtacaagatccccggccagaaacgtacc

SEQ ID NO: 11320 - DNA, 492 bp, Emericella nidulans
ctaagatccgacctggatctttccgacacgaatacatgcctttatctgttgtgtcggcgagtggcccatgtcacgcgcatctttttgcatcttctgtaattaaagggaccgtctgagcggatattgaaccgaccgaaatacgctcattgcatgattgccctgaagccttactgaaagacaaggtagtgacaaacttacatagacggacttaattattcctgacaggattgatcaagtgtaccgcatactagaacaagatattatgtataagtccggggaggccgatagttgctataaggattgaacgtatgcggatccaatgtcgcatgatgatcagatccaatgccattcttgctctattatccaataaatgtgggccaaagctcaatcttgtgcgggattgtgagtgagccttaagactgttatgaacagtctcacacctgcccaaagaaggggacctaaatatcatacacgctatctctggctatgtgt

SEQ ID NO: 11321 - DNA, 3056 bp, Emericella nidulans
gatttcagtatcactcagttccaccacattaccaagctgcttgtctggcacggacgaaactcctacaagcgctcggccaaacttgcacagtttatcatgcatcgtggcctcatcatcagcgcttgccagaccatgtatagcattgctagccactttgatccgaagggtctttttatcaactggcttatggttggatacgcaacagtctacaccaatgcgcctgttttctccttggtccttgatcgcgacgtggatgaacagctggccaatctttaccctgagctatacaaagagctcaagacgggtcgcagtctaagctatcgctcctttttcacctgggtcctagtgtctgtttaccagggcgctgtgatccagggcctgtctcaaatcctccttgacaccatatctggaaagcggcttatcagtgtttcatttacagctctcgtaatgaacgagctgctcatggtcgccatcgccgtcactacatggcaccctgtgatgatattctgcctcctcggtaccgcgttggtgtacgctgccagcgtgcccttcctcggcgagtatttcgacctcaagtatgtgatcacgctagactggatctggcgcgtggtagctgtcacggctgtgtctgttatacccgtgtgggctgcgaaactgatcaagcagtcttggaatccaccgagttaccggaaagtgcgaggctagctactattgtttcttggttgtttctcctcaataaatctctatcattgtggttgttgacatccactagtggatgcttactgcttggtatcatttttgtatatactatagaaactttgcactagcgtccctaggtacctggttcttcagctgtcaagcatagaagcagcacgtgacataacagcactgtggcttcttccggctttctgccgggcgaatccgccccgagatgaagcagtgacgggctccagagtagtccctagtcacggctcgatagttgcatttcctgcatttcgccacgcagtcatgtcatgaagtatccatcctgctgaagtttctccttatcgcttacattcatggaattctgatcttggtggatcgtgtatgcctacacccgctcctttctcatttcctccttaccttatttcatttcatgcgccgaaacacacgcattcccgtacgcctatctaagctacaggtgagcgtgcaagccacttaggtccctaacctgaggttgcgtaagtacacttaaaagctgacaccgtgtcatgattgtgttcagtccgcgtctggctgacaaacggtgtggtttgaaggcctagttatctccgatatggagaacagcaatagcgaggcatcagccgtgtggaatccggcactgcgaacggacgataatcacgagacggccgcgacggtagaagaaatatctgctccggtgtccagtgatgtggcgccgttaactcctaaagccacaaccgcaaatacagatattgtacctgacgcgatcgattcgataaacaccgaatctcctgcacgtgaagagacagctgagctgccactcaacgaacatacacacacagttcctggcgcggctgagccggtaaatgttggatctgccggttttatagaaactgccgaggcgccaccaacggcaatcgatgatccaggcgcagttccggtcgcggtctcaccaaatggcgagacctcggcgcctgcaatcgccacagacgtgacatcggtttccgaaaatacagtcccggacgtcactgaatcgtcgagtgttgaacccaccgcacttatagaaattgcgcaggcagaatcggcgaccggcgaagactttaaccaggcggagacacgggaggagttccgcgaggaggccgcggagttgttctccgcggctgctgatgagaaccaggagactgatgctttcaaaccccaggccgagcttgcagccgcgcctggggatggatataacaacttgcagtcgatgcaagaagagcatgtacaggaagggcagacacaccagcttgaaattgacacatcggtaaacgctgcgcaaggatcaagtgattatcctactccgggctgggtctatcaacaaggcatagctgaccatgctacaccgattgacggggaattaagaagcacaaaccacgatctctgggggagccctaagagcgttgacaatggcgaagatcgctttttcgaccagctgaggacacaaacgaagccgatctatttcccatcggaggagtcaagatttgaagagggtgtgcctttattggatggctctgcggaggccccggtcgaggcagcgccagtcgaggcaacgcagtagagcaggcggtgctcaaccgggtcaactcgaccgtgtttttgaaggagatgaggatgaggatgatggatttttcagctcggctcagcagccagccacagaaaacgaaccccaagagcccgtccatatacagcgaaaaagcacctcgcaagtgctagattcccttaacacgaaccgggatggggttcatagtccgctttctcctactgccgaggagttcaacgatatcatagcggcagcggcctcaaagtcgcccgagaacgtccaggagcctgcttcggaggaagacctacgtgcgcggtggcaggctgaactttctgatgatgatttggaagttgctcctgtggaggaagatctcgccgctaagtggcaggcggaactggatgacgatgatctactcttagaagacgaacccagcgatctcgctcaaaataccgctgctgaggtggtcaacgggcacggcgtggaacccaacctccaggctctcggcagtccattcggaacgccacaaaaccccagcaaacccaaaccagcgcagagtgtatatactcctcaccagccctctacagcggatcttgtccagagcgttccaattccaggggcaacgcctctatccagtagtgctccttacagcacgagctatttccagccgcggcccgagcctccagctcctgcagttagggctgaaacgttcgcagagcgacctaaagaaggttacaagtctccttatgatcttccg

SEQ ID NO: 11322 - DNA, 520 bp, Emericella nidulans
catccaaaggtctgaaaggagggggaagccaggcgtgtgtctcaaaatgaccgctgttcctttgttcacgaggctattatattttcttgaccatttggactgctggcttaccttatccgtggcacaacgggtggaaagtgccgtactcaacgggtaacgtctcgctcgacgcctctacttaatgccaacatagatgctgctttatctggtgcataatctgccaaagatactacagtgcgttcatgtaccacagtcgatctctgtgatggtgaacaacgatctccagcagctgccataagacatgtcatacgtgccgatgccattgacgtcacagatgacatcggcagcctagattgactgtccgaacttatgcctattgtcattactcagcatatcatcctgtctgcggacgaagcaatgatactaacaactgcgatgcccgggaggcctgcttcgctgcattcgtagatccatcgaagtcatgcgcaactattgtcagtgcgctggacaggtgcctgat

SEQ ID NO: 11323 - DNA, 207 bp, Emericella nidulans
cacggagaagcataactcgcaacgcgtaagaccgaatacccgaccaatctttgatcagtacttcaggagtaggatagtcgtcgagaaggagttgcgacataagactgtatcggcacgactcagacagtagtcaaagccgagagacaagagcaaccgcaaatctgcgcaaaagccgcagaaaaggggacggccaggaaagagacaata

SEQ ID NO: 11324 - DNA, 2844 bp, Emericella nidulans
acccgttgcaacggtccgcttcccatatctggggttattgctaggaagccacgcaagaggcagcccgacaatcacatacagtcccatggctgaaaggaagcagccaaagtacttgacaccgccgggcgcagggctgattagaatggcataccccgccgcacaggtgaggccaaaaaatacggtaaatatagcgcgtttctgcgtgcgatccgagaaccacgcagtaacaatgtagctaatggcaccaagcgcgtagcaagggattgtaagcgcctgaacttctgctgaggtccaatcgcctagtccttggatgatggtcgggaggaaagtcgagtatccgtagaggattgtgtcgccaccaaactggccgattgtgaacaaccagattttccagtccgtcagaccttcgatgacgtccttcttgtgcatctgatcggaggatttggtgtggccaatctgtcggcgcatgcgggcgtcgatgagctcgcgctcggccatggtcaggtagtgcgcggtgtcaggagaatcagctagccaccaccagatagaaatgcccagagcaaaggtaggaatccttcgaggatgatgatccagcgccatccacgaagacctgcaacaccgtccatatggccgatcccataagcaagaagaccgccgacggagccggcaatggcggccgaaacgaacagatagccgattcgcagagcgtattctttctttgtgtagaagcaggtaaggtagatagctagacctggaaacaggccaccttcaagagcgccgaggatgatacgacaagcgatcaagccgccgtagctctggaccattcccgtcagggttgcaacgatgccccaggcggtggtaatgaaggagagccagcgggatggtgtgaatttcttgataacaaggttggagggaagctctgagaggatataggtgacaaagaggatagagactgcgatctgatactggtcgccctctaggcctagatcttcttccaatccgtataagcgggcattgccaatattaacacggtcgaggaaactgagcaggtagagcagcatgaccgggggcacaatccacaagtcgagtttgcggagaagggccttctccgcagccgggtcgatgtagacgtcatggtcaatgcgctgctgctcgacctccttgtctgggacggtgtcagacattgaattcgactcagacatggcggggcggagccgttagtattgaagggggagagaaaggagtcgaggaagagcggaccgcggacgttttatgggccctccggcatctcctctgcaaataccccggatcgataacgagataatggccgggcatgcggcgctggagattctatcaggtaacaggatctcatggggatggtggaggtttagggctccacgaccccaaaccaggctgggttaagaccagcatgcaacgtgggcccttcggtcgggtatgacttgccgaaagggagaagggggaccggcaatcttatagttgccgagatatctactcctcatattaccttgcaccaatccaaggggtttggagtaatgatacattggcatgatggcttccagtcatatcccagaaagtcctagtgcgataagcgcggtggcaacaaaactttgccggcccgaagaccaggggcacgaggacaacgctggcattggcaaagtgccgagtgctaaatcataatgtcattgattgtcatggtcgatgctctcttgaagatctgggttaagagccaaacataaactgctcttcaatctccgaagcgaattctctcagcgtcccatcctctgcgaacagactgtccatccattgcacttgattcctgtccaggaagctaccaatcaggggatttgctaggacatcaacgctgtcataattgaagagtgctgcattctctctatgtgcatcatcttccagactcattggagtatggagtggctggtcttgagtggcggcggcagtcgatgctccctcatatccagacagcggcagtccattcgcaggtctgtcaaattccacgctgccgaaccgacccgtggcccgcaaggtcgatacgcgcgcctgaatgtgggatagtctctcacagaaatcaactgcgggaatattcccatcgttcttcatcgatcggaggacactgagcaaagtctcgaggcagtccgagttgtgggctgacggcttcatcatggcggacataatgaggatcatcgccgctgagaaaatgtggtgagcgtcccagtagccgaatgttgcgatcgagccgtctaggaagaggccctcgacgatgcggctcgatgcctgcgccgcattgatgcagctctcggccagggccaaggtgatggatgagacgctttgtcgtggcgtgacctcttctcgtgttttagagcctaattgaaattggagcttgaagagatggaggagaacgggacgagtggtctggataatgcattggttgtaggcgaggtggaggcttgcaactggacggggtgtgcctcgttcccttacacgcatgtcaaacggcagctcatcgtgccatgctcgaagttgttttaagatactatgcacttggtgaatgtagaggccctttgtggcttttggtatcccgtagacctgggtcactggcgaggattgtcagaaacgaagctaaaccatacaggctgtactcacagatgttgccaataatccggcctaatttaatgttgattacgaggtttcgaggatcaaggaactcggccatctcctctcttgtcagtccgtccatacttggcatctcaacgtcaatgtcctcatccctttcggcgattggctggccgagtttcgaggctgagaagc

SEQ ID NO: 11325 - DNA, 133 bp, Emericella nidulans
tggtggcaggacgtcgtggtgtggactccgtaccgtcgctgctggtctttatgttctctcgcgtgctgtggctgtgcgcgcggtccgagtgaaaccgcgaaacgtcgtggccatttgtggctgaatagcgtcg

SEQ ID NO: 11326 - DNA, 2005 bp, Emericella nidulans
aagtgtcggaattgaaagcatgcgtactaggtgttgccggctccatgggggcccctcaggactgggagagggcagctagctatctggaccgggcagccaaagtgcccccagaagtggttcagggcgcctttgcggcagaaatggttcctacggcggaggttccggacccgccgagcgtgacgctagacaatgcggctgagtcgttgtgcgggctgtttctgcgcgagtttgataaggccgttaaagagagcaatggagctaagattacgcgattcttcaaactgtttccgttgatcgggcgctccgaggtcgggctggatgtctacgggcgatatgtctgtcaaggcgtggcagcaaaagcgcggtcgaacctaaatacgggaactgggcaacaggacggttttttctacgccaacacgctcactaagctgtttgagcatatcgcgcagattatcgacggtcatggagggcttgttgagcgccactacggccctcgaaaaatgaatagggtgattgagcgcctgcagctagaggcagatgtccaaggcgggattgtcgtcgacacatggagcgacgagcggcatatcgaccgcaaactgatggatatcaagtcatacgcctttacctttctggttcagagcttccttcctccacagcgcaccgcaacgccacatgcgaattccccggccactcaacagagcgcggcggaggacgaaggggtagacatgaaagagatagatgggttattgaatgagatgaccgtcatgctaagtcgatggtcactttacacccgcttcctagcagagacatgcaatgtatgctttgtccaacatgtatagaagcacgagactaatgttattgcaggccaacgaggagcaaaagtttgaactgccccagttcctcaaggaatccgcgctttccaagaagatcgaggaccgggttatatccccgtttaataccatgacaaccttcttcttccgacggtcggttgagaaagcgttccagctagatgagcagccgacgggcttgactttgaacctccagcggccattgaaagcagatccaccacacataacgtccgcagttgacgatattatgtatatcgtaaacaaggtcctgcagcaatccctctcaacttcacaaattgctgtcgtcaccagcgtcgtccctaccttatcgcgtgtgctcggttccgactttattgggatgactcaacgcaagatgcgcgacgaatgctatccacgagccccccaccagggcgcctctccaccagagcatatcgtcatctccttcctagtcctgataaataacctcgatgtcgcagtggactatatccggcgcattgtccaaaacattaccgagaccaagaaaacaatcaccaacccagacgggcaggtcgaagaaactggccaactacacacgctcttcccatccccagcagatgcaaccctcgtatctcagaccctcacctcgctccttaccagctttgaagcgaaagttaccgaccttctcgcagacggcatacaagtcgttttcaacaacatcatcaaacaccgcctccgccccatcctctccgacgctttccgcgacatcgaataccaacctgcctctgactccaccccgctaacaacttaccactctgacctagactcctactctgatactgactcgatcccacatgacaatgaccccgaatcgccccgcgaaatcgtccggccccgtttcagcgccgcctggactgagctgctaggtcccatcttgcgcatcctcaaccccgccgcgttcgatcgcctcttaacagtaacaactgcctatctagcccggctcttggaaaagcgcctatgggcctaccacggccgcatcaatgccctcggcgcaacgcgtctggagcgcgacgttgcgggcatcgttagcgccgctgtcagtgttgatgtcctggttctgcgggggtaagcgtttccgggatgtacaggcaccgcgagacctttgggcggtgtctccaaat

SEQ ID NO: 11327 - DNA, 1640 bp, Emericella nidulans
agtaggagaagagaagtacaggaggggggaggggaaaaagagtataaatcacaaaaagaaggtgttagggggaaaaaataatggaagcttcaaggaggatcggttacaggggaaatgggcaatggcacagatccggtgacgggtgttgtaagtacttggacagatgtccggaaagctcctgattgggttgcgtatggaaagccaaggaccaggcggtgcggcgaaaaagcaatcaccagaagggaaaaaggtagtgggcctgtcttgacgggtgtgctcctgttaattaatttggacttttaagctttcaacttgcccgggaaattaagcgattacgaagctagatactgtcacgtgagcgttatcgtacttgcggggatccatctttgtacgagataccatgaaggccgcgtgcatcacacaaagcaaacccaactagatgcctggatttttacggcttgattcgttgtgtagtctctttattgaggcttgacaaggatgcaggcattcggtatgctctgctctctggaattagccgcaatcactttccccctgcaatgacctcattgtttggcgcgactaacctgtacatgcgcagtcccaaaaaacagaagggcaagtctttctacctgcttaggtctgagatatgataaccgttttcatagcctaggtttgagttgatccttcgagtgagcctcaccacctcccgatcgtggcctatccaacactgactatttctgtaatcagatcatcgacctcaacaatatccctctcgttagcggcacagcttacattaaatggcgactgccctcggcaaatgcgaacgatcatcatggagtaaccgataaagcccttatcctcgaccacaaagcgtcctggaattacgaaaaggtcctgcaagttaggatcactattgatcgcgaccagacgctccacgaatgcgaaattcagttcgatgtggtacaggaattcttatccggagtccacacagagaaaaatctgcttggaagggtgaaacttaacctcgccgaatatgtagacaaaagcgacgacgaccagggcattatccgacggtacttgttgcaagatagcaaggtaaatagcacgctaaagattgggatagcactgcaacaggtggaaggagataggaactttacaacgtgcgtcaatcgactgccccgctcgtttcggcgctgttactgatgttatacagtccgcctttgagatctgcaatggctttcggcggcattgcgggagttgtggcttcggagcaagctgagggtgatgactcgggccagatacccttgatgaacactcaaagcagggaggttgctgatttgcaagaaatgtatcgacggaccctggcggcttcttggacttctcgcgcggacgacatacctgcggataaattgattgaaggcttattttctggaagttatggtcgacctgaccaacatgatcttgacccagggcaggcagctgagggtcatcatgataggcgttcaatctacgcgcagccgccgctgggcagagcgggtcacgcaaccttctgtctccgacgtttgaacggcgcactaagagttcgagtcgacactccaacggaagcaaagcgctggacttctccccaacaatcgagcacg

SEQ ID NO: 11328 - DNA, 181 bp, Emericella nidulans
tgctcgatgactcgagccggcttgtgaggtgtggagaaatggccgggtaccggtttcgtagggggttcggaggtccggatgagccccgacgacttgcgacgtcacacctccctcctaggctccagttgcggcgacgccgacagcgggtggatcatccggcagtctccccggagcatgagcg

SEQ ID NO: 11329 - DNA, 228 bp, Emericella nidulans
tgagaggacccgacagcacggagatgcgaaatccgaagaatacaagaagctgctgaattacggtaagagtcaggtgacagctacggatcctgccaaggggcaggacgccgatcgccggagcggtaagcgggaagccagccctgacgcgaggggagagaacgaagccaataagagctcgtagactatcaggaggcagacagtacatagagctcttgacaaacgatcaag

SEQ ID NO: 11330 - DNA, 522 bp, Emericella nidulans
atcaggcccaagtcataggtgagacgccccatacactataaactttcgagtggggtattaagacgattccctatcatgggtataggccacggggaatgacctgacagccactagaaccttacccacttaaactactcgacaagcagcgattgtggcatgaccatgacccgaatacacttgtaaactaaactaaagaccataaagcgctagacagatacatcgatatgaactaggaacggccggtgcgaaacacattactggctaataagctcagttgagggcgccttgtattacacccgaatgacgcaataatcattcgtatttaaggttaggtgtcccgacctggccccgcctgatcctctgttgtgctgacaggccactgatctagctctgtaataggtacggggcccttcaataatcaatctgctgcctaaaaggtcatctggaccccaagacccgtccttgtctgcgccgggatcttcgtcagcttttttccgcatttttagcccttatttgctcctt

SEQ ID NO: 11331 - DNA, 99 bp, Emericella nidulans
cacacagacatatacagacagacagagacacagatacacagacagacagatacacacacatacatacatatacacagacatatatagacatatagagat

SEQ ID NO: 11332 - DNA, 546 bp, Emericella nidulans
atcagtgatccgcgtaatcataactgttgttgacgtaccacacttcatgaatctgattatgaatacattcatcgtacttgtagacgtagtgtagatcactgcctattaaacttaggatacgcctaatcgggcgtattttgggttattagggctgggcaagaacttccggctgggatcgtgcttgtggtatttgttgaggttctcgacgccaaaaccgacaaagtgcctacaagtgagcgcccgaaaacgcccccccacccttggttcaaccaggatcactctcttgagtgggacagcggcttatatccccaatggaccgggactaaccatccttcttaccaagtaaaggtctactcggtgcccatgcgttactcgcttgagacagagaaacccccggggaattttttgcttatttagggttatacactcatttacagggaagcctaacggggtggaacagggcctctttggttttgggaatattaagggggggtcctcagcagggaattgccaaaataggggggctttttagcgaaccttccaaca

SEQ ID NO: 11333 - DNA, 1807 bp, Emericella nidulans
acctcatccatctcctcgctagcgtgttcgctccttatctccccgccacctccagtccatcaacgaacagctaaacgcacaattcgcactcattccctcgcttgaggacatcaaggacggctggaaacctgtctcgctgaaacccggccacaagattggcaaggcccagtacctcttttcgcgtattgaccccaagaaagccgacatctggcgcgaccagttcggcggctcgcaggccgatagacagaagaaagaagaagaagccgccaaggcagctgcgaagaaggcggccaaggatgctgcaaaggccaagaagaaggaaaagaaggctaaggaggctgccgccgctgccgctgccaccggcgctggttctgtcgagtctacggccaagggaggagtagaatcgaccggtgtcacgacagaggggaagaacgatgaagctgttgagaaggtcaccgatggcgttgcgcaggttacgttcccaagttcgtgactgtctatacgtgcgaatttctagcagttggtttagttagatacttttgtagacacgaaagcgagactatatttataagcggtaactctagcaattacatatattattaccttgtagaatataccctacaacatagttttgaccttgctggacagtcgagaggcgtagtgtagacaaacatgttcacatgcattactggaaatataactacacagtcaaggctcataccgaagggaaattaaacaccagcaccatccgagctaacttgaaaattggaacctttcttagacttgtatcataatgaaaagatgatataaatacgtgaagtttatttcacctatgtatgctttctagtcgtccaatttcaccatttgcattaataacctcgaatgatgactagcctggagctgtaatacgattatcgcctcctagcgttctgccttggcttcacttcttcctgcgcaaccggatgaagcatgactttgttgggaagctgtggggtgttcgccgagtaacccttgctccagtcgtagctcacggcataggcgaatatgttgcctgtgcgattgaaggcagtacttgaaattgtgcccccgacgctgggatatcccttaagacgatgtttggcatccttatcccagaagtgaaaagtgccatctgcaccggccgtactgaaggtaccgtgaacggggtggaaagaaatggcgttgaccgagtagatgttgttgatatcacgctggttgggcggtgtttcgcgatggcatttaaaactgaagtttgagctcgaatccttgtcttcgacgtactgtatagcacagcggccttcgatacttccaacggcaaaaccatttgcgtctgtgaagcagctaaccacccgagtttgccatttcagaggtgactgcatggttttgtagaattttgtggggttattgaggtcgactatattgatgtaccggtccgccgtcccaataactagcagtttatccttgacatccatcgtgtaaacacgttcctgacactctaacgaagcgataggagttgactgccgtaaatcccagtatttgacctgtttgtcccaggagcccgtcacgaggagaggcgtgccaccggccggatttgggatcatgtggcaacatctgatcggggcgtcgtgagcggcgacctgaataggcgcagtagcattggcagcgagatcgagcatacgagccgccttgtctgcaccgctccgacgacctttgtcccgtcctatgtggaatccacactgtaagcggcaaaccgaagcgacgagattcatagtcgatgacttacaggtga

SEQ ID NO: 11334 - DNA, 383 bp, Emericella nidulans
atgtactctaaacatcccacctgtcctgacccgcctttccatggtcgccggattcctagataatcgacttatccttacatctttcagactgaccaggtgccagcccactgcccacaatgatcaaggcatgcatcatggcgcacaccacgtggtttcaacactgcggctatgctgtactctggcagctgacacgctaacctcgctgtgcgcgcgtatacgcctacaggacatgaaaagctccgcctccaattgttcgctgacatgtgtaccaatccggtttcggcacgtgctggacatactctgagcctggacactaacggctagtatcgcaaagcgcgatttactatcatgctagtgcatgacttgcatgagactatgactgt

SEQ ID NO: 11335 - DNA, 1326 bp, Emericella nidulans
accgagccaaggtctggacatcggcattcacgatgctgtggaacaacggactgcaactcaaatctacaactgaatgtctggcctaatccactgttgatggcgtttctgttcttctgggcctggtcgtttgacgctttcgtcccggcactcaaaggcggacttctatcggccataaagtggaaatattcagttcatgctgggacgactgtttaagaatgcgagtttcctgcgtcacggcattgcttgacatgacggtattctgatttgctcaaagacggcaacctaggcgtttcgtcttgttgcattgtgccagatctacgatgatctgtcaactgtgccttcctggaaatggcttgctgcaaagcttgcggaaagtatcatgatactgtcatagatccttttaaaagctgggttgagccatgattgatgaagacgcttgcacatcctgccccatgtcttcagatgtcttctttctggaggcttccgggacattcttagcaccctgccagcgtgccgcgacgatgcaccagattgacaccgtaagccgctcttgattctggctctgtctatttcgtctatttcttctctccagatatctatctttctagcccttcagaaagtactgctttttatcacaaatcattaactgattagaggcagaacatagcagcagaaaccccaataaccatggcaaccgcagcagcaccgaatggttgcccagatatagccccgttatcaggcccatccgtctcctgtgcatctgtccctgaggtcgcgtctgcatcctcggtggcgtcgcaactgcccagggtcgtgggtgtagccaaggcagaactaaccggagatttcgaagtcgacggcgaaccggtctctgtttcggtgatggtgacttcatacgaaagaacaggttcggtgctcgtggcaaagaactcgccgtccataccgagcgagcacgttcccgttttggcgttgtgtgtgcagagaacgctgccggtgctgaagcaagaaatggatattagcattggttggctgggattcaaagaggtgttggtgagtggacgggtgccttactgtcctgtttcagtgacgaggactgtcacagtgctgggggcctggatgattgtcacgccgctgtcgacattgcaggttgttgtgacggagtcagcgcaggtgacagaataactggttctgtttgaatcctgaggtgtaggaggttagccgggtcggcacttgttgcgggtcggtgggaggagataaaaatcataccgacccgacgatctttccagcgagcggctgaccgtcgtcattgcccggtatgtacatgga

SEQ ID NO: 11336 - DNA, 411 bp, Emericella nidulans
ggtctgtgtgtatttaatgtggggtggggtggggtgagaacgtggaaatgatgttactatattcacttgaatttctcaaagcagctgctgtctaccaaaggtaggctagccctgtgaggaaaacaagactggcccagatctagtggtgtaatcaaggcaaccatttcaatctctgggtgtcagataccacagttgaggagggaggcccagattctgtggttttcacaacatgggccaagaaatcttaagtgttctcaaatatgcccaaaaaacaagtaggggtcctgaatccatgctttcacctgaactccaaatccatcatagcaaatttgctactcctgtaatgttacgctataagtcacagtttgggagaaaaaaagagtatcctgaggggtgtgtgtgtgtgtgtgt

SEQ ID NO: 11337 - DNA, 1675 bp, Emericella nidulans
ttttattttccgctgctgagtctgctcagaacggctgaggaccggggcatgcttgggaatccaacccacacctctattttattgtattaaataccatattatagttgtgtaatttatatgcataaaatcaaaatatagtattttaccttttttatgtcctgactactcaacaggttaacccataagccatgggtaatcaaaagcgcgccatgttgtggcgggttttatgggtcatgtttaggaagtctataacaataagaatctttatagcagaataacagggcttaaaggctgttaccacttaggaaaagcctacaagcaagccatatgctgccggtaggcctaacattttaacttacctgctttaatacaattagacttgttaagctgtgagtcaaggcaggttctggggtggttgcccgagaaatacgttcactatgttagccgtagaaactgggtccgcaggatttccaggtcagatacctgcagtgcattggtgcgggaatgtatagggtgcacagactacggggaaatgaccagtcagttcaaggtgctctgtagcattagagcagaacaaaaagaaccaccaaataattcaagcatttcttttgtaccaacgtaacctctaaggtgatatatacggcccaagccagtatttaaagtgctattgagcctccatatctaccgcctgcttcatgtctcgcagtcgccgccgtcgccgaacgagccagtaccacgagcccactgtgaaagcggtaagaggcacagcaaggatgaaaaagatccagaagtcgtgtgatacttcgaggtttccctcggagccgtagtcgaagaggttcatgccgaggagggtctgtaggtaatacagggtcagccagggaagcgcctcatcgaaatggctgaatcaatacggcttacagaaacaaagctagcaggcagatatatcaaggtgacgagggtaacgattcgaacagtggcgttctcatcgagagacttgttggtcagtttgacgagtttgttgttgaggtcgagcattttgttgttgatgtcgatggtcacggcctgattctcgactgttacggcgacggccagctactcaggtcctggttagttttgaagtaactaagggattgcctgcaggtgactcactagatccgatattcctcggaccttgcgttccagcacttgcacgctctcgatgtgtccttccagttccgtgatatggcgcgcaacctcaccactcatgtatccgccttgctgatccctggacacgcccttagaatgcgagagcgaactaatctgttcaaggtgacgcaatgtgcataacgcagcgcgtagccgagcagataaggggacgagcctatcgcccaggtactcctgtttgagaagctggacgagcccatccttgtggtcgcgggctttaggcttggagaaatctagcgtaagtgctatatcaacctggcagcaacccaatgttagcttagtttcaatactacaaaagctttcgtatgtagaactcaccgtccgttcaatctcatccccgagattccggatgcaccaacgccagccacttaggtaggtagaaaaaacaagcaaatgcatcgacgacctctccgcaagaagcgcgcttggattagtagatagtatgtgttctatctgccgctgcagcttcgat

SEQ ID NO: 11338 - DNA, 325 bp, Emericella nidulans
tttcaatttaaactcaaatatataaaaaccttagatccagctagtattaaaaatatataaaaaacagatttaaaaatgattgtaatgatcgaaactacagtatctcaaaagtaggcttccgtttttggatacccgacagtaatgccgattggacgtcgctggtctgcagcgcggcactgttccataccgctgtgtatcggagacctgaaatgtggctatcagtacgaactgagaacttggtatcgaatggcatcctctttaacccctagcgaacatccggaggagaggagaagacgggaatctgaacttacatcctgcaccgtat

SEQ ID NO: 11339 - DNA, 477 bp, Emericella nidulans
agctcaccgaacaatactatgctctgttgagctgcaacatacactggctactgttattctgtctaccggctcactctcattcttgcgctcggtccatggctgaacaagatccctgttccgcttaacaggtgcgtctctatggctacaccgattgccctaatacatatagacatgtacagacaagcctgaacccactctctttaataacatactgatctcctaaaccgattattgcgcgctccagatatatccataccttgctctgcaatacacctactgggctctggattgctccaacgctggacttaatccgatctctatacgacgtgctatctaacacactccactagagagtaatattgactatgggcccttcggatcaccatcagctcaccaggttcagccgtactacgctgaccgactactatacctggctgtacgatgaccaccttcccctagatactgaacttaccggca

SEQ ID NO: 11340 - DNA, 180 bp, Emericella nidulans
atagactcgaatagaactcactacgctggcgacatatgccacgagcagccctgagagttgagctcagaatgagacgagagaatatggagaagctcatgagcgtccaggaagtgcgtagccgcactagtagcaataggcttgttgcagggcgcgaaaaacgagcctagggggctctgcttg

SEQ ID NO: 11341 - DNA, 1827 bp, Emericella nidulans
agccaatcttttagccaacgcaaccaccacaccttcgtatcaaagacggccccacccggcttatgcagtcagagtacctaaagtgtgtcttgaaagcgcatagtgttatccctgatcgagctcactggaacgggtaccttcaggcgtacgtggacgatgtgcacgttctgtaacccattttgcacctccctacaatacaacaagagttttgccagttctgggaccagaattatactgggtacacaaaggctcaagcggcccaaaaccttatatatttagcgattggacgaggtcgttctacctgcgtcttcgtggtacgcagctgtcaggttaccatctcgcggtgggcgagcggcgaggcggggccgaagggtggaaggcctgatgatgcggcacgcctgattctgcaggatgtgctgggagctggggcggggttggtgtggaagaggccgtatagtggtgcggttaggtttgttagtcgatggtgtcctggatggctgttggtgagtttactctaatccctgtctgaagggaaggtgagcagggctaatgtagtgctaggacaaattgatgagtaatggacagggactggacgagttggtgaagagtcggaagtgacgtagcattaagcttagctttctctttgtcaagtcgatcgtaatatgctcaatcatctatggtgttcaggcggaatcttgaaacccccagacataccctttctgaacaggccctccggatccacatccctactcaccctcttcagcatttcaatgctgctctccccataagaggcaatcggatcctgccagtcagccgcgtagttaagatacaggaacgactcgtagttgttcagcctgcgtgcatcctcttcgatgccttcgaagagcgcacgagcagtgttgtagatcctctcgtcgtccgtttcgtcttcccaggtagcactcagaagtgtgacgacttgtgaccctgtagtatttgaaaggcccagggcattcttcctaggtgcgcgcgcgtagattgctggtggaagcggctcgagggagacggaccacacaatcccacgaacgtcctcaatctcgggcaggctggacttccaccgtagataggttgcattgagcatgtcgaccgttgtgccgtgcgttatcaccacgttcagctgtctgtcgccgcaacgatgggtacagtcagaaatcagaagattggagctagtgaatacaggcaacataccggttcccattcggctggaaagagccctgctccttggatatattatgcatgctcgcaacacgcatcgtgctgtatgccgacgacatctcaaagaattttgcaaagacctctggatactcttcctcccttgtataaacaatactgttcacaacggccgcaccctgaccactcgcatatccaaaactcccaattagcgatgcgtactcatcgtatccccttgctgtattgaaactctcaaaagcccggagctggtcgttgatggtctcaagtggataatacacatgtccaccccatacagagccctgcttgaacgcccgtaatttgacttccgttacaattccaaaatttgctgatccgccacgaagcgccatcgtcaggtcaggatgttcttcttcggtggcatgaacgattgtcccatttggtagcacaatttcaaactcggacacagtgtcgcatgtccacccgtaacggggcgaatggtaggatatcccccctcctagcgtaagtccgccgacaccaacctgtgccgctcggccgcctgctcagagagattcagcgagtcgagataggaatatacttcccccatgtagcgccgacacc

SEQ ID NO: 11342 - DNA, 203 bp, Emericella nidulans
  unsure (1)..(203): unsure at all n locations
aaagatgaaatgaaacatcgacaccgaagaatccaagaagtgatagtgagtaacccgaagccataatcagactcaatgttcgggccgaggccccgtacgcgaatcatagcgtggtgttgtgttttgtgagtatacacgatcgtagcgcagaggcgctagagcagntgaagatgccggtgcctttgcgcttatctccggtggag

SEQ ID NO: 11343 - DNA, 579 bp, Emericella nidulans
ggatatgctgctgagagccacggaggcctagcttgattaaacaatcagagaatcatagggaaagaggcacttgtttttaaactatataacgttttggaaactccattctcaatctcatacctagtgctttcaaccctggctgtaaaggattatctgtagagctttataaaatgctgaacccctagtcagacccacttggacatatagggcctggcatgttttttaagctccacagatgattttgctgcatctagagtttggactgagaaccactgtcccacactgaaaccctatatgcatgaaagtaataaaactggttgaacgggagttggaaggcccagaagtagtacagactcagccaggtgatcccctccatgcagccccctagaactcagtaaagcacaaccgtgaaagcctctcatctaggccattgcctgactgtgcacaggggcagttaggggtgcacaggcatgaaaatcttatgtgagctgctttacagcagagctgggcttcccctactcgggctcttcccaccgtgctctgccatcccaccccacaaggtacaaacacattttcacc

SEQ ID NO: 11344 - DNA, 200 bp, Emericella nidulans
  unsure (1)..(200): unsure at all n locations
ccaaactcacggcgtcgagaagctcgctggngccttcctggggacgcaagagctactgacgccgtgttccaccgggagtcaaaagacacatcgaatgcgcacgagtcaggagaaccaagccagngaggagatcctcggtgtggggagnatctcggacaccgacgcgcccttccagtgcagcggacacgtaggcaagactc

SEQ ID NO: 11345 - DNA, 1008 bp, Emericella nidulans
aatcatttcgtgaacacgggcgagaaggggccgctcaaccagattcaagaccttttgattcgacaagagactcaggagcgagatgtctctgcggttttccagtatatcagtcattgaatagatcgattaggatcattgtctgatattgttgggagttacgttggcattgactactggacggagcctaggctgggttccttgggaaaaattacggcatacttgattagcggattattggaatatgtaactattgaaattttgatattaaaaatatgctcttagttggtgcctacttgcaagactcccaaagtagctatattgtctgcgttcttgcccccacgagacacgtgcggagagtaagaatggtcgagccgccctacgtcactccacttctagctccctgccaacgcatcttcaccgattcctccccacatgactttgtgacaacgcgacagttagtccatctcattgtttgtatttttactactaatttatttgcgctaaaatcacttacagctcaagacgcctatcagcctcacactccaaggcccagactgcgggggcttacaccatgaggatagtcgcctagatccttagatctcagccgatgtttgcctgagcaatggatcactcaatccagcggttgctgaatgataagctctacgaccggaggaaacaaggagcactagagtacgcctatccaatcccgccgcagcattagagatagtgattggagttgggagggattttactatcgctgacccccctcttaaaataataggcttgagaaagtcgtccgagacgccgcattcagaggagaccatgaagttattcagaagattgtcgatcagttatgccacgactacgcatatgcagtacatcagccacatgcgagaaacggtggattgattgggttagcggacttcaatagcattgggatcagtgagtttaacgagcttgccggggttagatcattgattctgagaccggagaacttcaggagggagt

SEQ ID NO: 11346 - DNA, 414 bp, Emericella nidulans
  unsure (1)..(414): unsure at all n locations
ctgagcctatgtactctaaacatcactatgcttgcctgcccacacatagagcgcctcgcgctcgaaaatcgcctgactgatcttacaacaaaagtagttgccaaccgccaggttattacccttaacccaggcggtattgtacactacaccgaagcactagtattgctaaagaaatactacaacattatgctagcgtacaaactaatccaactctcagtgcctgaaaaccttcactacatgaagcgataatcaccagaatgctagttaactgagataaaagcagcagcggaccactggatcatacccacacccacacagaacgagaggaatcgcaacaccatttctgagagcattactggacctctaacaatcactgacacggggagatctatcacngtgtgagataatattgct

SEQ ID NO: 11347 - DNA, 462 bp, Emericella nidulans
ttgtactctaccgctcacaaagcgactgacttttactatgcccagggcgcggtgccctgtaggattgcccagagctggcactctaccaataaacagcttatgactacagccttgatgcagcaatgccaggaactcaccaagactactgatactcagccaaccttaaccggagcgatccataaaacctgccaggcgacgcgagacccgttcaaacagactgagagctctatgcttatcttgcacatatctaaaccctatgctttgccggcccaattgatcgctatggccgatgagccaatcacacaaaggcaggccaggttgcaatatctatacgctcataccctatgataaaaaacaggcctgtatgggattatccttgttacatacgatattgagaagctactaactgtcttaaggatcaacagcacagggcacgctcctcatcatccggtcccatgagct

SEQ ID NO: 11348 - DNA, 1191 bp, Emericella nidulans
agtacaagcacatccacgtcgcgcataccaacaatcatcacgcaccgctggacccgccttaacatcggacgcaaaccacaactcacactcctttgtccgcgacagcgaaagaacccgcaacgtgcaagtcgacgtgaccgagggcgtcggcattgatatcaagtcctcaatcaacaagctcaccgtgctcaagagcacgggttcgcaattctggggcttcgtccgcgacgagtacacaacactccccgaagtatgggaccgcatccttagtaccgatgttgaagcgacgtgggcatggaaaaggttctctgggctggatgaggtccgtgggaatgtgcccaagttcgatgagacttgggaggcggcgcggaacattacgctcaagacatttgccgaggaggagagtgctagtgtccaggcgactatgtacaagatgggcgagcagattctagcgtaccagccgcttcttgagactgtcgagtactcgttgccgaataaacattactttgagattggtgagtcgttaccacatatcctccatttgcttctgcggctgactgcttgtttagatctgagctggcacaagggccttaagaacacgggcaaggatgctgaggtgtttgttccccagacaaaccctaacggactgatcaagtgcactgtcggccggaagtccaaggctaagctatagacgtctatagactaggttttttttttttctctattcattgcacaaggagttgggcgactgtacatagcgggatctggaatatcatttacttctgccacgaaaagccccatagtcatgtaagctgtcaaacgcattgtagggctccaaggaatcatacaagatctgcgtatgttgacggaagacggcaattggaaaacaattgaacatttaactcccacccatgcgctagaaatatcatacaaaagtgatacataaaatacagtatatgccgctggtatctagtcgagcaatcaaacgaaacagtcaccacgggaacctcttactgcgaggtcttagcctcctggaaagccgccttgacttccggtaacgccccaatgttcgacggagccccaacacggacaatgttatccttatacggatggtcatcgccatcgaacgctacacgcagtcagtaacctatcataaatgccaatcaagtagcaagaaaggaatcgtactct

SEQ ID NO: 11349 - DNA, 547 bp, Emericella nidulans
tcgaatccatgtaccatagagatcgaatcggcctttggagaccatctgccgtctgcctcccagctatacactcagcactctgaacttgacaccactactgcctcgcctgggcattatacaacatcactctgccagattgtcatggacgactggcaaaaacatgcttactgcactgaacatgcgctctcgactgtcctatcatcgtaatgtcgaacgactgactcacgcaagcttctctacactgaatacccaaaagacaccccaatcgtgcatgatccctctattctcacacgtagccgatgactgggatcctgcacccccaactgcgcctctgttatcccactcgtattcattagattggaacgattagccctgtgaccgttccaagtggaacatattccaacttaatgacgaacatcccacactgacggcgtactgagatcacgtgcttctaagacccctgaataccaggactgaatactgatatcgtacacattgcaccatacgcctggcgatcaggcacgtatgcgcacctttaattacagcg

SEQ ID NO: 11350 - DNA, 115 bp, Emericella nidulans
ttttattttggggcgtttaacttgccagtaccttccgccctgcattgaaaactcctagcttcaagatgagtcgtcactatcgtggattagtcccttctctcccttctcgctgcgg

SEQ ID NO: 11351 - DNA, 1362 bp, Emericella nidulans
tggcgttgcactgcatagttagaccggctttttttatctgccaccgatactcagcgacagaatatgcttggctttcccagtacaagtgcatgggcgcttgcaacgggacgaaaaaaggctatgccacgcggaaatgaccagtcatatcttcatctcggaaggctgtctgcattgacactcagcttcgcctccagatctagaggatcctgaaatcggcccccatacaggtttgcaggatttgatcgcatcatccttctccaatttccacagactgacttggcgatgagaagaccatgtgaccatgtcgcatctcgcaaagcaacagtacttctttccactgcggaggtgccagtgccaccatagccaaagcaaggggtactgactttctgcttagtgtttgaagtctgtcaatagtttcttctctgatttaggtgaatcgtcagatgcttaaacttagtccgggttctagacgtcgccgccatgggcgaagggccctacgagcggaacgtatcgcaagctctcggcgtggtacctatttgtctgaagaccaggtactcgtttacgaggcatattaggaatgttcctgacaattttaatccgtgttgacctatctcttgcattcagcaagcaagcgggagttccgggccggtgcatccggcaaagttcgctcaggacaggcacagccgtgggatggcgactgaggcgagaagaacgctatacagatcctgccgcctatgtcgcaaatgagatattgctacatcttgcaaggccgtgctacatggcaggctttctaggccatcgcttgacgtacactggggtggaacattaccgcgtcaagtaagccctaccgatcacttacagtggacaatctttagcaaggattggtgatggaaggtggtccctttggtcttcactccagttattggagcttctggatggatgcagggacaaggctgattggaagtaaagaactgtctatatcgaccggctggccgtctccttgcgggtgaacttgtggcattcgccgagggcgtggctgtttcgaagcaacttagccggaacaaagctgacattcatcttcggaggattcttctggggattcttctggagatttgctccagcagtgactcattaatttcagggatgcgctgttgaacgatctgcgctcgcgttgtctcctgaaccggcagattatagggctcgcatatttaagtcaccaactcgaccgaaactagccctaactgtccgtatgtcgagataatcccctgggacagtccgcacatattgggctcagtcgtttccggcgtcatcagattactcttcaagcttttaggcaactaattcatcctagcgatgtctgag

SEQ ID NO: 11352 - DNA, 115 bp, Emericella nidulans
cagatagttcttgccatctacgcggggcatcgagatctgagcctagccggttacttccaaacttgatgatccgagcattggccgcgtaataatggtaagcattaacttggtagac

SEQ ID NO: 11353 - DNA, 2376 bp, Emericella nidulans
taagcagagcgggtcgatttaaaggagtggcagacgaaggaaggggtgaaatgctgcgtttgagtcaccgttgctctgcaggcgcatcaagcgatcaaactccgaggggtaaaattgctggtcaggtgacattggtggcgataagataaggaatttcgctgttggcgaccgataccggcggggacctcctctacttgtccgtgacgtttacaagctatattggataggcaagcctgagttactgaatatcctaaaatcactattaaactgatgagataagcataagtgctatagtactcctcacttggtaaattaaaacagccacaggggcagaaaccaatttagcagtgaaacaacgccaaagctatgcagcagagaacccagcctcgagcacattctcttcggagtccacgtaaaaacagaaacatccaatgaagcaaaatcagaaaatcaggacgaacaaacagcgcaatcgaggtatcgcaagcaagaatgcgttccacacttttccagtccaataatggtatcccagtcctgcgaagtgataaggaaggacagcagcgccacccatgcggcataattatacaagttcgtaaggaatggtatctcaatgccccgcatataatgcaaaaaaaccaaaggaatggataacagatcatctataatgcatcatgtcaacgtggaagtcaaaaaccagggcatcaagacatgagatagttaaggagagacgtgaaatcgttgcaaaaaaaaaaatcattagaagcatgccggacggtaaagtccccgtagttaaaacgtgatttaaaaccaagcgcgccatggtatcaaaaaggagtgacggaaaagtgtagaataatatgcaaaatgatataacgccgtctaatgcgatcaatcagagacacgagctcggttcgctagtgtccctgggggtaatcagactgagaataagtcatcggaggcatgtaattgaaattgccaggattcgggtgtccattcatggttgaaggagtggcaagctggttgagctcccaactcctcgctgcagggccgctgggtgcaacctgacctgagtggcagaccgtagtataagagtacggtgcagtcatatttgagtatgactggctgacggcgggtagaattgttcgaattggtccgtcagtttcagtcgggggcgagtaaattgggactgcattgctctggtgatagctgctcgagggcgtcccttcggatatcgactggggagaggcagcgctttgaccttctgcgccagagtcagatgcggggccagtacttgggtagttggacccaatgggtgtgggcagagccccagcggtagatgaatagcttgcagactataagatgttaggttagtataaaaccaaactgggtggtgtatccggtactcacatatttgccgatgatctttttcaaagcatggcctaaaatcttccaaggaaagactttgacatccttttcaatgtttctcggcttcggggcagggaatcccatgataaccttgaagaactcttcgctgtctgctttggatttggacacagttaaaggtctaaagccttccaggtttcgtcgaatacgattcttctcctccaccgtaaaacggactccaacgagcgactcaagtagatagatagtgtccacactcgtgatgaaacactcatccttgccttcccaataaatgcagctgatacaaatgctgttcggagcccgctcttcgggagacacaggcttgaaatcagcgtgaatagtgctgccactttgcattcgtgtaaattgaaccaggcggcgctgagcaacttgctcctcccgagtccaattatgcgtcatggtatttaggtcaccattgagcttcaatactgcctttgacggatacatggcataggggttgaacgattgtgtttggacgacaccagccgactgctgcaatgtggaggtacggatgagagttgggttcgaaaagctcgcaggtgacgagggctttggctggcaaacgccacggccgactgcatacccggaacctctctgatcatggttgaccgagaggaaagacgagttccacgaaggtgccattggcgacggggccatgggagacggggcacgaatcgaaggctgcgagtttgtcgatacggttgtatattgtgtagcacccatccggggcgaagaatccgtgtgatacgaggcggcaaatccgttcatggaaggaagtggctgcagatatggcgagtaaggcgcagcgtagctagattgttcctccttgatctgcaccggaagggttgacgcccgcttaatcggcctggaggtactatctgcagagaaggaagaaattcgcctcttccggccatcttcagagggcgactgctg

SEQ ID NO: 11354 - DNA, 373 bp, Emericella nidulans
ccttgtactctcagatctaaggaccataaatatgctactatgacggtcatgaacgtgcggagctaggtctatccagaatggcacggaccatgcaacttatgaggagggggatattcgagctattcctatgttcccttctagccgatctttaacgagctggcctttcagggcacagctggacctgatgatacttaatctattgcggacccaggtgctaacacgcctacgggtgtgtcgctacgtatttagattggagcatagaaccttactagagacaagcctagaaatgcgaatgtgtatcaaccggatatgctcgaccctttcgatgcatactgtgctggctttcctcactgataccagcgggatatctagc

SEQ ID NO: 11355 - DNA, 1220 bp, Emericella nidulans
tgctcttgttagtcgatttcgcctctcccgacgagaaattaaatatcgggtactgaactgtgcctttgctgttgagagggaaaccggtggtagtcgttggatctggaggagatagagtgacagaacatgactaaataaccagacgtccagagggtactactacggatacctacctctcatgcctgtcgttgtcgacatgggaagacctcgacaccatacaccgagcttgtccagctgttagttcaagtaaaggaagggtaactgagatgctgtaccgcggtgagctgttatccatgagctctcagtatccctggcccttgatcgcagtgacagaggaagcggctaataatgagagtgattggcttgaaggaccgtgattgcccgataggacactctaagtagattatattctggtctcattctcgtactgcggaaatatgtattcaggtgtaacccatcttagtgctcgaaatgaaatagaggagtataaatacatagactgggctgatgatcatatacttcataaattgacacctcataagcggccgtcaatcgtaagacaattctggcttagatgtgaacacatccaagcggtttctatctatacaaggtcaaacagcacgaggaaaacagagtacgtgaataatactcgagacaaggcatgctaagggtcgccaacgccgatcctaaacggcgtcgggaaacgtatgcgggttcgccagcgtctcaggactgctcctcaacgtgggcccaatcaagtggtcgaaagcgggcgagtgctcaacacgcggcgtaaagtcttcgagatcccacaggtaacccagcgtcttgagcgcagaggttgcgctgtacgaggccttctggccagtcacggggtcgacgccgtagtcttcaatgtggcccttgggcgtgtacggcgagataagccacgtaggcatgcggccgcccagacggtcaaaggtgaaggtgtagtcggtaccatcggcagcagtctcaacgtacgtcttgtcatccgggcggacggcaagagggggctcgacgtgatcatagaagccgcctgtttcgtcaaaggtgaggaggagtagggtcttgttccattgcgggcctgttcggaccgcgtcgtagatctgcttgaccaggacctggccgaaggagacgttgccggaagggtgcatggagtttgtgtcgaggtcgcagcaggaggggtttatgtaagagag

SEQ ID NO: 11356 - DNA, 1344 bp, Emericella nidulans
taccagaacatattccactgggtgagacacagaaggcggcaaaatcccctccttcaagacgcggaggaatgatccttacgaggttgtccaccatccaatctctttaagaacgacttactaacttgtattacagtaccaagctggcttcggcaactcgtatgttcaacacaaaatctggctctgcttagcattcaacgctctaacgcaggataatccaggttcgaatcagaggccgttcccggcacaattccacatggccagaacagcccccgcaatgtccgtttcgggttgtacgcagagcaggtcaccgcgacggctttcattgccccccgtcattgcaacaagaaggcttggctgtaccgcgctcgtccggccgtagcgcatgaaggattcgtacgcagtaaccgatcgattccaggccgaacttggtgctaacagtgtcctgtttcagaccgaactccccgacaacaaagacaccgagtgcagtttccttcccctcaatcctcgcatccatgtctcccccactcagctcgcctggcacccgtttgacatcgaagagtctgagaccgatttcgtcgccggtctcaagactgttgccggctccggcgaccccaccctccgtgagggcattgcaacacacgtttacacagctaacaagagcatgacaaagagggcctttgtcaactccgacggcgagttccttattgtcccccagcaaggcgccctcgacatccagaccgagttcggtcctctatttgtccagcccggtgagattgtcgtcatccaacgtggtctccgcttccgcgttgagcttcccgatggcccttcgagaggttatatccttgagatctggggctcgcagttcgagcttcctgaattagggcctctcggtgcgaacgggctcgcgaatgcgcgggacttcctatacccgactgcgaaatacgaagtcgttaaggagccgtgggagattatctacaagctaggtggcaaattcttcaagagcacccagcagcacagtccattcgatgttgtggcgtggcatggaaactatgtacgtcatgcgcttccgaaccttcttccttcctcttatggtaaacgtaactgacagttattgcaggtcccatacaaatacgacctgacaaaattcgtcaatgtcggctccatctccgttgaccacatcgatccatctattttctgcgtccttactgccaaatcccgcgaccttaatgcccctctcgccgatgtcctgatcttctcgccccgctgggatgttgcatcgcgtatgttccaccaggtcaacaattcgaaaacatatgttacaggaagcagaactactgccccctt

SEQ ID NO: 11357 - DNA, 712 bp, Emericella nidulans
atagtttagaccaggtgttgtagacaaggtctcatcttgctgctgtagcataattagctgacccgctcagtctcgccgcggaccatggaggttggattacatcgatggatttatgtttcgatcctcctggtgcacctactaaaaggtaacaatacaaaaaatatgtagagtattatgatctatatacaaaagtaccttatcctatcctatataaaacagcacgcttgtgaacactcggtgcacctatcataaaacgaacattccatggcaaaggaactagatccggagtcccttcgccttcgccgccaatatctcctcaacctctttagcatgctcactgaaatgatccaccaagttgtcccacatcttcggctcgtgctcatgcctcttctcgctcttccacgcaaagtccgtgattgtgaacggtcgtgaagactcaaacatgaacgcgatagatccttcagagatgcgcatagcgggaggatcagtctcgcccgccgttgcagcggagaattcctcgtacgcaactccgtgcggaaccatcccgcattcaaacgagatagagccgggcttgaatgcgtcggagcggccgccgtaatcgccgtagatgagacccattagctcggatgccgcgttacggtggtagtaaggggggcggtaggtgtctgcttcctgttaacaagagttttgcctgctaccagtgcagcccccc

SEQ ID NO: 11358 - DNA, 2057 bp, Emericella nidulans
cctcggtgcagacagtatcggactcctgaagaacgagggttcgcttccttttaccggaaaggagcgcaatgaccctatccttggtgaggatgcgggcttcaatccctacggtgcaaatggctgcgatgaccgtggttgtgctcaaggaacccttgccatgggttggggtagtggtacagccaacttcccctacctggtcacccccgagcaggcgatccagcaggaggtcctcaagggacgtggcaacgtgtttgcggtgacggacaactgggccttggataaggttaacaagaccgcgtctgagtctacgtaagttttccaagtcctatagcaagagatggtgctaatttgttagggtatctctcgtgtttgtcaacgcaggtgccggagaaggattcatcagcgtagacggaaacgagggtgaccgcaaaaaccttaccctgtggaagaacggcgagaacctgataaaggcggccgcaagcaactgcaacaatacaatcgtcgtcatccactctgttggcgccgttctcgtggaccagttctatgagcatcccaacgtcactgccatcctctgggctggtcttcccggccaggagtctggaaactcgcttgtcgacgtgctctacggccgtgtcaaccccaacggaaagtctccgttcacctggggcaaaacccgcgaggcatacggcgctcctctgctgactgaagccaacaacggcaatggtgccccgcagaccgaccacaccgaaggcgtcttcattgactaccgccacttcgataggaccaatcagactccgatctacgagttcggccatgggctgagctacaccacattcaagtactcgaaccttactgtccaaaagctgaatgccccagcgtactctcccgcatctggccagacaaaggctgcgcccacattcggcaccattggtgaggccgaggactacgtgttccctgacagcatcacaagggtcagggagtttatctacccttggatcaactctactgatctaaaggagtcatccggagatcccaactacggatgggacgatgaggactacatccccgagggtgccaaggatggatcaccacaagacgttctgccgtctggtggaggtgcaggaggaaacccacgcctttacgacgacctcttccgaataacagccatcattaagaacactgggcctgtggctggtacagaagttccccagctggtaagtcgcttaatctttcccttttttttttttttcagctaggagctaacccggctagtacgtttccctgggcgggcccaacgaaccgaaggtggttcttcgcggctttgacaaacttgtcatccagcccggcgaggagcgggttttcacgacgaccctgacccgccgtgacctgtccaactgggatatggagaaggacgattgggtcatcacgtcttatcctaaaaaggtgttcgtgggaagctcctcacgcaagcttcctcttagggcttcgttgccggcggttcagtagcgaattacttatctaacaggatgctggcctcggttggctggctccgatttctggtatattaattgatagccaatttacgacttcctattggtaatcctttgactaccagtgcgatacctgagtcagtaagcaatctgcattagtaacattgtccacatcccgactcacctggggagtttaatagcgtaatacgggtcactgatgccccgaactagccctcaaacctgagatgagccctcggcttgaacaatatgagcaatctcagtcctacagcaagcatcggttatgttatgctcgtctctcccgcgccatgcctacttcatatatatggctcgcttcgtggactcggaagaggtggggccgagcgccacctagggcacgaaggattgaactcaccctggcacggcagttcctggggttgaatatccggggtagttcacattacagctacagtggccaatggtgttgaggcagataccacgggtccgaggtgttgtttactacattatatgagaccgagcccctactctcacatcctcttcttctacttt

SEQ ID NO: 11359 - DNA, 162 bp, Emericella nidulans
gattgcttcaccatgacacgagataggtcggagattgatggctcgttgggtatgaagatataggtgcaattctggttctgctagcaatagtggccgtgataaggccatgaatctgatctccgtcggaaagtgtagctgagagtttcttcagagaaacagttg

SEQ ID NO: 11360 - DNA, 274 bp, Emericella nidulans
  unsure (1)..(274): unsure at all n locations
taatgctttaaaatagggagtatgggtttggagatgagatgttaatgtagagatatagtgtgtgatttgtttgaatantagggttagggaagagatnagtataattaaaaagganattgtagtagagagnagnagtcgtaataangnagnntaaagtagttggngaantatngatagtgntgaggtgatagtaganagaagtggtggaaacgagaaggtgatgttggtgataatggagtagataattanggggaattgaacatggtggtaatgg

SEQ ID NO: 11361 - DNA, 1734 bp, Emericella nidulans
ctaaatcacaacttgctaactttccattgccctgatttcctggttcacggccagttccgacagaatctcctcgctcccacccccgacaaccataacccgaacatcgcgactgatctgctcaattcgagccccccggccgttcttcgagtacccgagacccccgaggacctgttgggcttccctatttaccatctccagggtccgtcccgcaaggaccttaaggttggcaaacaggcctcccattgccgcgtcggtgtgattggcctttgctgtctccgccatgtacacgagttgctccatccatgcatatgctgagtcgagacttcgtcccattgctgcgaacttggcccggatcacctggttctcgataagcttcttaccgaacgtctcgcgggttatggcgtgacgataagcatcttccgcacagacgcgagccatccgcagcgatgtacaagcaagccagagacgttcgtggttaaagtctatccatgtcaggcacgacaactggtggtagggtagtcgcagggcatactgttcatgataatgggaaaccctttgttttcttcgccgagaaggttggacacgggcacctcaacgtcgtcaaattcgatatacgtagacccttcatgaatgcgtcagttcaggatagttctcgcacatgtagactacatgcataccgctggcaaggacacccgagttgtcaatcttcctgcgcgttacgccggacgcattgagtggaatcaccagggccgacaccccagcgataccctcgcctcctgtccgcacagcagctgtacaataatctgcaaaaataccgttggtaatccacttcttcgccccgttcacgatatacttgtcaccgcggcgttctgcggtcgtggtgatgcccgcaacatcggatccagctgtcccaattagcccacagcataaaactatgcgtagataagagtacgaaccatccggctctgtaacacccagacaaaatcgtgtcttcccacttagcatatcgggcaggaatcggttcttttgctcttcattcccaaagttgatgacaggcggcccgccaattgaattgccacatcccagtgcccagataacaccaagatagccgcatcgcgcaatctcgtcgatgacaatcaagtcgtggaagccgtcccattcttcggctttgattcccgcagggagcttctggccacgcagatagtccgtggctaggggaaatggggtggccgctgtatatccaagcgcagcgtggcgctggtacacctgtgcaacgttaggaatgcatattatcaaggacttcagagtgtgttgagtacatacttctacaggaacggaacccttcttttcccattcgtcacaatatggggctatgtgggtgtcgatatacgaccgggcttccttttgcaggcgtcggtgggactccttgtagtaggggctgtacctccggttaagccagagagggtcggcgaagggaagacttgatgatgacatggtgtggagaaatgcgtatcttttgctaaaggtatatgtagactgtgtgaggttattgttttcgttataaactatataggatatgtctattttgctcgatgctgtcggtccgtggacgccgaccatcggaccgcatgccgaaggactctggattatgttgctgagaaggctcggtcgatgcctgccaacgctattcagcttatctaagtattattgcgatatagttattacatagttagt

SEQ ID NO: 11362 - DNA, 424 bp, Emericella nidulans
aaaaaggggtttcgtttccatgtacttaaacatgacactgtctgactccgactagactttctcgatagtgcgaggctcatgctgaatgctgtgtgccctcgcactttcctgtgacatgattctgtaccggagactccactacagccgggcgcccgactgagctcgactgatgtagaagacccacacgaattcccatatatcatgatctgcctatacacccagagtgctctttatcaccctggcatacggcaatcgaatggaaagccctgtggcgtatttgttcgattgatgggggcagacgctgttgccgaagctggaacccggacagcatgattagatggagagttccagacagctccatggttttgctcgccttaacgtcctgtctgaacaactgtccgtgtggttttagccaagacatgga

SEQ ID NO: 11363 - DNA, 473 bp, Emericella nidulans
tgaaccacgtggcacgggattgctcagagatgccgaaaatcgtattagcactgttccagaagccgatgaggatgtacttgacgaacgcggagagttcttgagtccgcaactgccattgcaagagaatggggaaccccgacgggagagagctgggtctgcgcctgtttcaacacctccacgagaagcagtagcctcgggagctctcagcaacagcaatgagacaacaccgaaagcaagtgacaaggcgcgaaaacacaagtccagcagctcgtctttctttcccaaaatctcccgttggtcaagaaccacagcttcctctatgggagacaatatccgaaacagcatgcagcccggaaagaaagagcgggtgtcttttgacgcgtcgcgttcaggatccgatttggctcatggtccttacaaggcacctgactactatgaccctcaaggtgatgacagactccggtcaaactaca

SEQ ID NO: 11364 - DNA, 116 bp, Emericella nidulans
atatcagaacaagaacaacagaagatatcaatcataagatcagaagatcaataataacatcagaacatagatacactgaacaagaacaatagaagaacaataccaacaatatagac

SEQ ID NO: 11365 - DNA, 136 bp, Emericella nidulans
ccagttcaagctgagcaaatagtgagcctattggtagactctagaatgtgatatcggatgctggcgcatcggctgctgaagcggtcagacgtagggaccagtaccagtagcatagaatgaccatcgcaaatcctct

SEQ ID NO: 11366 - DNA, 105 bp, Emericella nidulans
ctggtcatatagcttcttgtgctggtaatctcgactgatatcttccgcttcattagtacctatgcaattcttgaggtcttttcagcctaccgtcaagcctatcag

SEQ ID NO: 11367 - DNA, 2790 bp, Emericella nidulans
cgacattccggctgttgatatgcctgcacgtcttggaaggttcggcggtcaatttgctccagagttgcagatggacctcctcctcgatcttcctagcgtattccacagcgtcctctctgacaaccggttctggacagagttctctgccagccccttcctccgtcctagtcctcttcatttagcccatagcttgacgaaggccgtcggcggggcgaacatctggctaaagcgcgatgacctcaaccctttcggcagctatcaaacccgcaacatcgtcggccagattcttttcgcccagcatattggaaagacagagatttccatggaatgtggatttgcagggcatggtctcttctgtgctaccatgtgtgcgcgcatgaatatgaagtgtacaatcctcatgggggcctctgatatcgccgcacaacctgacgccgttgaggaaatgaaacagctcggcgcgactgttgtcagcgttcaatgctcaatcagtgacgatggcagcggcaccctccgagctgccaccaacgaagcccttcgctactcgttgactcgcctcaattcgacataccatatcagtactggcaccgtcggcccccatcccctcccaaccatcacccgcaccttccaatcgctactcggccaggagatcaagatctgcagctcagaacttccgggcaggggacgtcgaaagaacaacttcagaccgtccgcccttgtatccacttccggtgccgcagctctaggcatgtttgcgcctttcatttccgacccagccgtccgcctcattgctgttgaagcagcggacgcggcaccactaactcacggctcgccgggcgtaatgtacggctgtaagactcttctattgcaagacgagaatggccagattctgccgtcgcactctatatctccagatctgaatttcccttgcgcaggccctgaattggctcattggagggatctcgggcggctagagacggttacggcgtcgagcgaagaagctgtaaggggattgaggatattgtgtgagagcgaggggattgtgcctggtctggctacatcacatgcagttctagagactgttagggttgctaggcaattggggattggtaaggatgttgttctgcttatttcgggctgaggctctttccatattgttgaccctttttcacattagttgtaaattgaccgggtgtttggcgttggctggaacttatttttggaactttctttaaccagctggatggtttactggtagttctggtggggtatgaatatgagttgtgcatcgagagctatatacataggtcttttgtatttgatgccggtcatgaataattctatcgtcagtcgtcgcaatcgagttcatccatctgtaccgttacatgcgtatcgtacttaatcctcataagtaactgccatatccaaaacttccacccgtccccgcccccgagtctcattgccaacaaactcgttcagtcctttgaatgcaccaggctctgcaaaaccaaccacctcccattcatcgctagcaatctcctgtgactcaatggattcgataaaactcaggatcttatccttgacgttgctcgggccctttggctggacaggcgcactctcaccctcggagtcagtgtcgtcaccgcggcgagccgatttctttccctttccaccttttttgtctttgaacaccaccaccgctttgagattccttctccttgttatttgacccagccggcgccgcggacttaacactctgctttagcagcgacacgggacaagttactcgaagccgcatccgtgctctcataaccggaataggctgccacgcaatcaacgccttcatcgcctcaagcgcgagactcttggccgacttgtttgggttcacacccgtccatagaggtttcttctgttgcctaggcgctgcggcgtcttcatcacccgctccattttctcctgtctgcgctgctgattgctgctgctgcatctgcccactcgccgctgtcaactgatccagtgccttcgaaatcatccccggcgtataaaccctcttcgtcgtcggatcaatcagtcgacctgaaacaatatcaagtacctccttctcaattcgctcggcgatttcttttcgctcgcgctcccccacttgcacttcgccttttcgtaaaatttcctggcggatttcgtcggcgggcgtgtcagggccaaagcggttgattaattccgctgcaggtgcggtctgtgctttggagacagaaaggaagatcgtggggacctgaaggacattgtcgaggtctttttcggcgccagaacgatattccaacagtttgtttttgtagcaggctagttcgaagcgtttcttgcctttttttaggcgcacgacggagacgtttgtgaattttatctggttcgagggttgattgattggcattttgccggtgccctaattcccagaatctatccgtaataaattaagtatgatgggatgcgtgcgacaggcgagacaataaataataactcttcgtgctgaggataataaattcgtgccagtatcgataaccgacgtcacatggtacgggacccatcccgcagctgactcagcctgactcaagtctcgtgactatatatggtcccgtctgattggcagccttcccaggttgctatcagcgtcatcgcttgggacctgccaccgcccgggtctcctcacctaggttgcccatccccatctctcctcatctccatcctctttctcatcttgtatctcctcagtacgtagctgggtcatctagctac

SEQ ID NO: 11368 - DNA, 153 bp, Emericella nidulans
tcacccaatcattccgcaactggtcggtcacccttcacttgcgaccaccagtctatatcccagccctttgagagctccgtacatttccttcgctccgtgagatcttgtccgtacatacctttcctttctccagatgtccgctcggactccctt

SEQ ID NO: 11369 - DNA, 249 bp, Emericella nidulans
gagattgatcaagggctatgacctggtatgttagaatcacttcattaactaaaagccacactgttttaataggtacaccatatagattagactcgaagggaaaacacgtaggaagtatgtagaagttgtacttgatgcagacacacttgtaagctgaaatttagctgaagaacaccccccatgatgtattgggaatctactcagataaagtggctatgtaaaggatatttagttgtggaatatggtaat

SEQ ID NO: 11370 - DNA, 1732 bp, Emericella nidulans
ccgactggccgattgtctgattgcgccagcctatgccacccgtgggtatatgctagatgccggacgcaaatggtacactaaagagttccttaaagagatgtgcagttacgcatcgtttttcaaaatgagcgagttccactaccaccttagcgacaattacccgctcaaccgtggccgcaatgaaacctggcaggacgtctattcgcatttcagtttgctgcccgaggatgagtccctgctgggcatcgtgcatggccgcgagaatgagacgctctcgcgcaaagactacgtcgacttacagaaacactgtgcgaggcgcggtattgctgtgattcccgagatcgaagctcccggtcactgtctttacgtgacaaagtggaagccgggtcttgcacttgacaaacgcgacctgctcaacctctcgcacccgagcactatccccactatccagcgtatctgggccgagttcctgccctggtttgatgtaaaggaggttcatgtaggtgctgacgagtatgactccagcctagcggacgactacatcgggttcgtcaacgagatggccgacttcatatcatcaactgcaggcaaaaacattcgcatctggggtactttcatggaagattcagaagacaagagtctccgtatcaatccagacattaccatccagcactggcagtacggtcagtcagacccgctcagacttatcgaccaggaccaccacatcatcaactcccaggactggtgggcttacatgagcatcaagaatgaccacatgcccatccttccggctccgtatccgcagttctttaacgagtcgcgtattctcaacttcgctgaccagccttcgtggcaatggatgccggctgacttcaacaatgtcaacaccacagagcagccattgcccgatgagccgctacttaagggcgccgtgatggcagcatggaatgacaacgggcctgatgcgtcaacaaaacttgagatgtactacgccatgcgcaggggtattgctcttgttggtgcccgttcgtggagtggtagccgggggcctgaagtgcaaccgaagaccttagacgccagcatcgacttcttctcgccgcttgccccagctcagaatcttgaccgggtcattcctgtccctgggaatggcagcgatggtcttcttgtctcctgggcgcgacctaccagcagtaccaatagcaaccacattagacttggcagggcagcaagggcctgaattacacctgcccctggaggccaccgggcccttacacttttcagaaaagacacaccctctcccttgacgcgaaggactctggtttccaggagatggttcattacccattcgttcgaaacattaagatgcctcgagctaacccggccccccgtcgattgggctaccacttgggaccacagcggtccctttatgttcgttacccctgaccatccctatacccgttttacctggcgacccgctgtgacactgctacccctcatctttgttgtgctgatccattctgtgccatgcatgtgctctctagttagcaatatcgcgtttataataaggcctctttctgttcttgtcgtctttatcttatctcaatctctcgttcctcatttttcttcagtcctaccttatcactcctctccttcttttcaccgcttttatttatatcatatttcctctattcttctttttcattctcctcacttcattatacgcccttaattc

SEQ ID NO: 11371 - DNA, 511 bp, Emericella nidulans
  unsure (1)..(511): unsure at all n locations
ctgtaccctcagacgtcaggaaccttacccctgtctcgtggcacttctatcgtgcagcgccaagcctatccagtacaccttgacatgcggcaaacgccccagctacctggaacgaaatacactgttacagcatctacaggatattgtttactgcatcatgcccaggagtatataccttcccccactcgggatgaccttcgaaggcacataccgtcaacatcctgaccacagccatatggcgagtctttgacgccctcatcaactgtgcacgtccatgtataaccattgcctgaacgatccgccggcttgaccatcatgctccacgccacgatcggatggccatctcagagggcgcgaatgattcggtaggcctccattattatcaatgcagaagcagtanggacatgtcacgttaggatccttaccacagacttgtggctatgcttggatgaccaaatgaccgtgagcaagtacagatatactactgctgttcacataaaatccgtggtca

SEQ ID NO: 11372 - DNA, 3010 bp, Emericella nidulans
tgtgggctcagtactgggatctggagcgtttgtgaacttgacaagatcaggtcttcagacgcagaggaactgcaaagacggattatcctctcccagtacctgctcgcagtggacagcgcaggcaaagaccctccgcaggagtccgggctgcaaaacaacggctggtacggcaaattccatttggaaatggtcttctggcatctcggccactgggcgcgctggaacaaatgggatctactgcaccgtagtctcgacgtatacgagcggtttctaccttcatccattgaacgtgcgcagaagcagggatacgccggtgcacgattagggaagatgagtgacccaactggaacatcggcacctggaccgcaaaacgccctcctgatctggcagcaaccgcatccgatgttcttcgcagagctggagtatcggttgtggcccaattctacaacactacacaaatggggtcatcttctagatgagctcgcgacgtggatggtctcctatgcgtggtggaatgcgtcgacacaggtatacgatcttggcccgccgatgtatccgtcgtcggagaacacgagccctaattcaacatacaacccgacctttgaacttgcctactggcggttcggtttgaaaattgcctcggactggaggatgcggcaggacattccggtccctgagtcttggacccgggtccttcacaatctagcaccgttgcctatcgtcgacggcggatattccatctctgctgatctgccggatatgtggactaacgccgcttatacggcagaccacccaagccagattgccgtatacggccttctcccaccgacggctgctgtgaatgtatccgttgtcaatgctaccatgaatcggattatggaaacctgggatttcagcaagtcttatggttgggatttcccgatgctcgcgatgacatcgcttcgtttaggggacgtgaaccaggctgtcgggtggttactggattcgcacttccagttcgacgatgttgggaatcctgtgggtacggttgtgcctacaccgtactttccggcgtcgtccgccttgctgcttgcggttgcaatgatggctggcggatgggatggtcaagagggcatgcattttccgaagcactgggagccaaaggttgagggctttgcagcgggaatctagatatgcttaacgactagtgtttcttcgcaatctttgcaatccaacgtggatacgtttgcgcgtagagcgtggtcagtcaccataggcctggggtaagctgagcgcgattgtccatggacggacacattttgatattgcctgcgctacagtcaagagcaaaactcgcttaatcactatttcgcttcagagatatgtcgtacctctaatagcagacattcgacaggctcataatttatcgagcaaggactgtctcgcgaaaataggctgttactacgggtattaagaggagctgaaatttggtgtttcattaatgcgctcgtctattcgtcttgtttgttctcttgtacagcgtcgatgtcttttggcgtgactgcttcagcgggttcagtagcttcagtatcctcgactgtctccgacacggttcctttttcggtatttgattcaacatcatcccggggtgttgaatccctctgccccttgacagaatcttttagtgcgccaccttttcgcggcggaagagtctgcataaatgcttctgcccaatcccgtaattgcagccaacggaccatgatctccacgacatggtttgtggcaaggacagggcgtgagttcatctggatgtactgtccgattggtaatttagccgttcggatccccaattccgttgcccgcttgtggcaaatccctttatgccggttcttgtctaccagtccaccgattatatatgtgctgtacggcttgagttctgtcagcgtctctgagctgtcactagtgagatagacaatttccccatcttccggcttcgcatcagtcttgtcctcaaatggaccaactagcttcccgccattaggtccctgcatcacctcacttgcttccttcgcagcctgtagccaatcctcacccgtaaagcgtacacctttccatccctcgtgcgtcttgtgaagcaccgtctcgaagcgctccttcagctttttattgaaagacgaaatgatcaaatgaccgttaaatgcagacttgttgttttcagagtacgaccgagtaagctgttgacccagggagactctctctttatcctgcatcaggtcgtcaaatccgcagtcgatgatcagtgtgagcggaaggcgtgttgatttgcggtgccgtgtccgcgtcgtcatagggaataatttattcaactcctcgtttgggtccttgccctctcgctttgcttcttcccaaagttcacgtctgcgctcttttcgcgcagcggtcttttgcttccgtatgatcttgcgctcttcccgtttggcttcccattgttccagcttggcctgacgtctcagctgtctttttgatattttctgctcggtagtttctggtccatccgtagcagtagaggatgctggctcttcagactccttcgagttatctgtggttgcgccgggtatcgctttttggctgttggtttgctcggccggagatgtgtcgtcttgcgagcctttgattgcgccggtaataaccggttcggattcgtgggcttcgctactcccaagcttctggatttttctgggtcgttcttcctcttccattttgtgattgtgcaatggcaggtaactgtaatcgttccagtcggaaaaaggcttcagataaccagccccacatgagaatatcaccaaccaagtcatgtgatttcgtctcagcttttaactacgccagttttgttttatcgcttgcctgtaaagcagtcgaactgaatatcaattctcaaagtatattaattataccgagtataacagcgtaagacgtcactttgtccaaggagtccgatccgcagctatctacaaaatgaaaacggtccgat

SEQ ID NO: 11373 - DNA, 438 bp, Emericella nidulans
tctgaatgcagttgtgatgagcctccgtagcccaaaacgcatcacttcgtgttatggtaaaccatgacgactgttgacatactttggtgcccgccacaccggccaagaatgggtttgatagttcaacattctatacaatgcggacaaggaatctgttcatctatccatagttggaaaaccttgaagagacgggcatcatccccaaactctattgcgcactataacaccgatcatcaccgggctaccggactctaactcataaaggaggtttcatgaagtgccacatattttttgcccgtttcatttgaacctaaggctttgatgtgcgcaacattcctgctcgtggattcaagatctgtgcaatggcgtactatacaaatgagtgaatgaggaaggactcagccagcacctgaaatgcttgctaactactgagagtgt

SEQ ID NO: 11374 - DNA, 2449 bp, Emericella nidulans
atcccgcatagtcgtcaaccattctttgctttgaacctcttgtgtccaggactcctcaaccccatggcggtcagggtggactaggacaatgttgaaaagttcgtgatttcggacggggtaagcaatgagatggcgttctgggccgagccaccgtgtcgcctctggaacttctaccagtctcttcagttcgggatcgctctccatctcagccttggtgagcataattcggtatgctgcatcccccgtgggaatggcctgagaggcgccctcacccagtaactgatcgcggataatcgacttgattccgtcagctgcaacaataacatcagccctgacaacggtgccattgaccagcaccaccgatgtggattcaaagtcgacagttgctacatgcgaattcactcgcaactccacattcgggagttcgagtgccttttcgattaaagcgttgtggaggtctgcgcggtgaatgaccacttgttgcccgtaggtcttgttcacgggcatagtcccaagaaggcttccgtcttgccatcgtcgtacatggatatgctccagtgcaacatctttggcatgtattaacggcgacacaccccagcctaaaattccattagagcggtttcttaattctaccgtgaaggcacacttacggtcaaaaagccttagcatgttgggagaaacttgtatacccgcgccgacttccataagctaatatatgcttatcagtgcgtgtgtcttgcttgaaaaaattttgcatacctttggagctgactccaagatagtgatatgatgacctcgcaagcccaaagtcaggccgccgccataccaccgatccctaaacccgaattcttgtcagctcttgcccgacatactacgcattgcgcagtcaggatcgcccacacgtaccagcactacaatcttccagttagcttgagaaaggccaggtcaaacgaaagccaggggacttgcccaacaatgacaacctctaagggcgtcttagcttgcggtatatgcatgacgatttgttgacttggtggctaactgctactcgcccttgaattgaatttggctggtagaaagcaaggtttgagcaatggcaattgaccgcggacaacccggcgtctcagaattcactgaccctacaatggatatagctcgcagccggggtgtatggcctagatgtagggaccattcaactgcaagattgactccctgggagaaagcttaatatttttatatccggaatcccacccatctgtgtccggtaattgcggcaacgactacggaacgaagcccccccacttgacctctgcacagtaaatgttgacggcccttttattctagcaaaagcaactttcacccttgtttcaattgaccttatatcacgtctaggaaatatgctaatacggttcgtctccaagaacaaatgcctacacaaaataaaggtggcgaggccataaacgccggaaaatcctgaacgttgcttttcgctacgagtactcagggccaacccgtggccgaaatcgcctctcggggcagactcggcgggcctcgattcgtgggcggaacccaggagttcgtgtggaggtggccccgttcggctctttcgacagttgaaatttgccgagcccagcattcccgtccctactctagggtagataggactcggggttcacttgtttcactgcttactataacctcctaccactggatcacgccatgatgatactgcccaatattttcatcatgacttggaccattaatcaaacagctactcgtgtgattactgcggcaaatcatagatacgcactgccgaaagcaaatgtgccccaaactaaagcggaccatcgctgctcgccttcacctcgtctcttgaggaccccaaggaggttaaggaactgaagtaaatcggcggtgcgagctccgtcttcccaccgcgcttctcagacattgagtaagcgtaagcatcgtacataaaaatcagtcaggttggcaagagctagccctagccttgcctatacgaaaccgagttcgtaccttgagtcaccacgaggcagttttctccgcttccgatgagcatcatctccacttcatatgcagtctatactccatccacccgctcttgaccttttcctccccgaagtgcgtatggggttgggggaaccagcatagccgtacccgtgatcacttcaaatgcagatctacaatctccagtcccttatcaaacggaaaatttacgtactagaacctacaaagcacaccctcaaaaggtagttgggaccatctaatatttaacggtcgcagacgacagttaatatggaagtatagggtttcttcttcactggagtctccttgtctagccccacgatcggatgaatgggcactggagcaagctctgttacagtgtactactaatatgggaactagctctaagcacatacatggccat

SEQ ID NO: 11375 - DNA, 2058 bp, Emericella nidulans
  unsure (1)..(2058): unsure at all n locations
gagtaggcatggttcttggtcgagacgcgaagctggctgaagccctgggtggcttggccgaggagcgagaaaccaggagaccacttgatggacgactcaccaccgagaagagcagcgagaacggaagcagcgggcttgtaggaagaagttccgaaggcgctggtgccagggaaagcgatcacgacggagttgccggccttggtagagatacgctgctcaccaccgtagtacttcgaagcagagtcggacttgacctggtatcggccggtggtgccggcattcggaagacccttgaagaaatcaccaacccacttcgaaagctctgcagagctaacaccgctaccgacgagagcgatgttggacttcgcataggcgttctttgcgaactcggcgatagcctcagctgagaggttcttctcgtatggggcatgagcggagggagtaatagtctcaccgagaccctgatggaaggcgacaccgtgaacggcatcgacagcaacagcctcagggtcattggcaatggcgacctgtctgagcttcagaagcttggcgataatttcattgagctcgtagcctagtcgaaggttaggtccatatatcgaggtttttactgcgcccttctcagcaaatacttactaggatacttggtctgggaagcaacttccgccaatagctcaacaaagtagggaaggtcgttcgcgaggaatttggtcttgagaacaacgttttcacgggaatgtgtcgaggagaattcaccacccagcagctcaacctcccgagtgatccgcagcgccgaacgtttgagtgtagactatgaattagttgagaaccacgtcagtacggattggaacctttaagaaggagcacgcaaggttgatggagcaggaattggacgtgaggactgacctggaaagcaaagagctcaagagcatcggagaaagcagggaaaggctggtagcgggtaccggccttcgcgaccaaggcgagagtaccagtgacaccagcaggctctctgttcgcaattttcacaccagcagcctccgaaacatcgtattgaagacccggggtagcggcagaagccatgccccgacggctggcagcgttctgaagcgcacggggcgcatttcgactgatggcggaccgcgacagcatcatcgcatgtgtagtaagacaattagagagagattgtgtaagaagctggcgagtgcccgacagcaatcgagaatggtggtggtagtggaggagaggggagaagaacggctctctgctggctggtggtttgacgacgtctgaaaagcttcaagttgatgccggcgttgtgattactcgcttcatgattggtcaaagttgcgagagcgggcggaaccggcagtttaggtcatgtgattcacgtgaccttaatcagtccgataacaagaaaaaaaggcgaagggtaatacagcaactcggatcggaaaggtgttgcaacaggcgagctcttgcggatcaggcttgctgaattgcctcttttctattcaggacccccatggtcttctcccggtgacaacggtactccttctagagaattgcagccggaggattctctagaagattagagaatggcttctcaagtatgcgaaattacgcaattcgaatataagcatctttcgcattcgctgacgatagaaacggtagtatgcggcagagctttgtatgctcttagtcgaagacaatttcggcgagcttttcggggtatgtttgatttcgctctcattggctcagttatcgaatttggtctgacgttcaacttgttgagatggtagcgcatattctcgaccttgcatcgatatgaacgcctcactctgccccgacttctggggctcacccgtctctctgagaatcgactacgggcagcccttgtagccatgatccagcatcatctcgttcatttctatactgccgtcgaggaggggtgcgtcacctattacagcgcatatatgcaggcggcatactatcttatcgatcaggncaaatnctggagttgcgagatagactaagaaatacgctgcactgcatgtc

SEQ ID NO: 11376 - DNA, 3731 bp, Emericella nidulans
acgaccaagccccctgcaagcgcattgcagtctcccaaaaccttacaggggctcgcctcacccgcggttcaataggctcatgcacgcgcatgttgacagctgtgttgccctttcgagttctaggcccatgttcgtgattcggaattctgatgctcattttgaattatttaagacctagtttgactagcaatagttgattagcaaagtgggtcctcgatgcagctgggtaataggtgtgatggtggcctagtcactctcgctgtagcgctgttgcatcaaagatcgtcacactgtggcatgtcttcatacttttggtattgcctattcgcgctttttccttcgtttccgttgctgcatagcagttgttggtatggtactgatcagctacgctgtcgcacatcccagcatgctccgagtttgcagggagaccgcagcgtggcgttcatgattcatttcataagccattactctatatagccctttgacgtggcaattggaagtctgtttttcaggctttcaggctcacagagctcccctctactcgttcatgcgcgcagtgctctgtctcatgatggaagacatctccgttgccaaggctcagattgttcacctgagtggggatcttaccctactcaaaacatgtctaagccgtgcgtctatttcattttcccctctctccttgccgcgtattccaacagcccaactaggtttgtataccgtctcctttaacagtgtgtgatatattggcggattattgaacgagcgcagtaatgtctttggctggagctattattgttcctggctatgcttggcatatgcacaggttgctgtttatcagtcacgtgtagataagagtaatatgacgtcattatgactgccggtagaagtcgtggacgttgaaaaccagacgtataatttcattacgaccttcttcttttcctctattcatctcatagaacccggaattgaagtctaatttcacaaacgtaagccatacaccgccgcaactctttgacgcaggcttaactatatctcagaaacacgggacagcactcgattacaaaaatacaatcccacatctccaataaacaatacctaacgatcccgaatttcgccaacatgtggaaggaattgtcaaagattccctattttcgcggagttgccactcttcgcaaaccccagcggactttcgctttcaattcattagcaaagacccaatcccaggcagctcgcaggactttcattaccacacctttacgtcaatcccagccacaagatgaggaagaccacttccatgaccgcagcaagctggaccctcaacgcagcgaagaaacacagtcagccacgacggatgaggttgctactcgtgacaccgcgtttgatccgtccgagacctcaccggaaagcgaactaaatgcgtcacaaaaagagacaaacaagaaaggggattcgcgtgatccactgactgtcagtcccgcagataagaatgttagcgggacacgggatccgatggaggggggtgcggcgaagaacgcggataaggaagatggtgcgcatagcagcggggggtcgccgaggaagaatagggagagaaagtgagctcatacggttagagtactcggagcgctcagaagtttgacacttgaatgtaactaagaattgttttgttgaagtggagcgcatagtagggatatacaattattactaagaagcactgagcaggcaatgagctgaagaaacatctcggagtgtaacccacaaacccatatacacattgtgcctctcaaacaagagttgtcaaggtagagccgaattattctttcccatgttgaataatatcactgccatacaaataccagaccttttcactgcccgctggaacttcgccatttagtgcctttagcccagcattgaccgcagccttgccgataacgtcggattcctgagcccatccatccttcaagctagagtgcactttaccaagagcccctgcaaagaatcgagcgacagcctcggccggccgactttcctctctctgaccagcgatcaatcccggccgcaaaatcaccgttctctcgaatcctaaagctttcactccttcttcaatctctcccttcatcctcgtatatgcaaaattggacttgacgtccgcgccgctagacgaaatcaaaacgtatactttggtccccgcatcacgggccgctttggccatctccaaattcaggtcatggtcgagcttatactggttctcaaagcttccagcggcagccctagtggttccaagagccgaaataaaaatagacgggattggggttagggaagagagctcgctagcccacttggaagtatcggttgatacgatggtggtgagttttgcttgtggcgcggaagacgcggcttgaggagtacggcgagagatcgtatcaatccgcgtaacagcagggtttgcgataaggctagtgagtatatgagccccctagatatgtataagttccatcttctgacgtgtagctttgtgatgcgcgttgcactaaggctttttgcgcactgccggtactggactaaggacataccaccatacctgtacatccaatcaaagcgacgtttgccataatgctggagatattatattttgcacaactctagaacgcgatttcttttggacgtctaaagcagggtgtagtctagtgtaattgagcggagagagcgtaggcacaatgacgttgtctggatcacctcagaacttgcgctaagcctcaatgggatcctgtatgcctgaggcgcaaagttaggagtgtcaagtaatatgcggggaattatgctcggccgaaagcggagactttctgccccaatttgccgccttaagatttcgtgataagaaattgcgtgatcaccactaggcctatttaggtataacccctggcacttttttatcgagaactatatcgtgccgcctcctccagggccttttcttcctttcctcctagtaattgctcatttcttttttttttttttcttgtcattatttctgttcctgttccttgagatagcagatactcgatctggtgtccgagcaggaatcattcacaatgggctcttcttcaccggcgctttcgaccctcgccggtcctacatatgtgaccgcccagaccctaattcagcaggtcgcttacgccctcagcgataaggtcttctcctactcaccggattcgttcgacttggacgctgccatccgcgaatgggccttgaagcaggagctcaatgctaatggcgaggctccggccgtccaggccatggagactcgtcagggtgccggaaacatcgctctcggatacctcttctcccaagacttcgacctgaagaagcgccatgttcctcagggtattgtcgcctcctccgcgactttgccgtacatgcgcgcggccctggagcagctttctttgctatactctgtcgctagccccgttgctgcacacgtcgctgcggttgactacgccggagaggatggactggtctctgactacgtttctgcgctggctcttgacgaggagcttggtctcggtctcgtggcgagcgcgtctgtccatgaatattagcacatggcccttgttactacattgatcggctctgttctggcctacatccacatctaccaccgtgttcgcgtgggccgtgacaacactcgcgtcattgacgatcttgatcaggctggtctcggtcgcgtatactag

SEQ ID NO: 11377 - DNA, 1542 bp, Emericella nidulans
ggggtatgggcgacgccctgatagccgctgggggacgccgaacgctagaacccattggacatttcggttttccttcttccacatctggtggatctgccagatatgctggggctcgataacccggccggtcaagtgattcttatcatgcaccatggcacgcgcaatggaccagttcgtccacttgccgtcgggggactggacgatgtgcatgcctttgcgtatcagcagggaacaactttgcaccagcccgagtgcaggactgggaatggtaagatcttaccaaacgtctggatgtaagccccgccatcagacttgtggaccatgggtaccggaagcttcgtgaggtcgatctggtcgccttcaaggacattctccttgcacggccccgtcgggacaaccctgggcgggatcggcggcaacttatcggcctcgagcatcttgtctagaatctccctcatactagccgttggaggaagagccagatgacgcgccagacgaccatatcgttctgactgagactttctttgtgaggccggtgcaccgaggatgcgaaagaagccgtccttggcgccgatgaggttgttgaacagcggtgctttctcgtcgttctcacagaccagacgcgtgatggcggcagcttcaagatttgggtcaatggggtcgtttatcccgacgaggtcgttgtctgccttgagggcttcgacgaaggagcggaagcagagatggggttcgttggaggacatcttgttttgttgattccgctgaatctggatttttgactctattttcttgagaaaaacggatttcaagtagttctatatactgcaagtcggcaactcggttctggttatggccagtctcccgggtcagctcatccatgctcttcactcggaactcgggggctcggggatattacggcgagagggcatatcatcattgggtccactgcgcggattctaaagcttcgcaattaacttaatggttcagaaccgatgctacactattatagaaacaagattttatcccgtggaacttgtaagaacaaatgttcccacaatgtagacagtcagtaggtgactggagcagttatcgcgccacgtgaccatggcccatattccgaatcgggaccgcaacgtcgccttcagactgcatccacgtcacttaaggacgccgggtactccaaacagtcaacattgacctcttgtcagctatctggattgtgccctggccataattgggtctacgactattgtgagcatgaactgctaaacggactagagatgaaccggtctcctagtacggtggaacgccaggagatcgaccgggtgcttcgcctgaagcgcaacgagccgaagtcaaaagcatgctatccatgtcgtcagcgaaaggtcaagtgtgatggcagccatccctgccgaacctgtgtcaagcgagatcacccgagatctgtgcctacaatgttgagaaagacacgccccagagaaggagcagtccgacatgccgaacagacagcgaagtctcggaatgaggatcaaggcgact

SEQ ID NO: 11378 - DNA, 454 bp, Emericella nidulans
actgaaaggagactggcggtattactgtggtatataacgacagtgtctagcaatgagtgatggacttggattcccctttaactttcatggtggcctggggtgattactgaactttactcatcccatatgaccgaatgaaatactgaaataagggcacacccgccagggtattgacgaatgtcaaaatgatgtacaaagcgatactcaggggctagctgaattgaggcgtatgtatatagagaatgaggaatgataactggcatgacgtatttggtatgacttggtgggtgagggcctacttgaactcagaagagcgtctcttgctattggtcgcacattgacttacttgtgctctatataccgtaacagtgtgacctctttcgaacacgcctacatgtggcacacggcgcgaatgactattgttttgctgctttacacagctgcagaacataaa

SEQ ID NO: 11379 - DNA, 456 bp, Emericella nidulans
gtgccttgtactcaaagctcagcatgcagttcttgatggccatgtaagtcacgagacacacgaatcgaattacagttatgcacaccatcatgtcattctctttagtgtgccaacatatgcctaacaaggagctcagactacctgacattgtatattgtgcggataaggagcactttcttgccagctgggttcccaaaaactctagtgagggatgatctataataactaactggccgacactgtggcctatctacatggtgggatcagtacatgctacctgaatgcagtcatatataggaatccagcctgactaccagtgccattgcatactaactcaacattctgcgaacctaaactgcacgcgtgtgtacgttcgccccatgccagccgggcattaacgcatgcatgatgcagatgcattcagcagccgaggtcggtgtgcctacagagctagcc

SEQ ID NO: 11380 - DNA, 426 bp, Emericella nidulans
actctacacatcaatagggttttggtgcttctaaagagcactcgttgtctgaggtgattactgtaccagcccgtataactgtgtatattcgcattagctctcatcgttccaggagcatcctcccactcaccgacccattgccggactataccaaccatttatttaactccttgtacgcatacggcctgaatgtaactccaaaatgatcatgcactcgatcggatcctaccgatacacataaaccttaaaaccatgacacgcgcgttcactgtgtgatgccacgctttcaaccctgatgtaactacccgtctgtgacttctgaactagggcggttccttaataacacctactacatattgtacttcctcctgttatcagaccgtctgtatattataccacagactctggtgcctggctttggtgatc

SEQ ID NO: 11381 - DNA, 118 bp, Emericella nidulans
ttcaaaatcagttagtaagacggctcctgatgaggtacccaatactgtgaagccgtctcttattactcgagagatagaagctctcatagcgcagtaccctgagcaagttaacatgcag

SEQ ID NO: 11382 - DNA, 2419 bp, Emericella nidulans
ccgcatccgctcttagcaggttatcgcccagccacgggccatcacgccgagagctgtccctgccgtgcggaagagttagtaccagagcaggatatggcgcagggaactctttgggagtgagatggggcaaacgttgactcttcaactgctttaaaagggccgatctcgttgccactgcggtatggtcagcacatctttatcacgctatacgactgctgaagacgacgcgtacctcggactgataactcccagcaccgccgccgtaagaagccaccagtaattcccgctcagtgcaaatacaacgccgctgccgaccatgagcgccgaacccagacccagcacagctcgacgacccatagcatcagcgaacagagttaggagaaaactgatagccacgtctccgaccagcgtgagcgtcatgaatagaccaatccggtcatcggcgatatctagtgcggagagataagatgctagaatcagcgttgagccgccgtaggcaaagagccgaatgaagcgctgtgcgatgaggagctttgtgtcaagaggggactgccatagtgagaggaggccgagttcatcaatagtcttgcgagagagagatggcaatcggcgaggagagtcagtgccatgagccatattggctttatttagagccaaagtttatagttactagtggttggagtgctaggactactggcttttatgtgcagagggcattgaataaggttgagaaagattggaaactgaagcattacgagcgaaagcagaaggatgagccaaatgccaagctttgtattgtccggagtcggagatcaacagtaactggataccactaatacccacacaaagtgctggagatacgcgcaaattacagacctcgtacgctacaatagtctcggagattgcgtattatcaagacttgtccgagtctctcggagttaagcgacctatacaggcctctgactgaagcgcagagtcaacccattgccatagacaatcagtatattagtggaagtagatcactccctgaatgaaaataaagatcactacccaagtcctagctgacgaggttctaatgagcacccaatggacctaaaccaaatcatcaaatcatataccaagccatctctgtatacccaattacagcaccatcatgaatttcggatcacgatcgtcgctatatccttcatacttggagtacttgccgtttcttttgtcccggttgatcttagcacaatagaggacatttaagagaatcctgtattgcattagtatagaacccactggcgcagagatcgacacgtacataaaccaagcaaaaaccaacaagctcaagaccaccgtgtgaccccggtgaaactgcggcttatccttgttggggtagatgaatgctaaatagcggttagtatctaattacatcggaaggagcgatgggaagtagatgtgagacatactcgcaacaaaccctccgcagtttgcaattgcgagctgcattcccgatgtggtagctcgcttgtaatgcccagctgagttattcgagttccagaccagaatgcatggaacactcgcatacatccccgtagccatgaggaacgtcatgccgtactttgcttgtggggaggtgatgttgccaatcgccgcgtatccggcgatagcgattggaagggagaatagcataatgacgcctctgagtttcaagcggtcagaaaggaaggacacgaatactgttcttctgttagagtacgcagcacagaagacagcgaagggaatacctgtcagcacggcggccacggcgtacggtatcaccgtccagagctgcgtttggtttgcatcgctcgcgaagccactctcgtcgatgattgtcggcagctgtaaaagagtttatcagtaactgttattgcatttgaacagagtaatatgcatacaaatagaccaaatgagtatagtccggatagaatagcaaagtatgccgtagccgagaaccacatctgaggttccaggagtcctctacgtacttcggaccacaccaagctctcctgttcggctgcgagggccctaccaaatatcagtatgtggaatgctttgacgactggggcttacacactcctggatatgcggattctcgagctgtatcctctcacgagcaaatcggcgctcatcttcggtcaaaaatggcgtggtttctatgctattcggcagggcaaaataggcaaggcagccgcaaaggaaggtctagttagggcatgttagcgacgaaacaagacatttcaggaatcgctaccaaaagaccctcaatgatcatgatccagcgccatccttctaaaccgcctcgagggccaatctccgccaagccgcgagcaagcagtcctaggacacaagcgtgttagggaagtggcacatactgaaatggaggataaca

SEQ ID NO: 11383 - DNA, 4213 bp, Emericella nidulans
ctatagcggagataggtcgccaaaccgttcctacgattacgatcttgaggatgaaagtgatggtgtggatagcgatgatattgatgatgatgatgatgacgggagcgatgaggatgcgagtaaccagggcgaacttgaagaagactacgaggacgacgaagatgatgatgaggatgatggatatggtgaaggatatgattactccgagtcagaaattgagtctgtttctgaaggggaatcttcaccgagagctgcaccaaagaatacggcccctgaagttattgttttggacagcgacagcgaggatgatttagccgctcctttagccgccgctgatccaactgacaccgctaatggacaaacacaagatacatcaggagaaagctcgtatgactcggaagaccatggtccatcaggtgatgggtttagtgacgaagcagaccatgaacgcgagcccatagaaaaccaggagggcgacgacgtgggtttctcagaccggatggcagtacatggaactgcagaggaatcggggagttcgaatgctgaaggaaagggcaatcagcatattgtgaatgagcaccctgtagctggatggcagtctgaaccagagcggatggaagaagatgtacatgacgacctcgctactcaccaagaggagggtttccatgtgcagcaaaacatgaaagcggaatccacgcttgcagagtcctcttgggaacctaatcagaatgcgtcagtgaacgagtttgtggctacgcatgcctatcgtgaggattttcaaagggtagccgaatatccacttgcgcctaagcatgattccctcgactatctcgcggcaatatcggagtctgctgaacgtctcaatgctatctccgaacctgcgcagccgggtcatgaattggctatcgatcctagtttgtacgagctcggtaatccgcaaggggacaatgtaaaggaacctgatactgagcagtttgaacgctctgttgaggacagtaaagggcccagaagcatgcacgacagacacctggcgcttcagcttgatggtgcggcatcagaaacagttgctgagctcacagaaatacctgtatcagctcatgaaactcggcaatcgatcgcttcaggcccatctcagttggtcgtgactgaccaagccgctgcctcagttaaaacttctagcccgattgaagccttggaagacacccaaccaacactgaacttgactcaagaaaccttgtcgatattggaagcaggagaccggccacgaactccaactgtggttgatagggctcttgctctagagggggaaagcccgtctccaattgttgctgttaactcggagcctgaaggtgccctcattgtcaaacgcgaaggaagcgagcccgaacaacctatggttgttgtgcacaacaagatcgctccatcacccgacgaagaccaggcattgcaagctagcattgaagttgatgatcaatccgaagactctatcgacgagacgatccgtactccaggagaccgccattatcccggtttgcgaagcaaactctcttacttcgcacctgttgcaaccctaatcgaccactacaacgcgttagtagacacaatttctatcgtctccgaagtcaacccaccaacgaaagctggctcaggcagcaaagacttcattatgaccctccaactcacagaccaatccatggctggtgctagtgtctacgcccaactcctccgaccctacaagtcagccctccccacccctagcgaaggcgacgcaatcctcctccgcaatttccgtgtgaaaagcttcaaccactccgtcatcctcgttagcgacagcacaagcgcctgggctgtcttctcatcctccacagaaggcgctgatatagccgggccccctcttgaatacggcgctgaggaggaaaaatatgctactggtctgcgtcattggtacctggaagatggggtcgccatggtagcagactatcaacttcaagcatctgtagacagggagagcagagcagagacaccggctagtagtcttgcgcacagtgatgcgggaagtattgatatggcgttgcgcgagacgcgggcggatacgtcctctagtcgggggtcaagacggagaaagtctcatcgccgtattactatccatgagttgcgggatgggagaagatatacagaagttgggtccacgcctggggaagacagtatgcatgagctgcgagatgggacgctttatgccaatttatgagcggttaaattattgtttattcggttttgaaaataattaaataattgcgtccctgtcaaatgggtaataggaatagcattgccggcagttggttaaatgttgtttctatgatacccactcacaaagtacccgccgattcgcacaagacatgcaatctatctactagtgtctatgatactgactatatatccacgtcttagctacatcttcgacttgtctgcaagaaaatcgatattgatagccgcttgtatcaactggttcgcaatcgccgttggaggcggcaaccttaacgacccctccttataccccggcccagcagcttgatctaggttgctcgtgccaaccctcaaagcctcctctacctcctcgatttcaaaccaccgcgcatcttccagctcaggatcatgctcgaggttgatcttctcatgcgcagggtcactaacttgcgcaattgccccaatcatcaaattagccgggtacggccacggctgggtcgaatggataatgacacgggatagtgtcacaccggcctcttcccatacttcgcgacgcactgcatcctcgacggactcggcgggttcaatgaagcctgcgagcgtggagtaccagttaggcggaaagcgctttgagcggccaaggaggatgcgcttcgcgtcggacgagatgacggccacgatgattgtagggtctgtacgcgggaaggagaggtttgaaatggtggtgcgagtgctgcaggctggtttctcggcgggcttgccctcggcgacgcgcgctgcgtcggtgggtgggcaggcgcgttttgtgcccgagtttacggaaatggtgcggctgccgcaagtgccgcagtagctgttgcgggtgttccagtcaataagcgcccgagcttgagcgtaaatagccgctataccagaattagccgtcattcttcatggttagggtcgagaaacataccctcattagcagagaacgtcatggctactcttgcctgcagaaaactcaatccttgagcctcaaatccattaaccacttccttcgcattgtgttgttgctcctccgatcctttctccgaaacatcaagcgcgaaatacggcgtcccgctgtagatcttccagctgaatccgtcctgctgcttgtcggtctcatccacacccaagaagataaggtgcggctccgtcttgcgcgaatcatgctccttgattatctcttcctccgacttgtcgtagatcgatgctggaagcagcttgcgtacttcatcgtactttgcatagtataattccgtaggagaccttgtgagtggcgctaggtccttgagaataacgaatcgggtcgacgggtgcttgaaagcggcggagaggaaggggtgatctgatcgaaggaatgacagccggttcagaggagagcctacgatagtagtcagtatctagtcaccttaacacgagaattttaacacgagagagatgatgctatcatgctcagacttactcgagaagtagttcacggtctctttgccgaaccgccgagccagcattgagtcagcctggatgtgggcgggattggggatttgtgaattattggacatggcgcgatattgtgccctagtatatacaagaaatgagtttctgggaaaaggggggtattagaaggaaccgtgcagtggttgccaggctgccggccttcctccgatcgatctccattaatcagcgatcggggccgagggaggggtaacgcccactaaccccacacacgtgacttgcgtcattccgcgactcggaggtccaagccgctttcatgattctggttagcgattgttcgtcgacttgggcaataatcggagggcagctgggaactctgctgtgattcaatccctattaattgttggatcgtctttggttcattccctttcgagatgggtcgtctcattacgctggcaacatggttcgtatcgctgatacttcactcgtctcg

SEQ ID NO: 11384 - DNA, 285 bp, Emericella nidulans
tccgagatctcaataccgaacatggggtcatacgcagagtgcagctcccccggcctccagctacaagtcagacactcaccttagttatacctcaagtttaaaacgagatgttcaggtgattagcatggagtggctggcgtaatcgtttgacaaaagggatgcgagtgggtagaagggaagtagttaagtgtcgttggtggatgtttgtgatatcgaatggtttgttgaagaggatgtgaatttctcttagggagatgatatagattagagtggataggaaaggtt

SEQ ID NO: 11385 - DNA, 412 bp, Emericella nidulans
  unsure (1)..(412): unsure at all n locations
attccaatccagtactctaagatcagtatggcgtcagaggccggactctctagtgccacgcctggaactaacgcgcaggggtttatcatgtatcgtaccccgatcacccttaaacgggtcatgccgtgtgctgtctctcagatgtgcctaaccagaatgccagcagatggatgatacctcatccccaaggctgccttcgcactgacttagttcgcacactctcagtgagctaaatgagaacactggcccaagggagtgctaaacacatacctaattttccatacgctaatactcatcatttgaatcatggccgatcctcggtatgaggtgctgctgaagatagcagctgaccgatatcaacaccgatgacatcagcaacgtgactgaccttctgcncgaatacagatataac

SEQ ID NO: 11386 - DNA, 111 bp, Emericella nidulans
ttgaagttgatagcaggagaagtgcaagttggtttgaaaatcgtttgcagacgtagttgtagtgtgcgagtttgtgtattaggataggggcttcgtggtagtgtagaattg

SEQ ID NO: 11387 - DNA, 1535 bp, Emericella nidulans
tagaaacctacgatcttgtccacatacagagcaatgcagaaaaccctgttcggggttagttccgctacagtcacccaacacctacgccaaatgattcaggctcgctttggcgtttccgacatcccagacgcattcttctactatccggaagaacttggagggctcgggctccgtaatccttcgatctcacccttcctggtccgaaattccttacagacttcaccccaacagcacattgacaacttcttctccgaagaaaggaagctctacgacagattgaagaaagcattcgacgagaccccacaaaaagctcgtatgactcacttcgctcaggctaatgacggcatggagcgccgcttcgtttctcgcgccgagcgagatacattcatgtcctttgaggaacttactcgcttccgttggtcgcagagcactatttttcgaacattatatcagcgcctccaggacgtaccaaagcccgaaaacataatccttatctcgaaagtttcgcaagcgctctattcggcattgggaatggttaaggtccggatgatggaccaggagaagaggtgggtattgcagatgtatgcacctgaggtactaagagattatggaggtatggcactagttgataagaaatacttgcccgttggggtcatggctatggttaaggagagaagggttaagtggcagatggtgctctagtttcgacatcgctatgagagctggccgtgattgtggcctatcatccataagagtaaattgatttgaggtattataattcaagataatcaaccgaaatctgacagcacaaccttgggaacgtaaatgcgttataagggaaacctgtaagcttccttaaccatacaatgcgctcagcttgagcccatgatgatagtttatcagcagggactccaacagctctacccacgcaactgatggaatgactatgccacgaacctgactaacttcttacaatagcggtatagaatattgattcgtaccagcctctggatctagtccagaggtacgtaagatacccccaaaacccaagcgagacaggacttcacgaaagccggccaattggccgtatagggcaatacaagtgaggataattcatgattgggagagatacaagcacttctcagcgggaaaatacacagatatcgttctatatcgtgcctccaacgctcagctaattacgggcatctttaacctcactcagactacctaaatccggtagacgagagcctccccgggcgcgacgctacttgcgcacaacctgtcccatccagcttcaataccttcctgcccagcaattccttcaccccagacaagattcagatcaggcgcacgagcctcgcggttctccaaccagctctgccatgcctggtcgacctcacggaaatagtccgcggcaccacgaagcttgatcgcagcctcatagacgtcagaagtattcatctggactttattcagagaggcaaatgaggcctgcgagcttgaatttcaccagagtgtatactatatctgttagt

SEQ ID NO: 11388 - DNA, 163 bp, Emericella nidulans
cacatatagacacacacatagagatacagacagacatacatatatatatacatacacagatacagactaacatagacacatagacacagacatacacacaacacatacagagatatacatagagacacacagagatacagatatagatagacacatagataca

SEQ ID NO: 11389 - DNA, 1368 bp, Emericella nidulans
ccatgaatccgctgaagaggaagtcaatgcaaccaagtaagtggccataggttcaaccatgacggggctagaccagctccgtcttggagtatggcctgtcataaggttttctggctgaaacctggttccactctcatgggaaccagagagcacggtttatggtcgaaacagcggaaggggaaagacattaggcgtcctttggggatacagaaggttattcaccgcgaaggcatgttttagttaatcttcaccttgtcccacaagacaactgaagatccatctgcgaggactgactcccgcgcagtccaaacaaactggccgcgcctgggaagaacttcccatgacataaaccagtagactccagagccgaaaaagactagaagcgcaaccacggagtacagccaaggcggcagagctctgcccgtgtctagcgctgcaggaatgaacggcgtgacgagcaaaaacacttgggacgcaagaaataaatagatgacgggagtccaagctcggaaagtgcgcctgtggggttgtttccgacgaatgatgaaaagtgcgatgacgacaaggacgttgactagggcgatggcgtactggctgacatctaggaggaaattatatacttcccctatcaaaagaatttcagtttcagtacgctgaggccaaggagagataaaaactgaccaaatggaataaatagaatcataactgctgatgacaagaatacaagaagaatcgctgctgaaggcgagccggaggacgtcgtagcggcaaagaaccgagaataggggactatcccctccctagcgaattcccgaactactctcgacattgtaaaagatgctgtcatcaggttcccgaatgacgataaggccgccagggtagctgtcaaccagagcatagtatctccaaatactttaccgatcaggagtgcgacaactgtgactccagtcttgctgatctcgtctggagtagcgacaataaagtaggaaatattggtgagggtatagagtatccctaccaatcccacgcccacgacgccagctatctttagaaccttgcgagggtccttcacctcgtcaagaacgtatgcggcatttgaccagccttggtaggtggccaggattttgaacaaggcattggtgtaacgggatacataagatgaagagcctgtaaagggcgacttcaggctactagccgggtcagggatctgggggagatcgccttgaagagcacgcagaccggcaacaatgatcaaaaacaggataagtatcttgaccgaagcgagcacattctattattgtcaggatgaactctttgcttttgcaggatgacttaccatgatcttcacccccagtgcactgaacctga

SEQ ID NO: 11390 - DNA, 110 bp, Emericella nidulans
tgctccgcgggcttgctatccagccccgctacgtgtgcctaggctcaggggtggatgttgcgatctcattgacagagcgttccccgaccttcactcttccgtatagagtc

SEQ ID NO: 11391 - DNA, 412 bp, Emericella nidulans
atgtactctacacatcattattgagctatatagccgccacttggactcctgggggctcgattgagctgaatagcttgactattaaggctgctgccaaacatatatcgttgactggaggcctgcgtccctcaaacctagctttttgcctgtgcatgcctttgctttatacctgattacactctgactgcattctctgaccccaaggacctatcatctgtagctcactttatgactctgactggctcgcttgaaccatactgattaccaataaccgattgtggattatgtctctatgctatactgtaggacgttagatcctgataaaccttacgatagtattgcactctgctcatacacgacgccggctatagctctctgactcttgctaacgagtgtagctgactgcgcaaca

SEQ ID NO: 11392 - DNA, 1850 bp, Emericella nidulans
gtgtccatctgagttgcggctcgagtcgacgagcagctgcgcttctgaaatcatatctcaccaggcgggtgactagctgctgcaaagagcattcacatccgttgatatttacgctcgcaataacttttcaggctgaaggacaatcataatagcttgaacgtttctgaattgatccgctgagtatcgagaagctgaacggcccgttcagcccttcctagccggtctattcgcgcataataaccatttcatctggagggagtcactactcgcttcgcaggcatatctatatatatgctagcgatccataggatgaagctattcctattcgagcatcgacccaacatgtgccgtatcaactcttgtgctccgacttcggccgtcaactaccgcggatgatggtcccaactccagagcaccagcaattgtaaaaccaagtgctaagaatctatgacagctcatggcagctgaaatctgctgacggcgtcaaacggtttggttattgaggctcttgtgcagagccgatctcggaatgtcggggtctctgttgggctaggccgtctctctgagctgtcgtgctttgaatcgcctggagagtcattggcagctgttgctcccattaaaggtaagcgtggactactagtagacctgcatagtgttcatgcgaagtatgtattcctagctggacagcagattttgcaccctaggcgtagtatctagctggagcggattgaatgcttttggctctgggtcctgatcatgaataatttatcatttcccatcctcgccggctccttctttccagtttctaacctccaactctcatatcctccttttcgagtgccgattcgcgcgccgggattggagccaagatgcccagaaggcttgattggcgtgaatggcagacgaccaaggtcccaagaccttgggtgctggttagcggctcttggaggcgtgttcggagagctaaactgtacgacacgcgggtttgataagaagggtgactcccacccggcctggcgactttcattcttgattctccaaaggtgagagtcggtcagaactgctgctgcccgatgccgtgtctctgcacgtgagcttgcctcctgtttgtctctcacagactggcaatcatttccaaaggggtcagcatccgttctttagccggcagaatttctgtgcttgaacctccaaagtgagtgaagtcatcatgttgttcattattgtccttgtaccaccctgctgcgtcttgatcccagcgaccgataccggagcatcagtgtcatgcgacttgcccgatcgcggctgtcttgggcgggcaaggatcgcgtcttgaccgtcctctgaccgtcttgttggataatgataagcactgactcggtcagttgcacaggaccggggtctcttatcattggcctcgcctctttcgacgatggatggatgatccctgacgccgctgacggctcgaagcgctgtctcgaatttcctccgacggttagacaaggtgtatcacgatgcacgaaccgatccccgatttcgagaaaggaagcgattgactcgccctggccaacaacaaccaccgatcgttctgacttcccatggggtaacgccgttcacagtgggtagggccacttgtcaaactcagaaccccagaatcctgatttcagctccgttggacgtggagaattgggttggggtcaccatccgacctctctacgacgaaattggtgttggagtttgggagaagcttacggggtcacatcgtgtatctagcacgcggggacctagtccggaggacagttatgcgaccttccgtcgcagtgtcgacctcgggatacactgagtgggggcag

SEQ ID NO: 11393 - DNA, 104 bp, Emericella nidulans
gagacttgagtcgacgctgtgtatgagtatcgacgggtgaatcttctgaaacacataaaatcactcggtagcccaattgtagcttgttgcatcgagtgggggaa

SEQ ID NO: 11394 - DNA, 253 bp, Emericella nidulans
  unsure (1)..(253): unsure at all n locations
ttaaacgtcggaggtgaagggaatcacgttcgattagctgagagtcatcagtgtagaatggtaggactggaaagagggaatgcgnagtctcangtgattacacgagngttggaagttggggctgctnctgnggaagagataggtgngctgatagnnagntggttagattggagaaaatggtgttgggattctcaaaacagcaaacgcaaggtgctcaaaatatcttgagtgactgtgggacggattgngaagt

SEQ ID NO: 11395 - DNA, 1727 bp, Emericella nidulans
acacctctactgccatgggcgaggctctacagacatgttatctatgcaacgcccgcgttctcgaatccgtctacgataacaatgtcacggtcggaccgcgaggctctcgttcggctggcgcgcgagttcgatgccctcgtggtcacagatgatgtctacgatttcctgcaatggccgtccgatcccgagaagccgctcgacgggcccgcgaccgccttacaccctcgtctcgtagacgtcgaccggtatctggacggcggcccgaaagacgaatggggcaacgtcgtgagcaacggcagtttcagcaagctcatcggaccggggatccgtacaggatgggcagagggttcaggaaaggtcgcctacggtatctcacaagcgtacggaccgctcccccgattatccaagcaaagctaacagaatgtagaggctgccagcgctccggcggcgccccgtcccagttctcatcgactgcggtcgaccagctcgtctcctccggtttcctccaaaagcacatcgacgaagtcctacgccccgcatacgcatcacgatactaccgcctgatgtccgctatcaaaacccacctttacccccttggtgtaacggtccccttcacgggaccatccgtcgcaggcggctacttcatctgggctgcattgccggggtccttgcgcgcgagtgacctggtcccggtcgcactgcaggatcaccgtgtgagagtcgctgcaggaactctgttccgagtccagggcgaccaggcggaggacaagaacgagtttgggtcatttatccgtctgtgcttcgcgtgggaaccggaggagaagctggcagaaggagtgcgacggttggcgagtgcgatccggcagatgatcgggcaacgaacatgagacgcgatgatacgaaaccgagaacggatggggatgggacttcctctatttagcctcttatgaaggaggctaaaaaaaagtgggcttgggggaataaaaagtaaagatgtactcaaagtagaccacttttggggatttttcggaaaataagcagtgatgattgaagatgatcacctcgatgatcacacgcgcgacgcgagagctcggtaacacatacgtccgacctgacgatcgacacaatggaaaatatttgacggattgcccttgagtatggcagccgtggcacttgcactgtgccttggctgtgttctcggcatgaatttgggtctaatggtctcccatactctgcgcacaaacagctatccaagcgacgcgtcacatacccctttatgaatccacgtatccagcctattcgcccgagcactacgctgtttggcagtcaaatccgttcctcgcgaaatcagccagtggaatgagttcccactggacgatctttagcgctctatccccggctaagagccctagtggtttcatgatagctcaaggaagaaaagactccgtcctggccaggctctgctcgatcggaatcgaggcgggtaacaaagcttggctatggggaataataactataattatcgtcaagtcaaagcaatcgaggattcgagactcgaagtcaaggcccatgcttctttggcgagtaaccgtgtatctcttgagtaacgccagcatacctgacgaggtacaagatagttgccaggcaaacaggaatgtgtacttaaaaccgcacctcgacggactccgcccgtagcttctcataccacgactcgggtcccaaaaggt

SEQ ID NO: 11396 - DNA, 122 bp, Emericella nidulans
cgatttatgcttcgggcttcgcaaacagtcatcatttagcaatttacataaatgtactatggtagctaccacataacagggtgagcttcgacctacgcctgggtaagtactaatctactgtt

SEQ ID NO: 11397 - DNA, 3000 bp, Emericella nidulans
caacatgagcgcgcgtccttgcctccttcatggcggtcgccgaataactccactcctttagtcgctgagagacccccgtcgcctcccgttccgccctcacctccgcgtcagcatcgtgaggatagaagagaggagcgaaaaaggagggagcgtgagcgagagcgagacagagtgccggtccgagaggaggacattgcaattgaagggagcggccgttgggcccggaccgggcggtggtagataggtgccactcgccactgcagaggatctagacctgtgcggagtacattctgtccgaagccgaggttgcatgcttgggcaatggaaatcgctcactctattctcgacatataacccactcttcccttctttgcggcgtggtaatacaaccacgaccatctgacatgctatagtatgtacggagaagttgatgacgaatggagtcagatgcctctattgaatacccaatgggctcatgatgcctagaactacgagaatatagatagaagtagcgaattattgatgtagggtatgttgtctcaccacagaagacgcttatatgagaccagacgaatagtacagctctgtatcttccaaaataagaagtacgtaaacttacacccgtaccccatagatgctgtccaccactgcgtgctgaagttttttgaagggctgtttgcaaatgccgggacattcctcatctgcccttcaggctcagctgagccactactagtctgagtatgtacaggagagtccgcacgccgctcctaaaccaaccattgccaatattacactgttaagcactgaagactcaacaataacataggtctcactctctggtccagaccaagctcctgtgtacccgtaccaaggttcatagggagcctagactggagtgcactgtccagctactcttgggtaggtccagatgcagactgaaccagccacaaacaaaacagggcctatatagacagtcaacacggaatattcgagatttgagacccaggtaatatgtttacagcggtatctgaagcggctgggattgagtgggactcacatactagtcgcggatccgggcggccgagtgaattccgtctacttggaagacagctgtcagtgtcactaatactatgcacgagttaacgactgtcagctggaatttgaactagtgtatggagtataggattccgtaatacgagagaattgaggcgctggcagcctcgttaacctcgccagtaccattcctgagtattctaagcgtatccagacttcctgtctttgtagctacttgtataggcactgaatcgagcaccttaattcagaaacaggaccaagtcaggtgaggtctagacggccgcgataatcgccaccttggtgctcaaggctcgccccgactcctgcatagaaatcattcttggttgtggatccagctggattcgtcatccgcgcgtgtgggccttggaggcgggctggactacggcactttgacaggtcaaccatctggaactcgcagcttcatagttcatacggtatctcgtatatttgattttgtctttaggctggtggggtatattcagagcaatccgataacttgggcccaatcgtccattgcagagtatcgcggcaagtactccagagtcgtaagttagtagtctctcggagactgccgggtttaccgagtagttcgactggcataccaccagagttggggtggaatgcgagagcattgacctcacgacgggatacctccgtatgtactacctgtaaagaaagtatctgtaaagaaaaaaatgacttaggagtcgcaaaaggcgtgcatccagtaatgcaggtacatatatagactagaatgtattctgtacgtctggataagtaactgtacggagtactgaatacagtaggaaagccaagggtggatctaagaagaccagaaaggattggaagccagtagataaatacgagctgactcgtgggttgaacaacgctctgaagccgttcgacaataaagtttggttctcatattacgaagggggttttaccagccacaaaatgcagctgtagtcactcactcaataccgggtctttatgtccagtatggagcacccactggttggaaccattgaccctcgaaagtgcgtgctgtactccacgctcggggaagccgcgatgtcgaccagacggcacatcgcaaccataattccaagacagaagttctgaacgctgatcgatcaaggcggggtttcggttatcagcacactaaggacggctcatggagggacgccatcggatgacttgacttgtttaatgcgattggttggctcacagtcaacgatatcattccagagttgtgatagctttatgcacgagcatactgtttggggtaattcctgtgaacatgcttcggttggtacccccgcatcgcgctaacgaagtactggatagagctatgcgagcggtaactggaatatcacgacgaaagcatcagaatgatgaacgatgacgccaagcaagcacatgaggtaagaaccgagagttcgccggctgcccctgaatctcgatagtccaggctcgatgacgtttagaagacagggttcgatcaataatcgggcggactgccaggatgctgccctgttcggggcgtttgctctaagtttcggaaggacgaagttcagtcagcccaggatcaaaaaattcaattaagggacaaagaatggtgagaatggtagtgccaggtgtattaccccctcggttgatcgccaactagggacgacgggatcggctggatggaatcaacgaatccacgaagatctggagatggttcaaatcgttgaatcgattgaatcgatgggtcgaacagtgaaggttgatgaggaatgatagacagcgcacgatgtgaattgttttgtgttttgttttgctttttttgttttttcccggtgtacttcatggataaaaggattcagcgaaccactgtcaagccatggtaacgtgctgggagtc

SEQ ID NO: 11398 - DNA, 2097 bp, Emericella nidulans
tatacagacaatcgtaaccaagcagagccagctccgcttccagctagaattccaactgttcatcatgcaccaactgcacatcaaacctctcctgacccttccacaccttacccggatcattgcacgaggcaacggcgctgcgtagatcacggatcatgccgagggggccgctagcaaagacgcgcgttgggccggataccgtgcgtgagacaaagtccgtcacctgcgcagcgagatcggggtggtttttgtccccgctggctaaggaggcggccgacgaaggggcgtggatggtgaacgtggaagttggggttgggtcctggtgttcatgaggcgagactgatggcgtcgagggggaagacggtgtctggcagttaacggcggcgtctgcctccttggagaaagggtctcccaatgctgcgaccggttcggtggaatcgtgagcccctctggtgacgaagatgcgaatgcggaaagttcgcactgcagcagcagccttcttcagcgtctccagctccggctggatccagtctaggtcgtccttacgacggacgacccagacgaattcaaggaggccccggcgctgtgcctgctgcgccagcctgagcaggagagaaaggacaaaggtcacgccggttccgcctgcaacacagaagacgttgatttcgtcgtcacggtaaaagtcctcgtccacaatcgactggccgtacggtccgttcaagaccaccgaggttgcttgagctgtctgcgccagctgggcgagccgcttggtaatcccgctccgggcgcggatgatataggtatgaatctggccccgcgggttcgtcccgggcacactggcgggcgtcatcggatgactctgccagacgctcagagcgggaaagcagagaaagaaatgctgaccgatctgccactcgtcgtggttgtgctcgagctcgaggcggacgatgtcgccgtcgcgcgcgcgctggaagaccgtcatgcgcgcattgggaacgtgcatgccgaacccgtggctggtgtttggcgtgttgaagtggtgcatcgtgaatgtgcgcgctagcctgataccgcggtcgaggaaccagacgaccagcgaggcgatcatccagcagtagagctgcgcccagtggccccagcacgcgcctatgtagaccatcgccagaacatagtgcagtttgcggaagacttcgtacccggtcagccggatcccccacggggtgctaagggcgaccatgactgagagcaagatcatcgccacaatgccccagataatgtacgtctgcgcaacccaggtgttccacgccgacggctgcggctggtagagcttgccctcgatgatcgtccagccgatcgtgtggagcgtcgactggatgtagatgatatagccgagccagcggtgtaagaacataaaatggtggtaggggatcccagtgatgagcgagagcagggactctcggctggagagcatgacggcgagcggcgtgagcgcgaaggcgagcacgccgatgcggtccgaccagggcccgagcccggtgcgggtgttatacacgccgggcatgcccttgacggggctcatccatgtcttgtaggtgatgccgacaaaagtgaagaccgtcaggtagccaatcaggatggcgaggataaggagctgcagccgcgtcgtgtggccaaacacgaaggcgcaaccgctctctgggagcaggtaccgccgcgtcatgctcttgatggcggtaccaaaccggtaaggagcgttctggcgcggccgcgagtcttcaagaagcgctttatcattctggcaggactgtgagtctgcgaaatgcgttctgtcgacaggggcagaggcccgcgtcagagggaacagggttcgtccaaggacgaagaggaagagcaggccgcagatgacggcccagaggatgaaagtatagagcatgcccaggtcatgctcgtggtaacgcgcgagatactcacaagcgccgcatcgttgagcaggggactggcgggccgcgtaacccagtggtactcgagctcagagtcctgcgagaagtcctggatatggcgtttgacggcgtcgaggttggacatggtcgctggcgg

SEQ ID NO: 11399 - DNA, 392 bp, Emericella nidulans
gatactcatggactaaatgccaacccgctcgggacgtgggaagggtcttacatgcgctgcgtggggcgctttgcggagggctcttgtacaccagagactaattccgtactcatactcaagggcctttgtaccaaccactcgagtacgtccacatgacagattcccctgactgccctgtcatcagtattaataggcccaccctggacgacggtataaataccacacctgcttatgggtcctaagccttacgacactcttaccgcgcattattcttcttctctctttacacgcacatgctaagcgatggtggtactgattgccgacgcgagtcactcagctcacgatgccggtcatatatagcactggagccattctgacggacatctggtgtg

SEQ ID NO: 11400 - DNA, 1195 bp, Emericella nidulans
aagtgtccattaacagtgctcggagtactgaagttgtagatattggtgacatattcatcggctgtgaaatgacgccccccctctgcgggctcaaggtagatctcaatgttgaacggacggccaccaaaggcgaacctataatgcgctaatcagcaaacaggttctgtggtgtaagggaatcggacatactttgagaaccgaatactgatagcaaagtcattcccggcgatgcctccatcgacctcgcgcattccctcaggaagaggctttccaacaccgttcttggacagctccagctgcgttaaagcttcaagacgcgatattccatatttcaaggtaacagtctggaagagcttagttttatatgcggcacgatcgaacggaatccctccagacccaggtgtcacgggatgcaggtcgggataggtataacctagcgccctgaagtcgcgcacttctctggaagtccagtagttcccttcttcatctttgtgaaaaggccttaagggcgtctccggcgaaatggtgtctggcaacccaatcacctcctggaagaagtctccccgggagccctccgtaaagaacttgtccgggttgagatcctgccagatggcgaacagccgatcgatattgctgttaaacagttcagcagtgctccaggttaccagacgactggaaagaaataccaatgatgcaaccaaaaaatcgggtcaaatgtcgcaaccgggatctgcgacatatgtcctccctcaccaccagcccaccagtggatattgttatggataaactcaatattcacatccgccgaaaccttcggctcactcgtgaagatggcagtggttgaaaactgctcgtactcaagcgggtatgtaaggagacgatagacaacgtccgccgcagcgccatagtccttcccatcaacagagctatgcatcgtcatgtacttgatcacttcatcgttattcacaacacctttgatccaagcctcgctatcaggcttgttctgctcgtcctttgggcaccgactcgttgctttgcatttgccatactgccatggtcgccattcattagccccgtggccgtcaggattttagagctggtcttacggagtagataatatcctctcccatagcttgcacatctcccacaccgtgatgctccatggccttccgtccggcatacggaactggtatag

SEQ ID NO: 11401 - DNA, 127 bp, Emericella nidulans
  unsure (1)..(127): unsure at all n locations
ctttacaccaaaataggtttgtatgaccctctcgcatcacggatttgccacagtaattgctgcatgcgagatcaccaattgactacaggcgctcgatccaagatcgaacggtcggcgagntctagtt

SEQ ID NO: 11402 - DNA, 1738 bp, Emericella nidulans
agtcaagacgcgaattgactgtcgcggccccagtcgtcccagattgctggtccttatttgagagtcactaatactgcttgtgagctcgtgacttccatttccggttagcgtccaaccgagtctcagacgtcaccgaccatttcctccactcgatcggctctctgctgaactggattctccggggaaagatctcctaggtcatcaactttattgcattctcctctcgtcgagctaccgattgcggttctccggccgttccgccgtttccgtgtgacctccttataccacaccacgtcactcgtacgcaaagcggcctgaggaactcattccgtccaatccggctcaattagtagaatcttcttctccttctcgtcgcccacaatctctgttctttgccgatctcgtacgcagaatatcggctggtctcttcacaatgcatcgtacatactctatgcgccagtcgcggctgccgaccgcctcgcagatcgagaaccccccaccaccactctcctcgaccaagacgaacaggtggatggggaaaggtggtcttggtgagtagcccctctggtatctactacaaagtatgcaggctgatcgttgttagggcatgccttccgcaaaaatgctgccggtgcttttggacctgaccttgcgcgcaagctctcccagctggtaaagatggaaaagaacgtcatgcgcagcatggaattggtctctcgggagcgtatggagactgcggtatgtacttctctacgactcgcacaacggtcatgctgacccgactagcaacaactgtccatctggggtgagaactgtgacgaagacgtgtctgatatcacggataaactgggtgtcttgctctatgaagtgggagagctggaggacatgtacgtcgaccgctatgaccagtaccgtgtcaccatcaagagtatccgcaatattgaggcgtccgtccagccaagccgtgaccgtatgtagctaccgcctcgtatcgtggcttacgctgacatgtcctaggccagcagaagatcaccgatgagattgccaagttgcagtacaaggaccccaactccccacgcattgtcgttctcgagcaagaactcgtccgcgccgaggccgagtctctggtcgctgaagcccaactttcgaacattacccgtgagaagctcaaggctgcattccagtaccaattcgatgctcttcgagaacattgcgagaaggtcgccatcatcgccgggtatgggaaacaccttctcgacctcatcgatgacactccggtcactcctggtgagactcgccaggcgtatgacggatacgacgctagcaaggccatcattcaggactgcgaagacgccttggcaaactgggtctcgtccaaggctgccgtcaaatccagcttgtcccagcgttcacgtactctctctcagcgccgacaggataacatcaataagggccgtgaaaatggggtggacctgtcgtcccaggaccagcccttgaggggtgaccgggattcatgggttgccgcagagcagcaccctagctaccaccatgacgatgatgaagaggctgccagtgatggagacatccgcggccgcgaagaagaacgggagcctgtccctgtctaatcgagcactcactgaatgagcagggcgcaagaataccggcaaaacgatacattggttaatcactttgatgctcttggactccataattattgtacgaatgactgttttcccgc

SEQ ID NO: 11403 - DNA, 109 bp, Emericella nidulans
aagtattggtcggttgggtacaagtagttaccgaagcgtagttgcagtgaaggatgcaatggggaggaagcgtacacggggagttacgcctatagtaaacacagttaat

SEQ ID NO: 11404 - DNA, 446 bp, Emericella nidulans
aaccctaagttattacctcggagagccgggcgccttcgatcacgggggacacttcacgcgaacctcgcattcctacaagattaggcacgaatgcctagatcttgtgataaacggcatggcccgcgctggcgggatacgagccacgcgccatgaaaccctcctcctcgagccacctagataactcttagagctaccctcgaagaccgcactgatgaagactggaactaggacgccgctgcggaaccgctcgaggaacacgcacttacgtgggtcagaacaccccatctgggcgaaccgagcaccgagagccgactgtagcacatgtgctgactgccggacaaaatcaagcgtgctgctagaattcagcacatcctaaaagctatctggcagaagccgccgagtacctacaagccctggacgctgcccctatttcccatttgatcgta

SEQ ID NO: 11405 - DNA, 129 bp, Emericella nidulans
caagttggagaccacgcaggcccgcgaccccacgcgatcgtagccaatctccatgtgtaccataccttaccgcagccaccaaagtaacgactcgggagagctttacgttcgaggtgaaacggcccatat

SEQ ID NO: 11406 - DNA, 1105 bp, Emericella nidulans
catggggtggggagttggcacttggaacgatttgggaggggcttggaacaggagcgggagcggcattttcagcgacagacagcacgcaggtgatggagataccacctgctactggtctttagaagcagacattaccatgatctgctattatattaccgatcttctaaataataggtgggttttggggcatcactggaagagatcatgggttgatatcggcacttgggctctacggcaaggttaggtgcagtacttataattcatctgggtatagttctcttttgtacacatgcatcaggcagcgatgatgaataactccatgcgatcttgttccatacccctctctgcctctccactcttcttttgcagagttcggattcagagttcggattaaacaggaagacgccggaagttagaacaatctggaagagagatagcctggaggccgcaatgaccattacctgctaggcaacggacggctgcttacttttcctggaagctggcgaacggaggccctggagttaagctggctggtcatctacaataatcatcatctgccgctggtgattggaggtgcagctgcatctgtgactcagatgggggtagcctgagactctgattgtgaactcatgagagtccatgaagcaatactcccagcccaactacgtaactgaccctgagcgagcggctgtgacatcttctgagttcctgccggctatgctcggactgggtggcattgattaaatgatttaaatgattgactcttatggttgactcttgaggctgttcgccactggtctttgctgcaggccgttcccagtctggacgctcgaaaagtggtgtcatgactcctcatagtgcaggcaggtctggatcaggcacttatgatgctaaagatgatgaaggtgatgataatgatgatgttgcctgctgaagatgttgccactattcagtcactcttcagccttcagaccgattattaatgccccgacatatcctgactctttttggattagcccgagacccagcactgcccagcactgttcacattcacagtgcacgtaacgatccgctgtcccaggagtccatgacggcccgttcttct

SEQ ID NO: 11407 - DNA, 113 bp, Emericella nidulans
aggatgattctgtgacggaacgtttgggtgttcaggggacgcgttcgacgtcggtgtgtggtttctcgcacactgctgcgggtgatattctggtggacatatagcattatata

SEQ ID NO: 11408 - DNA, 544 bp, Emericella nidulans
  unsure (1)..(544): unsure at all n locations
cagtactctaaacatctggtcatctgatgggcctgattcatgggacttcatgatacctacgtgctgacctcctacaatgtatgaccgtctctgctatagagcaaaaagattgcctcgacatacaaaagcacgcgcttgatatcatggtctgactcttgacctaaccttcgggtagatcctcacgactgtcctaccaacattggacatctttaccttaactgaggccgcttactattcccacaagccctactacgaattaggctctgatgacatcgctatagccgctatcgatgggacgaaaacatgtcataatctttcgcaagaccgctcctctatatcctacttaggacccttcctgacctcttcatacngaagtgatgtctgagactatcgatacgctttgcatttacacgatgttccgcgcatatgaaccttgtgacttattcgcgtacatagggctggacagtgttcatgacagcgacgggatgatgcataataaagggctgacttgctggatgacgatgctggccactgccctaactcc

SEQ ID NO: 11409 - DNA, 796 bp, Emericella nidulans
gcgtccgtagcgcaacttgtttgtataacttatttacgcaatgcagccttttctttggcaagactaaagtcatggccgtcgcccttggccataaccccgagacggaagctgctgaaaacctccacctcctcactccctatcttaccggcgccgtcggtctcctcttcacctcaagagaccccgcctctgtcaccgactactttgacgctttccgccccctggactttgctcgcgccggaacagaagctacccgttctttctccatacctgcaggccttgtttactcacgtgccggcgagatccctacctcagaagacgaacccgtcagccatacgattgagccggagctgcgcaagctgggcgtacccactcgtcttgttaaggggaaggtaatgcttgagttgacagatggacaagaggggtatcctgtttgcaagaaaggggagattctggattcgaggcagacaactttgctgaagatgtttggtgtgcagacgtcggagttcagagtcggactgaaggctcactgggctagggcaaccgggaaagttgaaatcttggagaagaatgagaatgagatggaggtggaataaatcatttggggtcgtcaaaagtggtttcgttttctcctttttcacggaatccccttgggcatctcatggagttaggataggcgtttttctgttcttcctattgtctttcccccgctgtcgctgtcttgaatccgaagtccgcaacgtacttcatgagcgtatgacagatatatagaataccaacaaaagcatctagtttgtta

SEQ ID NO: 11410 - DNA, 1738 bp, Emericella nidulans
ctatgcgtcagaaaaagtcagatctaccttttattgaaaaactaagggttcgaccatcaagacaacaacagaacacataatgtacgaatccacgcaagctcaattggggacaactctatctaagcaaaaattaaacgctaaccgtttcaaagtgaccgcagacccgcaaccaaacgcctgtagcatggtccatagcaaaacaaccaatgagccaaatcaagaccctatttccgggtcgcatataaaataaccaaccatgccttgtgaaataaggagcaaacaaaataaaattggagtccttaatgcagtgatctgatgaaaagaggagaagcaggggtatgagaccgtatgctggatacaatgaagcatggagtcgactaaccagttagtcggagaggaaaagaacaccaagtgaacgggacattgcgcgggctatcggagcagccctgcgatgtgacatctcatcatttaagatactcttgaaaatgacttgggttgaataaaccaaccctttcataagcagtccaaagcttgcttgctttattcacatcaatcttgcaggcctgttgagcgtctgtcttgcggaattctttgccaaccctcaaagctttgacgcgagcctcaaagatgcgccgcttgctgcagagataggtagcacaagagagcctcagagtggcagccaggtttaactcagctgggctcaagaggtgccggtcggggtcattacttaggtccagcatctgacctttccaatctgccttcaatgcttttgcattgccaccgagggtctctaaagagggcgaatagtctttgatggagctaaaatctgtgtcatccctgctcgtgccgatggcacgagaaggcttggagttcggcgtgtgtacgtcaaacgaatccaaaaccttttgtttcggggtggactttggtgtgcgctttactctgggcgtccgctgcacacgggattgagcaggaaccaccctttttgttggcgctggcgcgattcttttcaatctgccatttgaaacttctgggcgatgccggttcatcatgattaattgacgctcaagggtacgtctctcctctttggcccacgccgccggattccgattgtactgagctgatacaatcggaacacaagaaagggccagaaaatactcatcgcgcgttggtttattgagtttattgtcgaacatagccatatgagaatcaatgtgctgttccatcaccgcttcgggagacggcggcagcaggggggcaattagcggctcataactggcaatttcgggaacgggctcatgcgttgagaagagaagaggatctcgtgatgagaccaatacatccccatcgggctgctcagggtcggtcgacttgcttttcttattgttcccaacgtacggagtcactggcggcgacggtagttccatttctaactgtgttcgtttccggttaactgaaatgggtgcaagcttcatttcctgagaatgtgattgatcctgcggtaacttgtgaggaggaaatgtggagttaaatggatcgaacggcttatactctgggggggacatgaggctggacaccgaaggtagacgggccatgttgggcttatgactcgatgccagcaatgaggctgtagggaaagacgtcatcttaagggtgcggtaccagaacttatgtatgtgcgccttgagtcaggagagacggtgcgatgtgatccacagatatcgctgcgaccgctgatttt

SEQ ID NO: 11411 - DNA, 395 bp, Emericella nidulans
ctgtgccctaagctgctgaggccgtcatatcgacgactgcaatcgatcggactcataggacttttgtgctaccgctagaccctgaaaacgtaaaacctccggcttaagacatgcatgtggtggcgatacacgatccgaactgccgcttatgacatcacgtagcccacccagactgatgcatacggtagggatgctactgaccaggagcgttacatgccaccatatcgtcagacggttattgatcttacacgtttagggcgccctattcgtaatagacggactctcctgcattcgtccatttgccacattgggcaggccttttgccttattgtggccgggatcctgcctttcgtgaaaaacatccgtaggatctccctcaggggctttgcagcaac

SEQ ID NO: 11412 - DNA, 2066 bp, Emericella nidulans
tttctcgaaacaaaccggctcttccaaggaagcacggcaaattgaacgtacgatcataggcagagtcctggccagaagcaaccaaatcattctccacttcagcgcgcaggatctccagggtcagatggccgttctgactctgctggtggctgtgcatcgaccccacaccattctctgcagaggatgacatgtcgagacttccagcgtcagtgtcttgagggcctactttcttctctggatctgggctcgtcttcgaattcgcgggcgcactggaaagaggcacaaccacgccggggtattcgtgcttatcgtttttcgagaacgggttgattccgaacggcatagtgatgggttttgctgctatggacagatgtgcggggcggtcaatccgggtcgattcgtatctactgatggctcgctggtcgcacaggcaaatctataccatcggaatattcgaacaccagtcgatcgcagtcgatcgcagtcagtcgcggtcgagtcgctcagggtcaataatggaataggaatagcagaaagaaatgccgggactgttgtcgctagggccaaatggcgggcgcaatggcactgggcgaagggcgaagagtgaagggcgtaaaaatcaaggcaataagacaggcgtcgtgctgctacggtacagctggaaagctaccacttgtcgaatggagctatcaccttgtcgaatggcaaaattcgaaatggcaaattcggaatgacaacagtagtgaatagtatatagatgaaatggcggcgaactgagaactagacgtccagttgacctaatatgacacgaagatatcagagccgtgggtcctggagcgggggattcgagtttcttcccctgcagaatcgaatacaggaaagaagtgtctcttggggctcttttgggcagggatggccacagtgaaagaggtgaagaggtgggatgcggacagaaagaggaggaacgagaagagaggtcatgagccgtgagaactccgtatttaagaacccaaatcgagcgtgggggagggcagggggaaaaaaaaaaaaaaaagtgagagagtaagtaagagtgagagaaagagctcgctgtcgtccattcacagtcgtcagtcgtcgaagtgatgggtctgttgaatgggcccagtggcaacccaccttccaagtacgtagattcgctaccaccttatacgagcgcgaggagcgagtccccagatactagaggatcgagcatagtccatatgcatctgacgggatctggcgagccggtgagcattctacgtgccgtatcgcctactcttgatagcacctgtcatactacttagcgtacattgagaaagtacctactccgtatactcacaagcacggatggggcgtcggcgttgtccgcctccggacgccatgcgggtcatccctcagacccaatatctagcgcaactacagaagttgggcttcagatgcgaatccagagggcaaagcacgcaaccaagcgcccaagcattgaggtcatcggcagccctgacccaagaccccgccagtcgaaccaaggcgctaagcgattaagaatcagccaccgaaagtatggagctctactcagggtacactgaccggtaccggcctgtagatgcctaatccataaggccaaaagtgcctgcattagtctcggagtccacgtgccggccgccactacgtcatggactattcccaatgcatcttagacctcttgagccgcccaagtctcggaaattacgatcgtgaactttactctttatcaccgcatttatcaccagtctcgaaacaggatttgaacaagggaatcgaatcctgatactgttatcttttcttcttcttttctttttttttatttttttcttttttgaaaagaatgttgaaaaggaaggagcgatagactcagaccccgagtagttagatgacagtcctgacataacagcggacccttgacgcccttacagcgtccgtcccgagcgctgctgtctcgtggaggataccgtaaataacgtcgacttccaagttttcttacaggaactgctcgtatcgataaatct

SEQ ID NO: 11413 - DNA, 2033 bp, Emericella nidulans
ttactctgttgctgatgaatcgtagagtgcaatactaatgaattcgtgtacacagcgcaacatcgcttcccaaggtggtcacgcctccagtggtagcttccagcctggcgatgagcgtgcccgtgaggcaggacgcaagggcggcaaggctactggtcaccacgagcctgaggaataagggtgttcgttatgcatccagaaatgtgatacgatctgacgattgggccatgcacttccactcatgtactatatgatgctttaatgcatgaataacttgcttcttactgtattagtaccatagttatgcatccaatgcagaacacaagcaatggatgttgaacgaatgacttcatataacaaacttaacaaacttaaaacgattgtgcgtgtggcatgctaaaaagggccaaaagtttcccaaaccccgtgggatacgtactttgtatatatgttgctagccaccacctacctgtgcaaaacccccgcagcatggtcattaatcaaggcaataccctctgcccgatacgtgtcatcctccgtatagctggtgacatttgcgtcaaagacaaaatcccgcggctccagcacatcatacctcggccaatccgggatattcgtgtctcgccctgtatagttattcaaatccagatcatgaataaagctcgcccatgtcgagctcatcaagtccgcgagatcgatatagttctgtcccttgccctcgaagggtttgatatctggtctgtagcctacgccctcgagattgttgaacatgaacccgatctccttataatggcccacgccaacttcgggaggaacacccgcgggaatagcgttgaatctgtacgcatacgcggggatgccatgcgcagcccatgtcttggcggtttgtcgcctcgatgcgataaagtagtagtcgccccagaaggaggcgctgcgccggaactgtgccccgtaaggagccactggtcgctggtctcctaggctggcaatgacattgaccgacaagtcatccgggtaggcttttaggatggcgtcttgaaatgaaacagggaggaagctggaaagagtcgctttgaaatcttcggttgtattgattcctgtggggctcatagaggcaccctcgtcgctgttggtgcccgtgatgatgggtactctgacaaattggccatcgaggagctgtttgctgccgtaggtgcgaataaagtcgccgtcaattgtaggtgcgaaggatccgttgatcgagtcatatgtagcgttcagcgtcaggaaagagacctcgcggagacattggatcctgtcccaggcctcggcgcatccaacctgggatacgatcgcctcgaaggaggcttgcgagcgctgcgttccattttcggctccgtagaatatgggattaccagactgtagtattgcggcgcggaagagcttgtcgtcgcgacctccataggcagtgagctttgcgcgttagccgagcacggcattatcccaaacaatgacttacatggaagccgactgaggcggcgccagcggactcgccgaagattgtcaccttcccagggtctccgccgaaggtagcaatgttctcctgcacccagtacagagcaaggcgctggtcccttagacctaggttcgtgattccttcccctacaacttcatttgagtggaggaatccccagaggttaagccggtagttgattgaaacgccaattattggcttgccgatcttgacggactgcttgacgataaatgagaggttatagcgctgatcgccgccgccgccgttgctgaaccctccgccatggatccaaaagccgacggggagtttctcctggtcgtagccagcgggccgcactatgttgagatataggcagtcttcggactggttgtagaatgtttgatcaagctggaaaggttagcatgaaacgcacgttgttcttgaggacttacgccgtatccaacgcagaggagggaatagtcttttgcttctctcgtgccctcccaagtcgcattcaaggattgtggtagcctaaaccgaa

SEQ ID NO: 11414 - DNA, 187 bp, Emericella nidulans
  unsure (1)..(187): unsure at all n locations
aatggcgattattagtctgagaacggaaccgacgtcgacagcattgccaactactgctacacggcatcgntaccctcgacggcagaataatgcgttgtacagcgttctacacaatgagtgttgcactacatgtgttnattagtagtttntcctttcgcgcgagcgntacgtactctcgaatgtctag

SEQ ID NO: 11415 - DNA, 132 bp, Emericella nidulans
  unsure (1)..(132): unsure at all n locations
gcaagagatttgttctagacagnatagttgcacaagtggcagtagatacagtttccatagacatcgcgtcncaggaaagttgaccgaaatatcactaaagggtccttccgtccacctggccaaaggctaatt

SEQ ID NO: 11416 - DNA, 1846 bp, Emericella nidulans
aagagtcttcgagtactagctcagaggcggaacagtccgatagctctgataacgaaagcgccgcgtctttagacgaaaaggccactggccagaatggagagtcaggtcaaaagtgaacattctcctcgtgcaaattcattcgcttagcagtgttaacatgtcttcagagtctcaaaaccaaaggctttcggcgcaccgcggcaatacaaaccacctttcggcttcaaatctgccaaaaaccagccttcctcatccactacaacctccaccttgtcgaacctagccggaaaacaagtattccacattactgcacctgcattccttccactttcgaaggtcaaggaagtctcgttagcaggagctttgaaaggcgaaccgatcttaaagcacggaggcgtcaactatggaatccccgcggatagtcttacacacgcccaggcaggcgccggcggacagtcactattcctctatgacgccaagtcccagtcctactacaccacagtgacgagtatccctacctaccgcatccaggaaatggtcgaacttccaggcggcgcggaactggaggaagccaccgtcagatctgcaaaggccatggagaagccgccgagaaagcaacccaagcatttaaagatgcgcttccggcctgtcgggagcggtgacgcgccaccagagacgctgggttcgagctctgaggagtcagagggggaggagcatacagtgaaagtgccccaggggcttgaaaaggagaaggagaggaagagaaagcatcaacaaacagagggtgatgggagccaggccgccggcttaccgcggaagaagtcgaagaagcattctaatgatgtcgaggccggggaagaaaagtccaaaaagagcaaggatcgggatggtaagaagcgaaagaaggaaaaggcttgattgaaggttggtggaagtccaaaaagcttagcgatagattgttcttaagtatctcatgcatcatgccatgtaataaagaagtgcataacagtgccttgtacatgccatggcctctatactcaagcacctaagcgcaccctctcctgaagtcttcaccttacagatacgcactgtcagcgactgctggattctgtctgacctataaaacatatatcagtcatggacaagggccaccaccgtagcttccaaatcaggccaaaaccaacggctactgagacatgcaataccatgctcagaggtcaaggtttatctgcttaacctggtagacacgaaactgcccgtgctccttggcttggcccgctcgtctaactgtagtccagccagcaccgtcacgatatttgctttatccgcaacaccggctgcgtctgtaagcttgctgtatagtaccacaagcgctctgcactatgaggcgaagactgactctggcgtgtgcgctggcgatgagtgggccttgatatcaggcgccagacgtcagggccaaaatcgattgagggagtgttgcctggagacccgtggactgcaaatcgcctaacttaaatcagttagtggccccatggatctgcgatcactgcctcggggttacaagtgtcccgacatccagagcaacttgggcacccagaataccgtacctcctcatgacctctttcatgtatcttacggatagggtcatccatgctgcccacgttctctacgtgactcaaataacccatgacagagcatgaggaaaagttgctgattggagattcatttacccatcacatgcggcggtgctgattggccggatgctattgggccagctgatagcggctgtactggcaagtgacgccagccgactactctacatcctttgcctagattcacttgcatc

SEQ ID NO: 11417 - DNA, 2488 bp, Emericella nidulans
caacaaagtatgacttgatatactgaccaaagatcgaggccaagtgctcaatcgagtcagttagacacactgcaacaattttcgcattgcctgattgtaaacgccttccgattacattgatctcggctgtgatttggtccaacgaatgttccacagcttgttttccgagcactgtaaagatcttgccctgcttgcccgaaacagcaccattttcatcaacttttccacgcacagcagtcttccatacatcacgcaagtctccatttcggccacttgtccactttggcgccccaggatctttcacattcaggccagacctgagcgggaatccatgcggtgtttcaaggctcctatgagcagcagactcgccaggctgtcgtactggaaaggcagtcgattggcgggcgagcagaaaaggatggatttccggttctttggatgtgacgaacgagaaggcggcaaaagcgacaatagcgccagcaatcaaggtagtgtagaagttccagtcagctactacgttgctgagcaagctgtccagcttctgaagtagcgacaattctgatgccattttggatggattaaccccacaactgtcacttcaaagaggaagcatcagtttattatttcacacacaacagtctaattgacacgatatagctgaggtgtttggatgacgagctggaatggttgagcaactgtcatgtggggttactagcgcttaaggtgtccagcatatctcctgattaggtaaggtcgcgggtatggcgcttgtccttgggtagccaatgttgaacttcccggccaccaacactacccagccagcttgtggccaaagaggaacgccatgataagatctagttttcaaagtataaatggagcgataattcgagcaattctttgcaagtcagtcaggtaagtgcttttctgttccttctcacacatttattccaggtaagtcccaatcccgactgccttcggcgcatgctcacatccagcagctttgttttgtaaccttcaatggcatcgcttttccttccttcgacccctaaacctgcggctacccctgctcctgcctctgagcaatcacagacgcctgggaaatggcgccatccgcagttggatgagatcgtgcggcgacagcaggcgagtacttttggggatcagaatgtgaggaggcttgtatggaatggctctgctttgttggcaacttggacttttgggaatactttcaaatcctagtaggtgattcagagggatggcttcgccgtttgttggactgactgggctgccgcagcgcccattggatccagaagacaaccgagattcccacatattccgacatgtcgctacttatgattcagttgcttttcgtgttcaacatattggttgcattgtatcctctcatccgaccgaaagacgagatgccggacatccccctcactcctacacagcgagctcttctcgggctcaatccctcagcgacctcctccccggctcccgcgacgtcctatgtgacccctcccaaataccgagtatctgggtcaagggcaggtagtccggctagccactctgggtcgccgttatccaccagtgcgagcgcctcgagtcttcggttttcatctagcacccccttctccccgtcgcccagcccattacttcataaaatggtttcaaataatggcagggaaaacgtacgcaggccaagtttcggatcatcttcgcccctgcggacgtcacctttcaaagagtcgattgccttgccagccacgccttcgccagctgggggaaagcgggggagcttaggggtcagcaataagtggttgtatgagcggagcagacggccgtcaatcagcagtggcagctattaaagttggcggcccttgtctggctgcgtttcattcacaaacgatgggttctagttattgagatgcattttctaaaggaggtgttcggtttagtttcgattatcagtgcgcggcgcacccagcattgctatattgatttgtgtatcgattctgtactttatagaggaattaaattacaaatatttgttcaatgaaagagagaaatcatcgtaaattttgcatgttaacggtgctagtggcgatactgtagttcttttgctagtggggacgagccccggaatacaaggtacagtgggcatctccagctttcaaggtcgagttcccgcattcgtcccagaaagccagcatcgcaactacactttctctggcgcggcatcaagctttgcgagtttatactcgtgccgcttttctcaaggcacttcgcttccgaatactcagggtttaacaatttatttcccgcatgaaggcaaagggcctttgatcgtcatcggtggatcaagatgggagcctcagagtcgaagttggtcttcaaacagggcatctttcgcctatcggaggagaaggaaattcctccagatgatccgtactgggcgagagtaaatatttcatctcaccaaatgact

SEQ ID NO: 11418 - DNA, 3422 bp, Emericella nidulans
ccggctccctcggtagattagtggttggtaagctgaaactgggactgacgaaactttttaggccgggctcacctacatctcataaaaaggtatcccgcattcgcggaagaagcgtgcggcaatttcgtagtgatcagccatgagctcgcgctttctcgccatgaagctcttcaaccattgctcgtcctccagcatcctggcccagacgtcatggaggagatgcggcgaccaagagaacatactagagcgaggcgagcgccataatgttagtgagattttgttctgtccaattggaggtatattcacacctaatactagacatcgcacggatgataccctggttgcgtgtgcaaacaatgccgaggcgcaagccgttagcgcaaaagtccttgcttgcaccgtagagcacatgaatcatggcaggatctatggtatgggaattgacaagattgagtgatagaattgaaacgaacggtgttgcatttggtaaagctgggtttttgaagaccgaatgtgcgtagatctcgtcggatatcaaatggaggcggtgcgcggcgcaaaacaatatgaattcctcaatggtttccggcggctataaaaattgatcagctttgtctggactgcactgcggtaatgggaccaaggtcacagaacggacatagcatcttcccagcgggttatgagggctggatattgcgaattgtcagttgcttcgctgaggttgacggcgagcgcaagatgaacagtaagtactaactttgaaatcaagagggcacggacagtaataccactatcctgagctctatcaaatgcagccttcaacgccttccgatttacgtacggacggaagagatcatccagcgacgagtacccatcgacgcccgtatatggcacggggaccacgtgggcattactccggctcaggagatcaacccgaaatccattgtaaagcggctgtggaatcagaattccatcgccatcgttgcaaatgcaccatgccaaggcgtcaatgccacttgccaggccgggtgtgacgaaaatgtcgtttgctgtgatgggctgacaagagtgaaaggcctggttcaagaactcagcagcagcgcctcgaagacggcgcgagcctcgagggcctgtgctgtaggtgaggtgttcaagaggcaagacattaatctagtggcatgttaataggtgagctctggaagaaaggtcttggaagtatcggtaggactcacctccgactttatggactgggcaatttcctcatgcataaggctattctcggcaagacggaggttgaccctttgtttcaagtcagtctatataagcgattcatgtaggtatgctctcgtggttgactcacgtcccggtcggattgaaaggggaccatgggttacccattgactgttctctggggccccagacatccccatgaacagagttgtaagcggctcgttttgacaagtgataatctgtcatgcttgcttggtgcgtctgtgatccccgccttgtgctggtgagaagtagttgagagcctgagctttatgtgtggagtgtggagtgtggagaactaggcacttagggccaagtcacctagggtttcttacccgtatgaatcaagaagcagagcttcttgcattcccatcctcagtcttgaacaccattatggataacatggagacggttagcaggccgtttccccaagatatgttgctgagacaggtggattatcgtcatgatcttttgcaccaggagcgtctgccatccgtagcatgaagtatcactgactgactcaggccatgcgccagttcgatctacacagctagttacgaacaaattactatctaaatcagcactccatctctcctcgcaactgttggactgtcttccttcgtgtttggcatcggcttggtccgttactgaccggcccgctgagtgagcactacgaccgcaggcctttctacttaggtaattggacgatgttcatcatttggataactccatcggccatcgaaagaaaacaatgaccctcattgttggcaagttcttcaaaagcttcgcaagaggtgctttcctctctgttgcaggagccacgtaggggtgtttgtgaaggatgagatccagaagccgatgccagttatctcgccggcgccatttattagtccggtcctggaacctgtgcttggagaatccatcaactaccacacgcagtggaggcggatgtactaattcgtcaagatctagcctggggtctgttggttctgattgtgctttctgtgccggagacgggtccatatcaaggcccgccatgagtctgagtcttcaagctcgtactattatcgcgaaggtggcttatcatcagaactatggacttccctctagacatctccagatgctgcttctagagcacatgtgctctgtcgagacctttatttggccatccttctcgggacattcttcctctttttttggcgcctttcctcttgtcgtcaagacaacatacgattgagcctttggcaagtttacttattcctcggcatcatcaggtgaagagggaaatcccaaccctcattcccaacgcgctgtggaaaagcaaatcattttcgagtatttgtgctacggtcgcgctttccaacgaggcactaaacgccatggagctcttcgccagttttatgtacataacgggctctgattcatctcatgaatgtcttcctttgacgttgatgaacaacgtgacccagttttcaggaagttcaaggcctctccgccctacaagcatccacttgcatcctacctagtcatgtcgccagcgttctgagaaatgtaatggtagaacaattcgtacaccgaattcccgcattatagatcgtcactgcagcctccgccgactgcgccgggtcacccttactcatggcccttttccacccctctacgccatactgggccaaagtctttgtcgcccaagtgctgcagcccattagcttcagtgtcccctacacagccgctttgattgtcattaccgatagctttacgaaagacatgaggccttggctgatgcagttttcaacgcctcgcggtttggcaatgctcttggactcgcggtccttcattgagcgtcgtttcagagtcatcgggtcaggaacagagggaaacagatattgatgaagaggtatcatgccagttttgggaccatgcttgggtctatggtcgtctgtgcggtattagggttctagggctgcttagggttagcaaggtcggtctgaagcaggattatttctgaggaatcaatgagaagaagctgtctatctgccgacatgacaacaaatggtctttaattagaccagcaagtctaccctgagagactctgcaggtgcctcgaacaagcaagcgcctgtatacatgcgttgcactggtataaaaagctc

SEQ ID NO: 11419 - DNA, 190 bp, Emericella nidulans
ggattcgcacagcgagactcaaacagcaattgcggaagtgctgtcgttttacaggttaatgtggatcagcacacgaggatggcacagttcttatggattgcctgaaccatcccttggcctccgggaacaccggggagtctgagacgggcttgttgcatacgttcgcggacgtagccttccacactgaagc

SEQ ID NO: 11420 - DNA, 373 bp, Emericella nidulans
atgatcaccttccattacgtcttaaatagctgtttactacagctcccactgagctggattcctttaatcgtctttcttggcatgctcggtgaccctacatacgcctagtcccgtggggactgtcccaaccacggtacgctacagtatgctttcttggacgaggacggattctttaataatatgcgcaactagagtgccctatttctgaaaggcacctctttcttacttacggcgctatcatatgacgatacgcaacaggcgcctgcgaggagactataagattgtacatctgactgatgatgagttatgattcgggcataccttgacgcttttaatccatgcttgccttgtgagcattgatatctgtatgtag

SEQ ID NO: 11421 - DNA, 519 bp, Emericella nidulans
gactgctccagacgccgaagattactcctactcggcaggctcgaggcttcggaagcattgcattgggattggaacggtactcggttggattggaaactatggcgtttattttctataacacatggtcccattaattttgtttgtgaccgactggaactggctttgagcgcaggagagcactggtcagcacacactgcattcttgttctattttttccctgatataacacgcacgggcatgcagtacccccggcattgagtttaatatactgccctcgccactctgtatcttcattttgccggttcactttgctgtcgaacttttatctcagcttggtgtctggtcatggtttggtttgattagaacttcagattggaactggggatcccaattcaacaaggaaatggaaatattattatcttatttttgatgcaattttgcaagtagagagcgttatggatcattcagaactacccaacttttctaaaccctgctcccacctctatcagtagtattcgc

SEQ ID NO: 11422 - DNA, 206 bp, Emericella nidulans
  unsure (1)..(206): unsure at all n locations
tggntggtgccaaagacgcaagatagtagaagagcaccagcattatgcgaatattcgccagggtcagaaaccatgtgcatgagtcgaaaatggtttacggagctggattgtacttgaggctaaactcacgctagattggnagaacgttatcccgagcaaaagtgttntcaacaggagcgtcgttgtattgcgcgccgtaagtagaa

SEQ ID NO: 11423 - DNA, 1432 bp, Emericella nidulans
atattaatgtccccccctccgtccccgataccaagccacctccaccacagactcggcagacatcatcggggccagtaccaacagaggatgagagcgagcgctctgcccctgcggcagttgaaaaagtaactaagaaagaacccaaaccttctacggcgccttcatcaaaaccgccgtctccaaaaccttcacggccagcgaaagaagcccctcctccattaccccagggctccggactcatttccaatgctctattcggtgtagatgataacacgtcagacacgcctaagcagaggacgcctaacatcattgtccacatacctctcaaggggcaacctaaccagatagtgaactttgcccgcctagcagaggagcagtatggatttgctgcacttcatccgcggctagccgctcacaaagaacgaatggctcgcgtagcggcggcaggcgctgctttagagcgcaatgaccgttccggccgaggtatttccgctggggaaagcgcggacgaagaccttagcctcgacgctgaacgcgatagtgaagttgatggcgacggcgcaatgagtgctgcagctgcgaaaaccagtgaacctgcggacggaacgaagaagcgccgcaggaggaaaatagaggagtatgatcgagatgacccttttgttgacgatagtgaaatggtctggcaggaacaggccgctgcaagtaaggatgggttctttgtgtacagtggtcccctagttcctgaaggggacaaagtccaggttgagcggtaagtatcatcctcccttctactcgtcgaggatcccaagctaacaagcaccagtgcggatggcacgattaaacggggccgaggccgaggacgtggcggtcggagtcgagctcctgcaacaactcatcagcaactgcctctggcggctgcaattcctatttctcaagaaactggtcttcccatacgtggtccaggttcgagaggtggtaacgtcaaccgccggcctcgcacgagtaagaaagcagagcaggacaaagctggcagcactccaacatcccaaggacgaggcggaggtgctgccggtcgcggtggttcaaacagcactcgaggtgggaaagcacaaatggtagaactggcccctcggccgaatattgcacctgcaccgccaggactgaattcagtagcaggccaggagatcaccatgaaataggtccatcttcttacgttctcgtatcaggtttctttacggacccaggttgtctcattaatgttttgggtcggtcacggaaggaacctgaacaggcgtcgaccctgagcgtccaaatacgctgtcagctcagcgggacatttttttctttttgttgtaaacttttgaatgttatgggatttattgtcggtctacatgggtcattttgcccctccgtttacggaacacaaggtgtt

SEQ ID NO: 11424 - DNA, 536 bp, Emericella nidulans
ggaaaaagggcttgattcgaagtcctctacgaccacgatcgatatggcgttcactgcacctctactggctgccatgccacgtataatcccgttagtcgcctatcctgacatgctcacctaaagagtgtaggccctgcccgagcgggaggtggtgcaaggcgataatcctgggtacctcggccccgtccacgagcgttacctagagctccggctcaactaaactggcctaccactcaaagggcacagaagaataccttcagaaccccagtctattccgtcatgcaaagaggcctggacgggtgcatctcattggattgtcctcgctgaaaatcaggatctggaccaccttccgactgatatccatggtctcaataatgccatgagactgcgtaccgagagttcgccctaggtcatgatccgacgcgaactctgtcatatatggatgctaagcacaggatacgaccattcccagagcaccctgatcgatcattgcgctgcatgcatccatacaagatcgaagaggtccgaacgactat

SEQ ID NO: 11425 - DNA, 695 bp, Emericella nidulans
gtgccctcagtgactctacagatcaggataacatggcgcctgacggaccatggtccatccggctggagcatttaagatgcccccgtatgccattaagctgaagcacagggtcgttattcaaagtacgctatggtaattcgcaaagaggcccgactgaggtgatattcgcttctgagactctcgcactgcaatctgatctatatggccggagtggataccgctaatatcaagctgccgcgcattctattctaaggcagcatgactgcgggatgtacttagttccatcacaatccatacgatcggtgaatttcctttggggggtgacgcttgcctccaccgtctatatagcagtcgatggtttcggaacctacctaaccgatggctgatatgagacaggataatttgtacactcatcgcctattactgctctgaacgtgatatcatgcagacacagcgcctggatcacactacgacaacaatgccaggactgcatcataggggcctcatcgtcgcagtgaagctacatgcttctatctgagcgcaagaacaaatcctggaaaaattcaacttgaacatagaccgcaacattggtgcacctattatgcgagcgcgattgatgcacagcgtaagacacagctgcaaatggatactgccggggaactgcaccataattgttgtccgacgcactcattgat

SEQ ID NO: 11426 - DNA, 735 bp, Emericella nidulans
atagcgattgatgggcatcgctgtctatgggagctaagtcggaagagccatgatccatctcgagatgttatcctgagctggcgggatgctagtagtactattttcatcatggtatatgcattagacgatgaatatacatcgtatgtacattgccataaagaataatgcctcgagggaaacagcgaatctctggtggccatgcttccaggactaggacaacatacgtgtgtgctgtacagactcccaaccacttgtgacatacccagttaaggagatttctcaatcagctagtaaccatctgccttaaacatgataagaccagtttgtggcattgccgcatatagctaagaccgcgcagccgagagtgctctgatagcaaacacatcgtgcctggagactcgaccactgatttatatctgactaaccgtacagatcataatgagcctgtgcttagagggcgccatagcaaggatcggggcgaatccgtgcgccttattatactgatggcagccgcaccagatagaaactgatgggagtccacgacgcactgaaaaccattgattgtaaccgcgtctacggtatcaatacagatcggtcgggcagggcctagctgaagaaggtcttgatggtggtcaagctcgatatcgctagtccgacacacattgggatcgcaaagcataggcactataagccggtgaggcctcgtaacaaaccctactggtttgcaaacgtctt

SEQ ID NO: 11427 - DNA, 141 bp, Emericella nidulans
  unsure (1)..(141): unsure at all n locations
tagcatggtgattacgagtttgcgaagggccagacgtggacagtattggacattagtgctacaaggcataggtactatagaaggtacaatagtgtgttgtataggctntgagagactgattgttgcactcgatgtgttgat

SEQ ID NO: 11428 - DNA, 1684 bp, Emericella nidulans
tgcaagtccgctgccgtgacaacttggattgcgtggctgtcgtaatagtctcatcctgtcggtcgagtacttagacatcatcctcgcgcttgaagactggggtttcccctttgcccttcattgaatacccggttttgcccacgccttgagacgcagcgggatcgggtatcatcgtagcttcgctatcaggaagtgtcccatccgcgttgggttcaatgagattcggggtaatgggtgggaattgcatcaggaagagctggccggtgagtttatcgtcctggggctcttccccgtcttcagcatcccctttcttttccttctctgtgtcatcagccgtagtttcagcgccctctgcaggctcgacgccttccgtagcttcagctggtgtggcaggaggctcctttgtgaatagatccttaataagttccagatcttctgcatgtcgatcgtattcttcaatatcctccttcgtccgcaacaagctcttcgggtcctttactacaggcacagatggttcccttgagcccagcttccgccgcaccttcaccttcggtgcaggtaatagtccgtcatcagttgtaacgggttcctctgcatgtgggacatcggtcattgcctgatcattgtctgtaggctcctgtttcacctgaggttcctccgtaggtgtctcatcgtcatcctgcacaaacagcgcatcatccttggctttctccttcgcctgctgtcggagttcagcggacttggctgtactagactccatattcacgctgaccacccgttcctcgtgctcatgtctctcgacgcggatcgggcgtaagcctgcctcccttacgctcccaagagcaatttttcccttccgctgcctcttcttcttctccagtagcgcatcgtcatcgtcgtcatcggcgtcgctttccaagttgatcctgtcgatactgaccctgatctctccgtcgctttcgtcggacgaagcagaaccacccccaagggccgccgtcatcgacttgctcctccgcgacattgacgttgccctagaatccccacctccaaacctcgaaccaccacggccccttcgcccagcaaatccagagcctaatggcccggcagcaccagccattcccattgggccgccacgtccacgtccagagaatcccgcccgtccccgcgctgcgaggctcgcctttccgcgctggattgctgcagcctctgccaaccgctcagcatgccgctcagcttcaagtttctcaatagcctctcgttcttctttgctgcgccgccccactgcgcgtggtttatacttcaatgtcggtttcgaaggctcgcccgtaccatgtcctatactggaaggaccaggtccgggcccaatgctcccagttggtgtgcgtttcttgagggactgtagacgttgcaccggtgctcgtgctgtagtgcctggtgtaggcgtcgtaaatgctggcgcagggcttgcggaggtattaggggtggcgctagcctctgagccactgccatcggtgtttcgtgcaggcgctgacgacgcacctcgtcgggaagcggctttgggaggcatttcgatggaatagaaagatgaagtttggatgcggcaaggaaggaatgggggataacagcctaggacagacggaccacgggcaacaacgtaggataattcggagttatgcgcagtgcc

SEQ ID NO: 11429 - DNA, 349 bp, Emericella nidulans
  unsure (1)..(349): unsure at all n locations
ttaatagtgcactacgcgacaattcaataataccggattgtacaggccaatctctagaagtttgataagagtggcttctgaataggtcttcgtgtacattcgaacgtacttattaagtgagaatgatctgggtgaagaccacgttatccagtcagcaaactataaacaggttagtgccactaagtcaatgagcgcttctggctacgtagttctcacactagttatctttaagcggccagtagtctaantaacgatggtttatcgggattctggttgaactggactttgaaattaatataaatcgatggataantaataacattagggtttgctgcctttagaagtaatt

SEQ ID NO: 11430 - DNA, 185 bp, Emericella nidulans
  unsure (1)..(185): unsure at all n locations
gatgcgattcaagtggaggttgtatacggagatcctgcggcggttccaaacggggtcgattcgtggaatcatggacgcgcgagggcttgacacagatagtgcatgcggatccgntcgatggagttagcgtagatggtgtgggggttgatcatgccttcgtagtcgcgcatcggcaagaggttgcc

SEQ ID NO: 11431 - DNA, 492 bp, Emericella nidulans
gccttgtgatctatgatacataagatcgccggcaggggagtcctaggttggaaaccgcagagtcatcttcggttaccaagcctaacagggagtaggcgacagcacatgacgagccgtattgtgacacccgagacgctagactcactcatgacacgctatatccatatcacagttctagagatcaaccaagatgaggtggatagccctgcccgcacaaacgatgtagtattcaactccaccactggtgttgtaaccaaccagatgggctcctttacacttgtagtcgggacgaaccacggcctgggaaggattgcaaacaccagaatgagcatgatgcatcggcagaagtagcgcgagcatttggagaatgtgagcgcgagtctagctggcacagagaagacacacggattgctgcggcacgtcgataatggtgattgacgaggttgcctgactaagaacgtactgcgggtgccctatcggggtgagatcatg

SEQ ID NO: 11432 - DNA, 163 bp, Emericella nidulans
  unsure (1)..(163): unsure at all n locations
gagcatcagaccgaatataactgcatgctacgtgctgctcgactacatgagtgacgttcgttgcacgaggggacgtcggaccacgtgttgagctgcgggggttgttgtctctatcaagtgtagacccggctggactatcgcgngcgtaatggtggatgatctg

SEQ ID NO: 11433 - DNA, 113 bp, Emericella nidulans
  unsure (1)..(113): unsure at all n locations
gcattcccatagagagattgccacagccattgcggaagtgccgctgctcttaaagcctactgtgggccgccacatgccgatcgtagcgttgttatccattcgctnaatgatct

SEQ ID NO: 11434 - DNA, 3304 bp, Emericella nidulans
  unsure (1)..(3304): unsure at all n locations
tactcagcgctatcctgcactcggtttttttgtcgtttggaccttttgtttgtgtatgtccataacgttcgaggattaccatttttctctatgaatctttgtggtggcgttaatgatctatcatgaattacagttgagatgcggtatttgtgagctactctagcctttcttctgccaccactattatccttgggtgtactatcatactaagtatgatctaccgagatatccgggactccttaatctaatgatgtgcatgggaatccgaagggttatagtccaggtctaggagctccgccttttttcctgttaggcatgtggtcaagaacacttggggcatcacgataatgttaaagtatgtgcggcaaacaatttctacaccgcacttcatacagttcgtaatgtgagagtgtcacggaaatcaaacagtagcagcagcagttgtagtagcagtggagtgaaatattttttgcaggctcagattacccagtatctaaagttgatatcgagccgataatccattctatagatttaaactagccaatccgggactagtatgtgtattctcctgcatatccgtataagcggtacttagaattttgaacatgctccactatgcagaacgcctctccaccgactgttgcgnncctttnttttttttttttttttcttggtttcaaaggccggagttaaccgaagatgaaggcctgagtattacaggaaaagaaaagtcagctaagaattcatctctatttggcttcagatgatcatatagcttacttgttgcaagtccttagaagacttctagatatcccttcactctgtcaacttgtatgtatttgaatcatggttgcccacgatgtcataacggaaaagcttcaagaaaataccatggctccccacgcaacaatctctaaagacatgaatgcaggtcaacaaaacaaagaaaagcttaagttcctaaatattgcgctaaattacctactacttccgacagcgacttgcgtacttgcaacatgccggagaatcgcgattttgtcgtacggcccctttcgaaacaaattagaaacgatcaccgtgatgcattccgagtttatttatcaacaacatctctggctaccctcaaactcaaggctggggacgtctgtcggatattgactccacgcgggtcatcgaagcaagccatagcatggaattcacccgagagcattggaaagaccgtcatacaggcgtcgagaactctgcaagattgctatggagttaaacttggtgatcaagtctctgtcgtgagggtggacgaggttctggcagaagtcgggtcaatttccctggtcgattgttcggaccctgacagagccgaaaggtatggcccaatcgccatctcagacaggaatcactgggcatgggccttggaatttcccctctcaaaatgcgaggctctagctgttggcctagcgtttgacttggaactcaaaggccaaagaaggagcttcagaatcgctagcattcggggagcggcacataaccatgatagtactctgttccgtctcagtgaaacctctaagatcttgattgacgattttcaggacgacactgacgagaaaatgagctatcgtcttcaagtcagcccgcttggtctaggaggaatgggccgtcaacttcagatgcttaatgaagccctcgccgatttccagccgggctcagacacactcgtcatgccgccattttatgaacatagtagaggtatccttctgtatggtcccaagggaacaggcaaaacaacacttcttggccagatcaggcaggccggttggcgaaggacgtttgaccttagctcctcgtcaatcggtagaaacgccggagatggagaccagaggctgcgccatatattccaagaggccgttcgttatcaacccagcgctgtgataatagatcaacttgacttcattgcacccaagaagcaatcggtggactcgtactctctagcgccggtattgtgcgaatgcatagagtcagcaaaatcggcgcgtgttttagtagtcggcgctactcgccatccaaacgacgttgatgatgctttgcggactcctcaccgatttgcaactgagattgagctacaaattccaacagcacacgatcgatccgaaataattgctgctatatgtgggggtccctctccctttttgagcaaagccttggtcgagcttatagcggagaagacgcatggctatgttggagcggatatattcgctttgctgcagcttgtatgccgcaaagcccgtcaaagacaaatcagtagcaatggggaaagtcattcagaagttgcggatacaatttctgagggtgtcaaatcattgcgtctagatggagaaccagctatcggtctgaggattgaggaaggcgacattatcttggccttacaggaaaccagaccaactgccatgagagaagtgttcttggaaactccgaaagtgcggtggtcggacatcggtggtcagcatgacatcaaaagacgacttcagaaggctgtcgaacggccactgaaggtaagtgcttacaccaggacaaaatgcggcttatggtgcttactacgctagtttcccgaacgaatgaaacggcttaatgtaaagagcaaaaagggaattcttctctatggacccccaggttgttccaaaactctgacggtgaaagctttggctaccgaggcaggattaaatttcatggccgtcaagggtgctgagattttgagcatgtacgtcggcgaatctgaacgagctctgcgcgaggtattcagaaaggcacgctctgccaggcctagcatcattttctttgatgaaatagatgctatcgcctcgaagcgtggaagctcacctcaaagcggcgtgaatgtgcttacaactctgctgaacgagatggacggtatcgaggagctcaagagcgttttggttgttgccgctacgaacaaacccgaggtactcgatccggccttgatgcgtccagggcgtttggacaatatactatatattgggcctcctgactttgaggcacggaaggagatcctaagcatttggttctgcaagtcgatagtccaccctgaagtgaaagttgaggagctggccatgatgaccgagggatatacgggtgcggagatagtgagcatctgcgagactgccggggacgctgcgctggacgaagaggatgagagtggtcaggaacaagatgtttgtagagcgacattttgagtatgctctgaaacaagttagaagacaagttactgaggatgtcatccaagattatagcaatg

SEQ ID NO: 11435 - DNA, 405 bp, Emericella nidulans
tgtgcttcgatctgcagcagcactgagcggttgcgaactaaaccgtgcggcctaggggagtttttctttacacccatgcacaggagtgttatgtagcggagctcgcatcgccaaccattatgcaaccagttgatagctgcaacgggtctaagggtaagccatagcgtgtttctattctagcagccggtttggagcttgcatgtataacggacaggatagatcctctagccttgatttggaccgcgcgagtttacaagacttctacaacgcatgtgctaacatgcatggatctggcgagccacagaaatacactcaatttctttctcggtgttgttgacctcctcatggtggaacttgtatggactacaggttgcacacctctttgcagcgcgtatttacagctat

SEQ ID NO: 11436 - DNA, 200 bp, Emericella nidulans
  unsure (1)..(200): unsure at all n locations
gtgctgtggtccaccctactgatgttacgtccactaattaatagagttgtatcctctctctcgtcgagtgatctgcaccacgtaggtaaanttcgagacagcggtaatggaaaggcataagagttatggatgagtgcacgaatggacagcgacagaaagaaagaaagaacgaatggtttgttcatagatatactcgaagc

SEQ ID NO: 11437 - DNA, 518 bp, Emericella nidulans
taactatcttggacagagataactgtcctctggcgcgagtggtgagtgtagattgacaggcgcgggtacgtcggtgtatgcactgctgactattgcaggcgatccttggcatccgcaactgagctctgtggggcgggggcgcaagacttggagttatcactaattctagaaggagatctgtaagctgagatacccggtctagaataagacctggatcctttaaccgcgcaagtatgaataccctttagacgacttactataaggcgtaatgtcaaaaagagctgaaggggttgcggatacttaccctaggaatcgtgtcaaggccgaagtagaccggctgtatgcaaaggacattggtggtcgacagtcgctctcgatcgtacgtactctggatgctaacgcattgctatctcttgcactctagggctcgagattacatacacagtctgaacggcacataagctgacaaccacaggctgtcctaaatatctccccgaacttaatggagtattttatta

SEQ ID NO: 11438 - DNA, 816 bp, Emericella nidulans
cgcgtacggatcagacttggtgcgcatccgtaaggtgcctaaatgatgaattagacttagtcaagtgatgaagtagacaacttacgcaacgatggaggcggactcaacgagtccatgtcagcggtcgacttttcaggtgggaagacttgagccttagccgggggcgcaaattcaacattgattgacggcggggccatctgttacgcttgcccgatatcaccgccattcggatagccttctgttggaggagtcgggtacgcggagtttgtcgccggagcagagataaatggcccgccagggattatgtctgtcggatgttgaggcatcagctgaggagagatgtaaggactatggtgagggctaatcccctgtgtttggggctggtgatgctcagacagagtgaatgactcgattcccaacgcggcattatcatagagactggggtcattctgagccgccagcagtggggacggattattgtccgccacgtcaaagctgtcatgctggggaagatagggagaatgggcggcggacgacacctcggagacctctgagggagcgcgacggtggccgtgaaaagcggaattgttcataacggcctgccattcggggtgcgaaacgttggtcatgtatgcggcgcttgcgggatcgagggaggtgtgacgcgagtgctggggggtatagaacgtccccggcgaggaggcgggaggggacatggcgctggacggcggctggtccagcggcgaggtctgcgacgagttcgacgggtgaggagacgggatctggctgaccagatcgaccgggttgacggcttgg

SEQ ID NO: 11439 - DNA, 3126 bp, Emericella nidulans
atacggcaacgaatctgggtgaatccaagcgacggatcttacaacctggagtacaatctggagctggcaaagagggtacaggatgccggcatgagtgtctacttggacttgcatttgagtgatacgtgggcggacccgggagaccaggtatatctatatccattctatacttccaagatgagctaaactgagacgactactgtacaggcaaccccctctgggtggtcaacaaccgacatcgacaccctggcttggcaagtgtacaactacacactggacgtgtgcaacaccttcgcagagaacaatgtcgccgtcgagattgtctccatcggaaatgaaatccgcaacggcctccttcaccccttaggatcgacagaccactacgacaacattgcgcgcctcctgcactcgggcgcctggggcgtcaaggactcttcgctctccacgacgcccaagatcctcttccacctcgacaacgggtgggactgggatgcgcagaaatacttctacgacaccgtgcttgccacgggtacactgctgtctactgattttgaccttattggcgtatcgtactaccccttctacaatgcggatgcaacgctctcctcactgaaaacgagtttgacgaacctgaagtcgaattacggcaagaatgtgcttgttgtggagacggattggccggtgcagtgtagctcgcctgagtatgcatttccgtcggatcttagttcgattcctttcagcgccgatgggcaggagacttttctgggcaggttggcggacacctggaggatgtcggtggtgtgggaatatattattgggagcctggctgggtggacaatgcggggctgggatcgagctgcgaagataacctgatggttgactggagggacaggactgtgagggaaagtataagtgtttttggtgatctgtagaagtcgaggatgtttatgttgtgctgatggcttgccctatgttaccagtaccaccagaacctatatgttcggagctttctccatgtacggagcaagtactacatcaggattgaggaccggccagtcaagactcatcactaatgcgtttcccctgtaccttatgcaccttgtatgatgaaacaggcagcctcgatcaattgtccagcaaaagccgccagttcgtacggttccagggtgggaggggtttcagctcgggggctgtgcaaacgcagttaagtgccggaacccatccagcaaagtcggtcaaagctcccaaccgacggtgtgcggaatgcccagatttaagcgtcgggtcaagaacgctcctcggagattatagcaccagctgaatcttgttgtggagatcggtgagactgtgacatataaactcggcagactggagttaagctcttggtgatagcgaccatgagcggacgtcgagagttgggcacacttgggactcgcgtagtcatcgactctacggagtaccctggaccacgctcaatcgaccctaggacggcgtgggggcggaaaatgcgatggagcttcagtgaaatcataagtgacgtgggcccttttggcataacggtgttcctttttaggctgaagtttttgatcctcatcttcttcttcgggttctgttgatggtcttgtcaagaagaatggatagaatatagccgtcagatccagtgtaacatagcgacctttaatctgctgcatccgccatagatcactgtggttattcttagcatctcacctagcttggtcgtgaaaacctcaccagggtatgcttcttcctatcgttcggcattctcgagttagtggagcgagagcgagtctgccttgcggatcgctgccgttggctcaacaagagcacgtaacaattatttctgccttttgtgcctgccacattccatgaagattaccggatggttatttttggtgtttcgaggtattttaagcaaccaacgacaagcatctgccaaaacgtggttgattgtcgtcaacttgagtttgtggtgttgctactggggcccatccccacgtttttggcactcctcaggcactaatcaggcatcaaggcatctatcccctcgactcgttctctcgactcgccttcgacctcctcccatacgtacgttctacctcttatctcgatcatttcatctcatttactttttcctttccttttatctcttcatcacgctcatctttcaagagtcgagctctgctgttgcctagtcggtactctacctgccgcaatattgaaaaggacccagactacatgcacagctcgacgatcaaaggatcggtgattgtgaatccgcgatattgggaatttgggatagcgcgacgaggctgaatcgccaactgcccccccaactcggtccctgaaattcatctccaccgcgaatggtagctccagactgaccttgcatattcccgttcttatatttatctccatcagtctctccttcgatccttacttttgattgctcgcagcggcgtctatctgcgcctcagcccgaccgtaatccacacctgctgtgtctccccacctcgcgcgccttgggccccttctgtttccctggatcatcctgctcttattcttacatattcttccattccctccgctcagcctcttttcgcgtggtatctattctgggatcttgtctgcatagctctttgccatggatcctcaagatacgctgcaggacctggggcaagctcccgctgctcatataaaccgcagcgccagccctcagcacacgcccaccagcagtacaataataatcacaacgacttgacaattgacccttcggtcacctccaattcctcctaccctccgtcgtcctttgccaacaattccgctcctggctccgaggcgttcgctactcgtcgagctatctgactcctgcaaccgcgaccgaccataacttcgcccgccctagtctgcagatcccacagtcctttgaccaaggactctcacaccagcctgccgaggagaacttctcaaacctcctaaactcgaacactggtgacttcgatttctcgctctaccagggatcgagccctaacaatactggctccgactacccctcttcgggcctgctcgatcctcagcagtcgggcaaccaagccgtcaacccggtcg

SEQ ID NO: 11440 - DNA, 2793 bp, Emericella nidulans
ttgcctcgggtatgttagaggtgatgtagtggaagagatcgcggttagtgaaggggaggcgaaggggaaggggcattatgtggctacctcgtggacttcgttgcaggcacgattggatgcggccaagagggataaggttaaggatggtttttcggttgttgctagtaaggtcgggggttatgaggtacatgatgtcaagttccagtaggtggatttacacggaacaaagatgtttagagatatacagaattgtaggtgacgtgatcttgcactgcttgaatgcatattattcatttactcgtctatctcgtagagccactgaactgttaatctatttaccagtcttaccggaggggatgttaaagaagacagcaggcttgccaggtgaggcaaccttgtccaggcgatagtaccccttgcgctcgaactgaatgatatcaccttcagccaggagagcgacattgctgtcggcgacggcatcctcgtggaactcggtcttggggttcaagacgtcctcgagactgtcctcctcctgcatggaatccttgttgagaaggtagtcaaaatcgacaaggtcaacgggaaccaggtcttggtcggtagacaaccaagtaaccttcttctcggtcttcttgaagtcacccttctcgttcaggtccagctccagctcggtaacaacaccagaggcatctgtcactatcttgcggacgaaggcgttaccccagttcataagcgtgatttcctcgtcctgcttgaagctcttggcatcctcctggtcaaagaggatcgagctgctgtaggtcaccttcttagtacccacatcaggattcttgttgtgcttaggcttgtcctgagtgtatggcgaatcgggacctcccttgatagtcgccttcacggcatccttcttgaggacagcagtgtggcggggggcgaccgggtcaatgtacttcttgttggtggcccagaacgaggtccagtcaaggttgacaatgtttcggctgggaccttgcttgaggataaactcacgcagagcagggatggtcattccgcggcgcctgataccacggattgtggggaagcgagggtccgaccagccgtcgacaacgccctgctcgacaagctttgtgagctttctcttggaaagtagggtgcggacaaagttcattcgggcaaagtcccagatctgaacattacgcagcttgagtgtgtccaagaaccattggtactgagggttgcggtcgcggtactcaatagttctaagagcgtgcgtaacgccctccagagagtcgatgattgggcagcagaagtcgtacgtaggataagccttgtacttggtgccagtgcggtggtggggggccgggttgcagcggtagataaccgggtcgcgcatggccttgttggggttgtcaacagacatcttagcacggatacaccagcgggcaccctcctcggtgcccttggtcatctcttcgaaccgagccagattctcctcaactgtagcatcgcggcgcttgctgggctcgccgttcatcctctgggaagccattgtctccttgtcggtatcatcagcgtaggcgtttccgtccttgataatctggacagcgtactgctggagttcgtcaaagtagtcactgctgtaactagtcttgtcaggcttgatgcccataagggcgagatcctcaaggatagcgtcctgaaactcctgcttctcgttcgaagggttggtgtcgtcgaagcggaccaggagtgttcccttgtacttctcgtgggcgaagtagtcgttcagaagcgcggccttggcgtgtccgatgtggaggtatccagaaggctccggagggaaacgggtgacgacccctttgtcagtgtttaggagtgcaatgtcatagctggcaccttcctttgccttcgcggccctcttgtccttggcagaggcattcagagcctgcaaggcagcaacagcccatgggcaaagctcctccaagaagttgaaccagcgagggagggtaatcaatgtttcctttcggatggtaccaatggcgacacggtttccacggagggcaccccacagagcaatgtcggcggtagaaagagcgtaccctactacaaacgatcgcagtataaggtggtggatgagttgcaggcgtttgggtcaagggatgtgaagtctagcatggcaaaattgtcacggctcggctagccaggtctttatcctaggagtagactttagtatgggggtccagcctgtgtcctgcccatctttaactgatttaagtacccggtgttttaatcagtatagattggtgtcaactcactgatcgtatgtctcacttttcttcttgcctcctgaacggtaaatttacacatttttagctcctttgtagaaccaggggcctctattttgttgtaatttcggcacttatcttcttccatatttcaggttttttgtacaatgtctcgctcttatttatatacctaataatgtcccttttctctttttaatagcctttttatgttcttccattatacgctttagtctataactacattattttcttattttctacttttttttattattcttttacatctattatattatatacacatgtctttttccccttaatcttcattatattacattatccatttcctattgattatctcattttactcttctctaacgtttctatttatgatcttttatctatatcgatcttccttctttatatttaaatactttctattactcattttacatcattaaatctacattctttgtcacatctctctttt

SEQ ID NO: 11441 - DNA, 2236 bp, Emericella nidulans
cagagagatgccatgaacctcgggttcgggttttctgagtcctccactagactcctggacggtaggtacaaggctccgatcccggagtttcagtggtttcccaggttccctcatccttgcccctgcttcacgtcgcagtctgttttctttttctctcatttatttattattattatttattatttattatttattcttattttctcactgacctgcctctttgtttgcatcccactggtggagctaccatacataatcacaataatacacaataaatcacaataaggcataataatataaacacaagtcaatgctatgcggtatatttgtactgtgtgtactgtgtgtactgtgtgtactgtgtgtactgtgtattgtatgcatttgtgtggtggtgctaatgctcaggactgggactaatgactatagaatgaacccatggttctgatcctcactaagatttagcagcggcggagtgaagaaataatccacgcaattattatggaaaaggaaaaagaagaaacagaaacggggctaagggtccccgaggcactggttcgccattggactctcctttttcgcccgctaaagttctctgaattttgggatttattattattgccttgcttgaacgggactggcgtcgtttcgaagcctaagcgggccaaagtaacgatctgcaaccgtcccccgacgggacgtcgtcagtggcactactggcgcggtagactgctgaacgccagggctttccttcgtccctgcgatcctgtatttgttcataagcttcgtcgatcgcccttccccagacgcaactcgccttctccttctctcactcagatcctcgtttttcttactcctctgaacacaacagctgcacctgcgcgcatcctcttcctcctccgtttgcgcggatcattgcagctccaattgtgccggctcttctcttctcttgcctctactctcgaccagcttcctggttcacttcgttcacctcgtttacctggttcatctggagtacctggttcccctgatcccctgcgattcgtgtcggtcgaccgtccctcacttgatcatcgctccaacggccgtgttgcgagcatcaccaccccgcgagaacatcaacacgatcttccagcactctttcaaaacgactatcctcaatgacgatggttattgagaaccagaaccgccagtatgcgggcggaatggggtttgacagtgtttaccagcatccgcaccacagtcaaccaccgcagttctcagatccttggaccaccgcccattcgtcatcccactcgacgccccccgtatatccagcttccgtgggcatcaagcaggacgagactagccgtccttctcacatccctatgccatactcggtctctgtttcggctccctcgatcgtggcaggcagtaactactcgtccgcgtctacgtctgcgagctacccggcccccgacatgatgggccttccccatgagatcccccggacctcgttcgaccatgctcctgcctacaccacagctccctcgatcagcagctttgcgccagccagctatgcgcccatcagttacgcttctccggttcaccaggacaaccgcaggatatcccatgcgtaagaataccacaacgatcttcaccgaatctctgcttaccgttcttgttttctagtgatgcttcccgcgttgcttcatcccaatccacatcaggcccgacatttggagacgcgctggatgccagtcgcggaatggtggtctcagccaggatctgacaccccgaaatatctatgggcctcgaggatctcgaggctcgggcgattcctacggattccccctagcacactcggctggttcgtctatctcatctgcaggctcttacccatactacagcgcgtccgtcgcgtcggtagagtcgtctgtcaccgattacagctcaacaacttcagagtcttacgaaaatggccacttgtcacgcacactcccacgcccgtccactcttctcaccggcagtgctctccgggccctcaatcgatgatgagccagttcagttcgaaaatgccgtccaacacccagaagaatcacaagtgcaatgtgtgtgacaagcggtttacccggctatcctctttacagacccatatgtacagtcacactggcgagatgcgtaagtcccctgacaaactagtacgtttccgttttgtgatactaatagattgaaatacagcattcgcttgtgacgt

SEQ ID NO: 11442 - DNA, 106 bp, Emericella nidulans
ggcattggatgggctatagcaacactacaggcttcctacaggactacgagcggttcccattcccacgagacgaagcttagtacttgagaacgcgaagatggccagt

SEQ ID NO: 11443 - DNA, 3120 bp, Emericella nidulans
tggagacggacggcgaacacggtgagagaccgctgttcagtattctgttttctgatttttggaaaaggttctatgctcaattcggctggaaacctcacccatcttcacactttgcccttcctccgatttccaaagaagaatactctgttccgagcacaacggccaaggtcagagtattgcgcgcggacgatgttcaacgctgcatgtgcagccctagcattcttgagaaagagagcgaggtcctgctggcggtctcgttgcgatccactggtccaaaagtagcaatagttccagacttcgatcattacctatggcactgggcgagggaggaattctactcccagaagctctttcccggcagagatatccccacggcaaagggcgccggcgatgatgctgccaaagtgtattgtgcctggaataggacgtttggcaacaccccagaggagaacaccttgtacattctcagatgggtatacaacgagccctcctctgaagaggaaaccgagacaaccattaaagcgatggctgcaatactcaggcgagcgcagctagaagcccaagagtggaatatggctcatgtcaagttttggaatccaacacctctccttgaaagggctgtagcactgttggaccccactgccgagataattcaccgcgagaaagacagcatcgcggctctcaggtggagcgggaatccggaagaaaatgtggaatggctcctgaacgagaagtatgcatggtgttaaaattcatggcgcagcacttctcctagacatagacgtccttgtatgcatggacgcggttggtgatctatcgtttctgtctcttttggttcttgaataattcatgccagtttctcgtctttttagccgccgttgctgcactagtatctgagggaaggttcctcttggctttctgtcgatcagcttcagtagcgaaacatattgtttttggctcagggtgcatataacatgtttcctggttattgttagcacaattcatacaattgacaggaaagtagcagcgtttaactcacaggtagaacggcgatcgagacattttctctccaagattcaggaagttggtccttccaggcattcagaaactcgctttcggcaatggcaaaggcgttgctggttgctgtggcctcgagatacgtctctcccacccaccgaacacatgcttccttcttaatactcatccctgtgtcgcttagccacccagtcataactagtagacaagtagatactcacatttcagctcgagaaaggcagcccgctcaacctcatcacctaactcacaaatccttagagcaacagcatcaaacagcgggcgtggaaacggcgcaactccatcatcgtcaagcaccgacttccaaagatctgagacgataaactgcttttccaaatctatcccttgcagcactgctccctcaacgactctcttccacacgtccagcctcattgcagctgaaggtcgccaacacgagtgcgctgggattttctcttcggttgcagtaggcgacaagagaataaacgcgcacatctccacccagtcacgctcacactgggctcttgatacgggaacatctgcaaagatgcgatccagaatctcgtttctcgctttcgtagcttctgagctcgtgacgttctcatccgtactttctcccccgttcatatcttcccaatctcccctatcaaaaactcgcacccgctttttcaagaaaggcacagcagagaaaccctcagcgggcttatgcaattctagcgtcgacccgcacttagcgatggaggttactgtgccttcaatattgagattaacatctcggtccctgtcgcttccccgatcagtatccgcatccatatccacgttctcgccattgccatctccagcgccattgccattgcctgtaacaatcttcaaatcattcttccgcacagtcaccccattactcggtcggagaatatgcagtgagtttgacgactggacttgacggatcgagtatgtttgtgttgccgtgcataggttcacatattctgatgcggtggcattggacgtgtttgtggttgaaagagctggagatttaagttctagtctggttttgaccataaatgtcataaataatgtaccagatacgtccaactaggagccaagtgtactcacgtcggcggatcgtcagaggaaagcagctctgcaagctcgggcgggagctcgaggagtcggaaaccttgttgcggggtttggtgagtaaagaggatgctgggcatggattgtgttgacatggttgcttgttatccaagttggattccaaagacacaagcagtcaagcctctagctaaaggctgggtaaaggctggcaactttgggcagcgtgactgagtctgcgggaaaacttgacgcgtggtggtgattctgatggaagaagcgcgacttgtggggcaccgcacgggccactgcttaatccttcaggttcaggagtccaagtacatgggcaacgggcagtgaggtccagatctctatgcttgaactgagccttacgtctgtttaataatgcttgataagtcatacaagtgcttgaatattgattacgaatttacacaaccagacaaataaaactacctcaataacgccaatcaattacacgggaaaggcaccaactataccagatcaacttgaatgcatcgcaaggacactaatagtaaccgcccgtggccagcacagggccaagtaaattgcagataaacatgatctcatctaattctccgtttcctcatcgatacggacattgcccttggctccctgtttctgggcagcagatttgtcctcatcgtgtcccttctcaagcatgtattttcccgttgctgggctgtccttctcagcagccttgaattcatctttttctagagtcgaatctttggccttctcctcctcctcctctacagagtcacggacgaacgcgttgtcgatttccgattcgacctttggatccctgaagtaagtttctgtccgttgcgcacgctcagcttgtgctttttcttcctcctcgcgcgctctgcgttctttctccatctcttccatgtgtttgagatcgtccacacttggttcgtacagatgcca

SEQ ID NO: 11444 - DNA, 1991 bp, Emericella nidulans
  unsure (1)..(1991): unsure at all n locations
tgattgatcgaattccatgtcttggagaccgaaccgctaatacttctgacgtactgcatcacggaaatctcagagcgtgttcccctcgcagaatatgaaggtcacgacggtgtaacagatcgcaggaaacgagtcggaaagatatggggctgaaagacgtgggaagtcacaaggaattgccgcctatccaacacatgtgacagccgagagacatccccaggtggagaacgagtgaacgaagtacaagaaagtctcagatcctgaatcgcgcgccgtggccgccgctggtttcagcgcaaagcaaggaaataacgaatggaatgaagtcggtaatagaggggttaaagactgcgatagccgaggaggagacgctgagaggttgacaggcgaccgttgagaggtggatgcagctctcaacagcccaacatgcaatcaactgggcttatccattagcataatgggttacatcagcaagaaatattccggatttatactacattaatcaggattgcccgggtgtgctagtcgatattcagtatcagccctgtctcatgacctggctggactaacctctgcaagtaaattcacttttcctcggctaaccattctaggctagactctaattatgtcatcatagtcacatgatctccccactgccactccgcgcttattttatcgaacctaccggagttgtgcccgagagcagaccctgcggtggtgattattcctttggtgagagagcggcttccccatggaccgaagctgggatgtatgagccattctatcttccccttgacgcctaccccagcgtgatcccccgtgtaagggtgcgaggcgtcatggcgctcttcttggcagccagtatcctatgggctctgagctggtaagtgttgccgtgttcctttgttacttcccatggtattgactttcttgaaaggttactataccgtgcatggcaagtttgtcagactcccaatgaggtattgattgagaagcttggtttggatatccctcccccgccagaagttacgctggaagagataacggcgcgagggatacggatcgcctggaagcagccggaattccacaactctatccacaaacatatcattcaagtaaatggcgctaaaggtgggttgtaccgcacctacgcctactcgcagctgacctggtctgtttcatgacagttggcgaatccaaacgagcggaaaccgcagtcgaaatcctgaacctgactcctgggagcatataccacatttgtgtcttgtccattagcgcagcaaattttcagacccccagtgcagttattcatgtgcgcactaagtcacttccggcatcccaagccggagacaatgcctcagcaaccggtcctacgattcgagcgtcaattccccggtcaacagccggtctccctgctccttcggcgccgttaatggcccgcgaacatagtggcggcccactacagaagcgttcatctgttgggcgccgacagtcccctgcggccggtgcagcagacatttcgcaaaatcatccggacaatacactgaacagcgctgcatcctacgatcagagcgaagatatatccctgctagcggaccgattgaagaatctgcaacacgacaatgatgctgtagagaagcagactctcgaggaggaggaagaacatatcgcattattgaaggatctggagaagcagcgagatgacttgaggaaacgggttaaggagaaagacgaggctagcggcgacctcaagaagcatgtcaacaagctggaaagtgttaatcggacggtacaaagcgaaaaggcaaaacgtgagagggttctccagcaaaaggaggctgatcgcaagaaacggaggaacgatcttttacgctggcaagaacaaatgccgcagatttctgcggatacggcgcaggctaggcaacaccaagagcgtctcgaagaggagggaaagaaacaagcggacggaattagagaaaagattgngaagg

SEQ ID NO: 11445 - DNA, 657 bp, Emericella nidulans
atcctaataggactggtagacgcgagccggattctaacactggacgacggagatgtcaccagctcgctatatgctgaagaacgtggccctttatcgggggcttcgatggcaccggcttaatatggtcaactattgtgatgatggtcactatgctaccccccggaactggagactttgctaacacggttgccggttgcacaattctgacgggcgacttacgcctagccagctagcctgtggattgtgcctgtacgctcattattagccagatcatgtcaattgaaactgagggggactatagcctcccactgagaccgccagctcatatgggctcgggtgatggcttaaacaagccttagccgcgcagctatgattctgatatagataacatgctacttgacgaagcagcatagcgcgctgaatacacagtgacctgcgactctgaattctacatacgatggtcagatctgccaactattggacgtcgctctaagtaaatgccaggtgactgtgcgtgctctccatgaccctatgacacatcattctgcgcaacgtgcgcactgcagtatatagcgatgcatcagctctttgatactgcgaggcgggatctagaccatggtgcgtatgagacggaatattgctgtgcttctgagctga

SEQ ID NO: 11446 - DNA, 2182 bp, Emericella nidulans
aacgatattcagccgcatgcaatgagtcgagacagcataggcaggatgattgactcatcactggcacagtgctcgcgcagggctggcgcgccttccgacagttccggcagtgtccagatctggtcccatacgtaacccactcatgccacccctgctaactgccagaacggcaggtcatctgtcgactccctatatttcggcccgcgcggttcctcgagatggcccagacggaacgacgacaaaaaaaaaaaggaaaaaaaagccggtaaagtcgctcactaagccgtcctataaatccgggcctgtccggcccccctcgtccccggatggtatctccgctgtgatgcttaatgatagactctagtcacattcatagactctagtctcactcatagactcaagtctcactcattagacccaagtcttcactcattgttagcgcctccagctctccagctctccagctcaagctgtcaatctcctcagttcttctccgcaccgctcagtatctagccaaacatgaccactctggcatcggaccggtctggccgcagctccgagagctcggtggacgtcgtcgcagccgagaaggagaagctatcgaccgtccagctgtcgcaagcgaacctcgacgccttacccgatctgcgcaactcggcgtcaccgaaacggtggaagaccttgtggaaatcgttccggtacctgcagcacctgacgtcgaaacaggtcgacgacttcatggcctcatatatcatctataacctggactggtcggacgagaagcagatggtcgagacgctgggcgaagactaccagcgcaaagtgggcgactgcctgcaggcgtactatggagtgctcaaccatctctgcgcgctcggtgacgtggagaagatgtacatcccgccattcatgagcagcaaggccaccgtccgcgagaaccagctgctgtacgaggagtcaatagcgcacgatatcgggctcaagccgggcgaccgcgtgctggatctgggatgcggccgtggccgcgtcgccgcgcacatgtcgcagtactcgggcgcgcaggtgacggggctcaatatcgaccctaaccaggtcgctcaggcccgctcatttaatacgcggctcgggttcgagtcgaattcgttcattgtccaggatttcaacagcttgccgctcccgttcgccgacgacagctttgatgctttctatcagattcaggcgctcagtctgtgcaaagacctgccggcgctcttccgcgagatctaccgcgtcgtcaagccgggcgcgcgcatctctctcctcgactgggtcagcttgcccgactatgacccatccaatgccgagcacgccgagctcatgcgccgcgtcaagccgttgatcggcgccgtcggcacgccaaccccggagatcttggagaatgcgctaatggaggccgggtttacggtcctgaggtcagacaacgcgagcgtgggcggcctgcaggcgccattgatcgacaaggtcgacctgtacttccgatcgatgcgccagctcattctgggcctagtcaaggcgcatatgcttccgcgccacttcaagactttgatcaaccgattgtgtctggacggccaggcgttcgtcaagatggacaagatgcggctcgtcacgacgagctaccgcatcatcgctcaaaagcaggcgtgatctcggtccaccggctggtggattgtccgtctcgaactcgttggatggttttcgtatcgcacgtatgcatgcacggtatcttaccttctctcgttggcgttaagggggcaaaaaggttgttttctgcacatatcagtggctgcacaatttctggagctgttccgatcatggagttttctcattggcatttttcttttcttttttttcccgttaaattgttcaggatacccggttggagtgggatgtccagttctgttgatagagcctgtatagactaattaattggcggtttgaacaacacaagcagtagaagcaggaagacatcacttatctgcccacgatcagtgacccggccacgaggtagtccctccttgccctccactagagtgggcgagcttgggcagcgagctgtccaggggccagctgcagctgcagctccactgttcctggatgatttgatcgcagccatccatttacccacgttgccagcccccgccct

SEQ ID NO: 11447 - DNA, 1843 bp, Emericella nidulans
aggtatcgaagaatctcgccatctagaatccaaacgtaaaaaaggatacattcacgaggaaaaaatgatagctcatgcgcctagggggtgctggatttgttccatgcgacgggacagggtgtagctcacccagtctgcagcaggagtgatagggagccctgtctggccatcacagccggtcacatcctatgttggtctgaataaggcttcgtggcatgtcacttcctcttttgaattcccccttctcccatatcggcatatccattcgttgactccccaccatacttccccgacagagtgctgagtaacttttggtgtgagcattcgtcacatcgaagcaatttgtgcggaacgttgtaaaaaaattgataataatgataatcatgataataatgatagtaatgatagtaatgatgataataataatagacaataaaatctccccgcaagaaagaccccatgaataggaaccgatgcgagtcgctggaacggcacgaattcaagtcgatccaccgagatcttgttgagcctgatgcccctgactttactactttttacgtgccttgctcgtaatatgactagataatcaacttgaaaggcgtaacccctccccagtccaaacgtgaagcaagaagcgggaagcacgtccctccaacggtggagactgcagtcattggtcacagtgatattgtcccatcgaggctccggcttcggacaaccattccaattcctgccattcgctaaagatcgcgcggggatggagagatcgaatatagtccccggtctacagatcctgtgatgtgattcgcgcgccttggacgaacgccgcttgcgataaacatattgaatacgaatcaaccaacgcgcaccgatgtaatttcgacttacaagcgctagaacgaaaggaaccccattagaacgaggggctaagagggactcagggaagctaaaacgccctaaactacaatataaagagactatggaaatggaaaaagcaagtctagacaccattgaaggccggctgaatggctcgtactacgggacagccatcagcaggcagcggagtaatctcgggttgctgctctttgctagtatcattttagcttcccaaaaatggagactaagcttctgatgtggcaaacctcagatctgatcatcctggtgagttccactattgccatgcgaactgttgcctacggtgcccgccgcacaacgatcctgcaggtttatcgcccatcctctgtacattcactcgctagccaatcaattttactgtgcttcatctgcctttagttgcagctcccttgtgcctatatcttaacgtttgcgtggcgaatctcaaaaataaaaattgagtgtcagattcagcccggtttgaggcaatcttgatgaaccgctcaagatatatccacacaaagcctcatcaatgcgagaaacttgaataccgcggccgctttctacattatttgtcagtctcgtctataagaccagcaattcctctttgttaatgaattcctgtctggcctcggttacacgataaacaccaacgaaccttcttcctcagcctctggccattcccccactacaagtttaaggtcgagtacctttcattcatctaaataatacgtttattatccattatggcgcagggatcgaactattcgctctcattcacgattgaacctccaacatctgccgccccaggcgtgcccttttcaattcccgtaatcgttgcagtccggtctgttggtaatgctaatagcgatcctttacaacaactaggggcgagagcagtgctctgggatgagagcggaaccagttcaactgttgatctgactgggaa

SEQ ID NO: 11448 - DNA, 1616 bp, Emericella nidulans
ctcgaacaccagcttgtgcagaacgctgtggcaccgagttcagcctcccttgcatggaccgttctgcaagtccacgacgggatgacgcattggacttctttgtgtgttcgggctgcctttcacctatcggggcatcgccaaccttgattagcttgtgcgatgcgggcctatgctgggatagatctagaaacaaatgagctaacgtgaacgtttgtgacactgcgcaggtacctattcttccggttcggaaaatctataaggaagaagagccgatttgctacggcgtagatgcaccgatttaggtccaaaacgttgcgcagaaaatgaggatacgatcttgacccagtgggctgaagtcgtcctacgacgcaacaagctatcctgggcggccgaccaggattaatccctggagatgcagatggcgggcctcccaaggcaatagctttccaaactcggccccatagacttactgtacatatgtaatttggatacataggtagaaaatatgacatagaatgtgcttactagttctaagtatactacgcgccggcctcgcttacagcgatgaatctccacctctaagctgaaagcgcctagaagatatagtcagtcagatatcagcataatgctccaatagtagaattgcagtagcatgaaccggtcaggatcagaaacgcatcgcaatctggactggaagatgatgcctgagccacaacaggaccgaaacggcaaaatcacacgcacgcagcgagcacagcgtcatcttgttggttatcctgtgcatcaccaagaaccgcagcgtggaggttgagcatctcgtgccgaggtttggggaatgaataacggctcttgaatggcttcagcccgggcaaaatcggcaccacgggtattctcggaatatctgcctgagggtgcttgtatgtgaatgcaatagctggacttatatctcgatctggatctctgcctaggacacacgtggctctcatgtgaagctctagctgccagcaattgtgacagtctgtttcccctttcttctgactccttttgatcaatgattacttcgactgctcgactgtgcacgcgactgtggaactgcggtggcctatcagtgcgcgtgctttaccatccaaaaaagcctcaatgccagcttgactcggaccacgtttgttacttaaatccaggcacgcacgctccggttgcatacagatcgcctagtctactccagattgaggtcataagttggctcctgtccctgtcataatttaataatatcagcccttcgaaagaccgttaaatcgctcacctccaaacggtctctgtctccccgcagcaccgcccggcaagtgtgagtgtgagtctcacgcttccatccgcccgccgccaagtactcccacactttttttttatgattaattcttgctgatgtgctaatgaaacaaggcacgttgctgtccctaggtagttttagtttggctgagcgcgattttgtctccaatttcacaatcacattccttctccacggactgttcccaaactttctttttctcctagtcgtgtcttcccctcccttcttacctttctttccttcccccacacattccatccattctatgtta

SEQ ID NO: 11449 - DNA, 355 bp, Emericella nidulans
ccctcccccccccccgccccccgcacccccccggccgcggccccgacccgggccccccccccccccccccgcccggcgcaacccgcggccgacggcgccggagcaccccatcacccgacccacgctcggcacgcgccggccggcccggcctcccccccccccacgcctctcccgccccccgaccccccgcccccccccccccatccccccccacgctccgccctcaccactcccgggggtcacctcccacgcccccgcacccacaccctcgccctccctcagccgcacacgtctccccactcgctccccagcccgctctccgcatcacccgcctctcccgatcctcagcgccgct

SEQ ID NO: 11450 - DNA, 555 bp, Emericella nidulans
gctttgaatactttcttacttttttagaagaattgaatggtttgtcttgactcctcattaagtatagccaactatgtgttctagttgcttgggatacaggcattttagaaacaaataagtggacttatttttccctccaggaatgtcatcatgttctaactgtgctgtttttataacaaacttgagattttcagactttgttggcaggcagaatcattgtagaaacaacagaaattttgggcccagtctttggggaagcaaatgaggtatccaacatgggtagtgccaagaaattaaggtcatttggaaaaaacatggtttggtacgcacttatagctatagttattgcagttaaacgtattactatatttatagtcaaattggtatttggatttctcaaggctggttgttgacctaaaatttaattgtgatggtaaatgttcaaataaatctaaaacaaaattctattactcaaggatggacactaagagacaaacagtatatcatgtattagtttttgacattttctcactatatagttcacatgtgcaaaat

SEQ ID NO: 11451 - DNA, 606 bp, Emericella nidulans
ggagccgcatacacgtgggctgatggaaaaggaggaagccgtgtatgccacatctgcccatactgcgccacacttttatcgtctatccctgctactattcggagacaagctggaactcaatgaataccactccttgggacgaccgaacatacgctattgctgactctaattacgtgttgtcatgtcctctgtgaggacggctcactcactatccgacatggaacgtactcgtgttgtcacgctaagcatctacatcgttcacgctctgctatcgagtaccatacccgccgcacctatgatttcagattaggtaccatcctcgaccgctcttggatactacgtactccgccgatcttccaggctccaggtctttaagacagccccctccgtattgtgtactgtaatcgatccattgccgttggtcttcaagggctaagttccgaatgacgctacctgaccgtaccactacctcctagtgggatcccgttgatttgcaacatgaagcaggctcgacactggcatcgtcttaaatccaatcctcgtatgacgactaccatctcaccgtgcggtaatcgcttcattactctaacactctctgtattgacc

SEQ ID NO: 11452 - DNA, 604 bp, Emericella nidulans
atcttaccggctacgctctgccatatcttggtcagggctatcaaaagaccagcgcattcatcactcgccctcacgcgcagttgggatgcgctgaattctggtcttcaatcgcgacgtcttcgcattattgaagactcggactatgggcatttgcggtgcacgagggagtctagacatgactgaataatggtaacggatggcttagagcggcttggtcatttgaccgagcatattcgtctgagaatctggacctagccttcccatgtgagcgcacattcccttgcagatgaactgagatttgtactccccggatgaatgtgctgcaattttaagcccatcgatcgtatggcctgcccaatgcgtgacaaggttaatggatgcactgtacagcttgcacaggaccataggttatgccaccacgtgccagacactagccgggagccctaagtacattgccagcttttgcaaattgtgagacgcgctcacattggccgtgcgcagaagactcttgactcgttgatcagatagtcttgcgcgggagctatcgcagtagctatgacctcgtgcgctttggcatctacatgacctgaccttcactagtggt

SEQ ID NO: 11453 - DNA, 99 bp, Emericella nidulans
agagcactcgtcacttcatgacacataaggaccttcggatgtgatacgacgctgcgagcaatcgctgcccgcttcatctggtcaccagtaaagagtgca

SEQ ID NO: 11454 - DNA, 170 bp, Emericella nidulans
ggtgccctgttgaatccctaatcatgttctctaactcctcaatcgagttgtatagtctcctgacgtcgtatgacctccattactttagtccccttgaccccagcggtatcgtatagcggtatcacttgcgctcgactccactaatatcaatccttggcgggcgtgatagc

SEQ ID NO: 11455 - DNA, 135 bp, Emericella nidulans
acctacctagctcagacccactatcatccaatccatagtatggaaactttatagtacctggactcataattgcgttaacacgagcttgcacacatggcttctgcattcataggataccatgtactggtaactctc

SEQ ID NO: 11456 - DNA, 3177 bp, Emericella nidulans
cgtctccaggataaacaagcaaaggttaaaatcaggactggggtttggaccaaaagacccccatgaaaggcttcgggggaccaatcctttggaggaagaaccaagagaaggaaccgaagccagaaaagacattcatttgattccgccgttcaggagagcctggtcgttgtcttggtgcaaattggacttaagcagcacgggaaggtagtagatgccggcgttgcagccgccgagctgctggaagacctgggacgaggagccaacaagcatgcggcgcaagtgctggctaggtccgccagtcaagagatcgcggaagctagtcttcttacccagcgcgccagaggcacggagagagtcgagggtgagctgtttctgaatctgggtttcgtgatcgtgaacctcacagccattgagagcagcgaggacatattcgccttcttcaatgcggcctttggcgatgaggtggcggggggagtctgggaggaaccacatgccgacgacgatgataataccgaagataatctggaacgcaatggggaagcgccagaccaagtcgggcgggccatagtgagatccaaagtcaatccagtaggcaatcgcagtaccaatggcgatgataccaccttcgatacaaatgagtagaccacggttgctggtcttggaacattcggcctggtaagtagggatggtggaactgtagacaaatgttagaaccagcccaatagaggctcgataactgggaatcgcaacttacgtattcataccgttgccaataccggtgatgacacgaccgatgaagaactgcagcagggggatatggcctgggaaggatgtgacctggatgatcacgccaaggatcataacagcagcgccagacaggatcatccaacgtcggcccatgcgatcaccaaacatgagagcgtagacggcacccgccaggcatccgagttcgtagacggccgtcacgagcgcctgcatcgtcgcatcgtccttggtggctgtgaatacatcgttgaaggctacatcactgataataccagacatgacgccctcttgagcattgttagctagcgacccatttccagtcgactttccagccgactcaagaccaggcacttacggtcatatccaaagagcaagaagcccatggtcgcaacggtcgaaaccgtcaaggacagtttcctgcccgacaagccggcgaaatttggcggcattatggatgtaagataggtgccgtgccggaatggtagtatggccctctcccctatagactagatgggtccaagtggacgagtagatgcaagtagggaggcaattaaggtggtggcaggatggacgataaggaaagaggagaaaacaacaactccagacgcggagggggttaaggggtgggcgagatggggtatttctataactccatgcgagcaagccctaatacccttgggggaaatgacacacggaggcgagcgttcgctgcatgccctcgcctgagcattcaaggcaaggaaccaggatccagcaagtcacagatccacggtgcaggaaaatgatgccaattagatgcacacggtgtactgggtgtggcgacgtgaccgatttcgtccaacaacatcgtcagaggcccaggactctggagcagaaagagtactctgagcactcagtgctcggcatatccaatactcctacagtggggcgcacgccgattcgcaagcatccaagctgtgggctaagctgcctaagcattgtgcttgactccacaattacatcaatcccaggacaagaattttcgaccagaactcctgcagagtaactggcccgaattctcggtctgcattcatcatcgccatgtcattcctttcccttttaattaccccttgcgcggcatgcgggacctgtcgttccaagttggagataaaccgtattagttatctagcataactttccaatatctccaccattttgcaggtatactctgagtaataccgggattggcttacataaccgctcggcatctatcggcccaagcttgccattggaggtcgagtagttcttcctcgggactcggtcgggaagccgttcctgccgggcggtctcttcagcatgtgccttgaatgcacgtcattattatcactatccatcagtattgccggttggaactagtatccaatgaaagcagtagcgcagaagtttattcctcgaatcctcgcctttttcagccatgggttgaatgtcaaagaatatcctaagtatactactcgttttgcctgctgacagcgaccctcgtcattattattcgtattgccgtggaaatggacaaaatgagcatcggtttttaccttatttatcgtagtcggttggttccagattacagcgttagaagtatatgccacgagatatcgtccccagtctagttatattagatgctccgtagctccgtatcaaacgggcctgggtttgaggtggcagagtgcatagaggacataaaggcccgtgagggcctcgaggttgaataatatgacatgtatcgatgtaccgatgtattgatgtacctcaagtccaaccttaccgtatctaaaccgggcagatggactaccatgaagatacgtctgcgtacgaacacttgagcaatagatggttaagacagtctgtctagcctcaggccagttaatgctaaaaagaaccggccgtcagctggaacaaatcgatcgtcgaaatggtacgtataccgtgcagcagtcttgatctctttgcgtcttgtgacaatccattcattcgtaattatgccaccttctgatagtccccgcaggcgtagtagcagcatttccatgagcaagtgagaagaagaacttaaatctcaacgtaaactggggaacctcatcaacagttaagaacatcgtcacaaaatctcataaatgaataaacaatcacgcaagccaagaccctaacaatcttaacagcgataagcccatgccgagagacgaggataagagctctttttttggtttaattagcggcagtttgcgcaccggctggcaagtgggctggctgtggacctggaggagaaccctcggaaaccatggtggagctctaagcgggaagacttttttgcgatggtgaggtgatcactgcactgatcattgcttgcgatcgacgtcatccgtctggggttctttaact

SEQ ID NO: 11457 - DNA, 3712 bp, Emericella nidulans
cgacgctttcctcaatttcctgagttctggagagtctgatccagttagatttgtgtcgctgctttcgttactgggagagagattcggccctagtctcgcctgatggagttactaccgatccctcttacaggtccataccagggaggacgggccaccaaaggaaattgatccagactgtaatttcgaagccactaactggttatacaagataatcacgtcaggatcgtgtcaaaatgagtgccacgttgcagactcgctaataagctgaatgaatcttgtcttctcatatcatgccctgataccggccaatgctagccaggatggagtatatgaggactggtcctgagagggaaatgctaatgataatgggtctttaattttgcttgtgattatgactcggacgaccctggtcggttgcgccgggtttcagggtgtgggatatatggtttccgccacacagttttttttctgagtaaattaggttctcagggaatggaggtagaatttgattattatatatattatacccatataaatcactatgaaccaatgtgaaccaatgtaaattaatgtgagcgctgagaagtcatttatgtcctcatataagcaaacaaatagcaagctatgaacttcgcttgcccatccttatacgaaactgtttcccatgaatatacataaaaatcgtcgcagataggaaggcggaatgaatcccagcgatgatcaagaaggtattgcgcggtccgcaagccttgacccaatctacaacgaacaaagagaacgcaagcccgtgggtgtctataccagtcagtcccgtatagggtaatatatcctggcaaggaagacttactcttcatcaaacttaggaccacctgtgttccgatcgcatccgctttatggcagtctagacagtacgtcaccgcaatcgtactccccagtatacagccaaagtagatcgccccaaaacagagtgttgggatgaaccagtgagtgcgaagctgaatgctccagccgtaaccggcgagtcccaacgttgacacgagtattgctgggatcatcatcaggagccgggactcaggctcgtacacgccgttatcgcggtatgccttgactttagcaacgatatcagatactttcccgccaataacgctgcccaagatcgttcctattagaggactgagatacagcaaaccagcctgaatcggcgtaaacccgtatccgcctactgactgaaacagatgcgctatggtctcggcgagcacggcgagccagcccagtgagagggcatacaccgtggcggaccagaggaggggtggggagttgagaagtgccaggggtcttagtgtgaggctaacccagccagccgaggagagacgcccattccatatgctgagcgtgtgagagaaccgtaacggaggcgagatgcggaggttctctgtgtagagttcgcccggcatttggggggttatggcgtcttcctacgtgttattagtacagtttgaatggccgtgtgaggagcgtaccttgtagtctcttgcccagtacgtctccctcgcaaaaaggaataaacaggtgaagcaggctcccgacgcaatggtgagtatcctgttactatcagcaatcattcatacatcatcatatgagcgcgaagagaatagacataccacagcacccaccgccaccctaagcgttgaatgacccccgccccaatcaagggtgatagactctttccgccagccaagagcagcatatagatgcccagtctgaaccccctctcctgaggcgtatagatttctgagatactcaccgagacgagaaactcgccgggcgctgcggcgaagccctgcacgaaccgagcgagaataatactcgtatacgacggactagcagcagcccaagcagaagaaacaataagcaaagcagagccagaaacataaacgaggcgtctcccgaagagcattgcggttggagaccctatcagtgcgccgaaaccgaggcccagcatgtagatgccaattgtgaaggagaccttctgcaggtccacgccgaatgaagacgatatagagggaaagcctgttgccagaattggagcaagagctgcagccagaaagctgttgataccaactgcgtaaaggagggcaccgcgtctccaggaaggccagttgagggggtcgttcggggaggagctgttgttggtaacagtaggcgctggggccgggatcaattcaacatctgaagtacgttggaatagggaccagcgcgtaccagtctggacgctggagaaccagacttgcgttcctggggagtgatcagatatggtggcagggttggatgaaacaggcgacgtaccaggagtgtgggagacatcctgctcgaggacttttatttggcctttgatgtccattgacagtgaattattgaactttccgagtaggactgcttacaggttgctgatactagtccagacctgtccttgggggttggttgattttgaatgaaaagacgtgtctatatgtatgcgccgtcggttccaaggttagagggcttgctcaatcggctctagatcgttgggcgctcgaacttagcattccttaccttagactggcctagaccttacggcttttcttttgactgttgaattttagccatttcatttcggcttgaaataaggtggtgctgcgtgagtaccacccggggcagccctactcacaaggtcccctgtttctctcaactaattcatagcaaggccaccaacccacagctccgaattcattctgcaattcaatacctggaaggagacccaaggatccataagcagttatggcgtcgcaacattcccttgatctcccttgccctggcgcataatgcgttacaaactggtggcgccgcagctgaccatggcacttgcccagcaccgcatagaacaacaagaggttcacgtgttattttctgcaatatgagactatatgtgtctttatcgccgctcgatcacgagatgtaattctccaaggtccagcaagggacgtgacgaagaggaatgcaacaagtgggttggcaaccaacaactggggtcgaagacaccacagaaggatgttctatacacaccaaggggcgaataggaacctaataggccgatccagactataagctcaatgcttagctgtgtctagacgagaaagcttgagtagcatttcagtcggaaggactgcgatgcctacgcccccttgcgtcagggctgatccagcccttagccaggcaatcatgaatcgctcgctaggattctcatctgacctggtccctggagaagcctgctgcgataagcagtctgggacgagtctggcgttataagcaaagacgatgatttgtgattctgaaccgtcaagctgggcaggggaatcgagagccatatacagtaccctcaagcagagatcattagatggctgcgtaatttgaaagctagtttgcactttcattccacaaggatcggtatttagggccaatgggccttgctgtggcccagcagatagacagccgaaccttttgccataagccttgggtgcaaggcaatcgtgctatctatggactgagtggtgctacccaggatgaggatgcttatttgtctctatcccttcaataacagcatggtgcagtcaccccaggaatcgaaattgcgtaccggcatgatttgtctagctaggttttgctgctcacccca

SEQ ID NO: 11458 - DNA, 100 bp, Emericella nidulans
aggctagaagttcttcgatgcgctccactgcaaagctttaatactagtttcggcgtcgcactgatagggggagaaagcactgagataaaacacgtgtgat

SEQ ID NO: 11459 - DNA, 705 bp, Emericella nidulans
tacctgaacgccgatgttaaacatccccccgacacccatcaggggatcacccacaagatcctacacgtttactgacatgacactactaccaagtgacctatttcacatccctggtatagctgtgtgtgaaatccgtgggctctttaggggtgccggctatgaagaccatacccagagacccattgtcgggtctagtatccgtaagagcaatctaccctacttcgacacgctagtcaaagacctaaatcgcattattgacgcactacctggctctactaacgctcatatctgagactgtaggcccctatatagacctcttcagcccacctgctggctcgagtaccacacacgatttcatgaatctgatcagggagatcgacctgccctcttacatataaagtagcttgcgtgcaatatgccatgatctacccggttctaagccacacgccgactgtatgcattttacgaggtggaccagcttgtctcacagtattcactcaccgagctgtatcaactgccctgagatgcttgtctgaactttcagtgccgtgtacgcgttctgactacgtcagtaccgagtaggtgcaaagaatggccttacttcaacgcggactgtccgtataccaccacccacttcatatcaatctaaagtgggaacatagatcgtgtgatgaaaggaacacgccatatttcaaaggctaccat

SEQ ID NO: 11460 - DNA, 676 bp, Emericella nidulans
agcctcgttgcccccgtgctctaagaacactcctatgagccgactcgtgggagtgtctggcttccttttttactgtgttcaacacgcaccgtatactgactgactatttgacagctgagcctagcccaaccgaattgactcgattgtgaaagtaatatctacctacggatttgtcgagtactcccgagccgacctggggttgtggctcgggcctcatctggctgacgacattgccgatctgaacactgaagctgccggaggtgatgacgactcactcttccctgggagcctaataccctgaattggtactaaaagcgaacatccgccctggcactaacatccgtaccagaggctacgttaacgagcgagcattgcgccgcgttcaatcggataggggcgacaagcgcatcccatacggtccatatatatgcctgcgttgtgctatatgctgctagttaatggctagcactatagcgactatacccgtgtacgcgggcatgagttaaggagtcaccgcgctggtcgtatgcctattacacgcggccgggaatatgactaagagttgcgtccgtgctatacataacacagaatgcgtggtcatcactgctatcatatattgctgcacggcactattgcctgcatacgacgagggtggccggtcacatagagccctcac

SEQ ID NO: 11461 - DNA, 130 bp, Emericella nidulans
accgacatatggccacctggaggcaccgaggttctaacgctagtagcagatttcgcatcaatgacccgtgaatccgaggacgtgctcttcatacacacgatttaacacacaaggaccgtggctgttgata

SEQ ID NO: 11462 - DNA, 397 bp, Emericella nidulans
atattctcgagaagttgcaatgatcttctttgcttgctcaacctccgcctcggacgaaacaacgtttacaagaaccgagtagaggatgttcttgaagatcttaacaccgtcctccaacttgttagctctcatggcggcgtaaccctcttgcaagtcgacactagcaatagtttcaaggtccctggggatggcgggcagcactttccggctgtcagtttcgtcaacagttcgtcgaacatagttgacaagcggggggaggccgggagttgcagaaagataggtcttggaggctttgaaaatttcgaggaacctaggcttgagaggagcaaagtgaacagctccaacttggcggttgagaagctgcatcgcggtatcgaaagaaccagcagcaacatga

SEQ ID NO: 11463 - DNA, 4184 bp, Emericella nidulans
ttatttcacggccgaagatgtttgccagcattattaggtttgatttgtgccagtgtgttctgttcattcatgaatcagtgaatccttcctgtccattcaatggtgtaggaggcaaggcgaggtaccccgttgctattccgtttatgaaaaaccacacctctccttctttgctaattccggtatcgttcacagcctctgctcgcctctgggcgtccaataagggagtcgtgcctatttccttgccatttcggtcgttcattcagtatccacgttatgagactggttacgatgccaaaagagatgtagaaaacggcgtgcaccaggcaaggaatggcccaaagagtgataaaggcgaagggaaacgagaggagaagggatatctggctagagagaaggatgatttggagacacagatcgcgcagattgcggtaagtagggtagagttcgtcgaggggtgaggcgagagggtgcagtggatatatcatgtttggaagcagaggagaaaggaagaggacagtcaggatgtcctgggctgtgagaagaatcgggttggaggggatgtcgtgggggatcgtgaggaaggaggatgttgcgctggccgtggaggggggaggattggggttgtaggatgccattgtaaaagaatctggtaagtgttgggctctctggatgcaatcgaacagctaagcatcttgttatatttaatctggcagagacggattgccattatgtcatgactagatgaacacttttgtatagactggaaactgtggcgtgaccccgaccctgactgtgcctcctggtgagtttgccctaagtcaacctacccagcttcctcctttccctctcacgctttcagcccatccaggctgtcaaacaccactttcatgtctaaaattcggtcagtccctttctcacattcaaaagaaatattagaactcactctgcggaaaaactctccaactttcacccttctcgtccaaaaacatcctaaacccaccaacctccttcctgaacaactccccctgcataccattcgcccttctcaaaccatccaaccttcccacaatcttcagcaaggctgccgccgccgttgtaacaattgcccgtccaagacaagcatgtgtgccccatccatgatgaatatagagctgcaagggccgatcaagtctgatttcctcaggattcggaaacgtgtctgggtccattccggcggaagcaaagtctgcaaagacagtatcgcctttggagatagatttggtggccgacccgtctttgagcgttgtagttgcagtgttgcaattgcgaaggacgccattggcgggagttgagaggcgaaatctggatacatgttagtgacaagaaatgatgaggttaagaaagatagagtgatacccttccaaggcatatctcttcagcttctcaaaagcctcaggcttgtcggagcgtgccagttcctggattgcaggccagtgcgtgaagtaccggtctgagaggtagagatcgagcatttgggcccactatggtacgttatcagcattataaacgtcacaaactggatgataagttcgacgtgatgcttaccccagttgcttgcgttgcgcaggccgccgcggccgtaggaatgatcatccaaaccacctcttccacacttttcccgccctctctcaacctcttcactagttgcggtccgtacccgttcatgcttaagccgctcgagttctttcccccggaaatccaagacggcctgttaaagaggtatccagatgcagaagcaagcccgtatccagactcagaagtggcagagacaacctgagtcatgatatcgcccattcgctgggtctctctatatgcgacaacgcgattcttacgtgattgcactgggtcaatgtccaggaagacataggcgaattgtgcgaaaagggcctcggctagttccttaggtgtgtatgcgtctgtcgtttctaagtgcttattgccactaccgttaccattgtggccgtccttgggcttcagtgggatattgaagaattccgagcagaagtaggcgtgggcgaggttgcagacactgtgcgttacagttagggctttctgcatgcgctctagagcggaagaaatgaagcgtaacgtactaacgtacaatatcaatctgacaggacgaactccccagccgcatactgttcctccggattaagatccgcagtgatggattcatagaacctccgaacttgctctagggcatcaggaaccctatccagccgttccgccatgaaagtgcgctgctccgagtttgccacaaagtcaccgctaagcatatagtcgtgtttggtaaggcgaaaggtgtttctgttcccttcataccaaccagttagcggatatatgaaccagggctgaatatgataacgcaaggcaaggtaagcaagcatacatgggacacggaacgccttggggttgttcaacaactcaacaacgcccttccaactcgtaatagccacaggaggcctggtatactcgggcctcttgaactccagcgtgtctgcccgtccatatttctcaaacacttctttattctttgcaggtatggtaaaaggatataaggcgtagacgttattaggttcgtaccaaccaggaaaagcacgcatgaggagcttgtacatgacgccgccatttgcgacgtcggggtccgactcggctgtgttgaacctgtgtgttattagcgagtttagagttgtttactgtggacagctcacccgaaattcgtcagattcaccggactatagtcaacggtatagaaccggtcgccccgcacaagggcgacagcgtctgagagaatggcaaacgaaattgtgaagccaggacaaagacctgcgccggggaggaagggcttcttcgcttcctcggcttgcacgccgacgtagagctcgatattgtcgggatggccatagagtgcttccactggtggttgttagcgtatcgtctggctctatcaggtcagggaagggatatcggtaagaacgtacatgcttcagcgactttcgggtctgagttcacgtccgctttagcatttgttagtcgctgtagtctgagaggtaaaacaaaggggaagaccaactgaacgttgaatgtggcttcagcttgaagaacgccctcagctcattcaaagttgccaaaccccactccctgcctttctcgatcccgcgcatttcgatggctttcatggccttgggtacgttgcgggcgccgaacgctcctgttccagtacttcagtcggctcgtgtctattgacgacctgaggataagaacgcaccggcgactttctcgcatccatcatggagcaatttcacaaggtccttatccgcgaacatcccatcttttcctcgattcaagtccccaaacgtccatgtgtttggctcgcccggtgcagtcttcccaagatactcatgcagtccatttaggtatctttgcacagacaatgtacctgcatcacattcaatagtcagtcaagtaccaatagagactcgagaacaggataattccaagatgctgggctcatactaggatcaaccttgctaccgaaaaccctaatcgaaagctcgtttagccatttttcgtcttcgttactggtcgtcgcatgccagcggtatatcatattaaactcggccgagacctggttccccacccctcgtggtaagccctccgagtcaaaaacactgagattcttgcgtggatcgagcttccagtcggagtttgttggattgtcgttgagattaaggatcgtccggaggtagtcattcagtattatggagacgtagaggccgcaggttaccctgttccccatacacgcgttagccttgtctatatctgtggtcgtatttgatgatgagggtataatgtacaatcgccccgtctgaaacaaatcctcatcccgcttctgcaacgcccagacataatccgggcttttctcctgcccaccagtgggcaaatcaaatctgccggcctcgtttatccttgcaagttccgtgacaacatagttatggaaccggttaaacgcgaccaagagtgcacatacaccggggggctgcgagagaagccgcttctcggcgaatgtgtcaggcttcaggaggccgtcagtgaaggttcgaacttgggtctgctccgcttggttgtgcccgtagagcggaccg

SEQ ID NO: 11464 - DNA, 329 bp, Emericella nidulans
ttttgtagtatacaactatcttgtagtacggtagcggatgactgtgaactgagggcgtatacttcggagactagtgagtcagcaatgcttaagtccgtgcgacccaatcactttcgcacagattttttcatcaagaaattttcttcgacaatccgccaaacagttccagattccattattgtccgctatctagaaacgacccacgaggatgacctaaacacccaatggcagttcaggtagtcatcatgaatcatgggctcctttctcgccccccaccgggttgccgccctgaccacggcagctctctcgtggtttcttcgggcttccaa

SEQ ID NO: 11465 - DNA, 560 bp, Emericella nidulans
gttacctctgctacttggtacagttctcatccatttacagcagttatatgaagaggcagtgcaaccatcgtggattagcaatacactgtacttgggcactgatgaactatgccgacctggggggaaatacagtctattgggcagagatactggagtgatgcagttagaagaatcatggtttcgggtagcaaagcaatccacgtacgggacggcaggaaagaggtggtctagacacgaggttaagatctatatagtatgactacttatagaaagaagccaagaaacaatcataatgttagaatgttctccgttgggatttatacatggaatgggatagcggccatgcaatgcagccttgtatggggaaaaaaaggaacagtagatgggagaatcgggtgggcaagaagaaggtacaataggaaaattgccaaagcaaggcatagacggtcaggacaaaaggaaatatgtgatataatataccctgggtttccatcatgcagcagggtgcccagccaagtaaacggggcggtacagtcctgaaatggtcatcacgcaaaggg

SEQ ID NO: 11466 - DNA, 674 bp, Emericella nidulans
agcccttgtgcccacaggtctgagacgattgatgagagcccactctctggagggcaagaccgcggctcgcaagattgatgctcgagcatggcgtcaactggtggacagggcgctcgatgcctggccgaacaccgaacaactgtgaacgtgcctataatgctgttaggggggagacttatgataactcgctaaaaaggtcggcacgacatgggtgccagaccgaactacgccttctagatcaggcggaagctgctgtctggcgctgggaccctggcggggatacaccatactggagcttccatggatgccagaattgacaagactggcaatacctgctgtttctcgatggccgcggatgctgcaggtaagccgactgatggcaccctagctccgaaaaagctgattgagctgtgcaggaccaaaactagccactgagcttgtatgcctgatgacaaatcatgacgatcgatctacaaatgcctataccagggacatggtgatgccgatgacgggcgacctatgcctcatgacagatgacgtgatgggcctcgatgggctgtgactctactaccctggtgaccgcctataatcgacacatgactaagcgctggctatgctaccttactgcttgactacgcacacggacgctgcctgtatactatactgctagacct

SEQ ID NO: 11467 - DNA, 1989 bp, Emericella nidulans
ctccccccgaagtttcgaagggacagaggtgtttcaaagggtcaatattgtggctataggttagggaacgataaccgccggaaacttcgtcattgtagttgggatggtatcgataagccctgaatagtttgagcgggctagagtagggtgtgagtttacggtgcgagtcttcggggcgtcgtgaattctgtgtacaagtcagcgtccacaagtcctggtaggaactgaggtttatcgcacatccagagggccaatctgagaatgttggcttggttgctgaaaatccagttcctggaatttcttagttagtggctcaccagctactttagattgatcttctgaaggcccagagacttccatgttcggggcaggactgtggaaatcagggctgggagctggtgagtaattcgaatcggaagcattagcagattcttcaggttctgggggctcatatgcttctgagacaggagattcccgagaagcaagactctcagagtctgcaaataggtctttgttggttgagggttggagattaaaggactggtcttctgggagaggttcctcctttgcttgtaaccttgctggttcaatcgaaggtcctggaaagatggtatttaagtcatccacaggtgcaatcgggtttgtgttgggttctggcgcatcaggcatctcctcgttcaatgaaccagactcgctgctcgaatcagccgaagactcgtccattcaggagctagagtcggacatggaagtatctgttagctcttcggcggttgcgttcaggttcgtagcatcttccacggtgttaggggcaattggccgatctttcccaggtggagggtttttagcagtacggtcggtatgctaggtaggcacagtatcttcattagttgacccatcagcctcaggtacctcggcaacggccatggcatggttgtcggccacctcgttctcagaagtgggagctgtagcgtagttatggtgagtcgttgtatttgactgctgaaattcaggaatcgataatctccaaagcataccttggacagcttcgtcaggcaaatctttcttcgcttcgatggtactcagtgccgaatcaacatggtcaagcgacaagccagaaacctccaactttagagcgttgagctcgtcgataagctgttgtcggccttcttcccctttcgctagttctgacgatagctcttccacttccctccgtgcattggcaagtttcatctcagtcttgcgaattacagcatccagagaaggaacacctgcctcaatttcctgcatgcgtagaatcttggacctcagttgtctgagtccatcagcgttcatggccgctaaaaggtcttccgcttttttttccgtggcgctcggcggggttgggaacgatgatggggcaggtgcggcgggcgtgccaacaatatcgggggaagacaagtctgaagcacgaggggattgagtacggctggctagctttgccttcttcctttgctccagttcggcgatcctccggtgcatagcttgaatctcaagatcctttttcttaagatcatcctgttcgttgcttttatgattacccggagtagagattacggaagagctgtagctctgagacgtggccggtcgatgtggaaggtttcctgccggtagtggatatgctcgtggtaatccctcagcaaccggtgggccagtgccttttgagagacccgtcgatgcttcaacatccatgctaccctcgtcatcgtcatagaattcatcgtcacttatgtcgataataagtcgctcaagaggggtctggtggttcgtgccgttggtgaacgcttttttgggcaccggaatcggatcgtcatcgaagtccgacgctcgagggcgtttacgttggctagagcggggttgagctgccgaattcgagactgggtctggacagtaagtagtgcaccgtttgtcggcggagcttgccccatatgaataaccccgaatatgggcaaa

SEQ ID NO: 11468 - DNA, 109 bp, Emericella nidulans
gtcaataggtgatgctcatctcgacatatgtgtcttttatgtgtcctttgtatgtccgggccaatgacagtcgttgaattcacgaatcatgatggtgtaatcatgcttc

SEQ ID NO: 11469 - DNA, 1778 bp, Emericella nidulans
tctacccccacttagcttctttcatcccatactttgcctcgaaattagctgacgagaatggccgttatagcagagaggatttctacggtgaactgaaaggcatgattatggagacatattgcggttggcttgagactgtgcgtatgaccattccaggtgcggcaagctcagcgaatactcttgacccaattgggtgccgccatttaggctactggaagaaagacttgggacacgaggagtgcgaggggtgcgatttgtggaggccgatatatacccttgtctgccccggttgcggcgttaagaggtgcgtaaggtgcaaattcaatgaagctgaataatccgacactataagttaacctgcactgtaacatgagaggcttaagaaggtgcaagaggggctgaatagtatactaaattatactattccattagtggcttccatgacttcttgttaaattgttcgtctggacatatatcattgttgatcctgcttaaccatgtacactaccaggcttgtctgttggcctaagcatgggccaaaaggcgagtgtgacaattgagtaaggcaaccaaatcgaatatccaagtgagacagagtaatagatatccaccaaaaaagatgatgattatattttgtccccgtgcgctagccaacaagtggtattcagcgcgaagctactcctatcgtccattactacccagctcagctcacccaagacaatgaaaccagaagccaatatcatgcgttctttggctccacctctgcaagagtagccccagaccttgtagaaaacctggctaacgcctcatcaagcccgatttcgcgtgagatctcagcctgtcgctcatgatccgcaacggccgtgccctccgaaccgaagataacgtccatttcctcgagcgagacttgtttcgtctcggggacaaagaagaaaatgaacagcgcgccaagtgtcgtcattaaaccgagaaaaatatatgtgccgtatcggatgccggcgagcatgtccggtgtcacttggccgacgatgaagttgttcatccagtctgaataccgtctattagcaacgtacctagagaaccaaggagactgataagagacatactagccgaagcgcccaaactcgtcccaattgcacgcacgctaagtggccagatctcagcgatgataatccaggaacaagggccccacgagtatccgaagtggatgacgaacagccagaccatggcaacggcaccccagcctgcggcgcggtgcgactcccactgcgtttcgttctcggcgaagatacccgcgatgatgaagtggcaggctgccatgccgatggcgccgataagtaggatgggtttgcgaccgacgttgtcgacccagattacggctggaatctggagatgtgttaatatttgaaacggatagagggggtgtaaaaatgatgggtaggctcctcatctgtacaaggaactctttttctccctacttccccttgtatgtcgagttcctcttggtacttctctcccaacatgtatcttataactctctttggtctccttctcttaccctccattttactgtctttacttatccttttattatttttgttttatctctttcactctatctaacatttctccttttctttccatttcctatattctcattcttcatctcctcatctctaactctatacttttctccatctctgtcaatcacatctctatactttatactttcatcatcactacctcttttacttcttacttccaattttcaatccttg

SEQ ID NO: 11470 - DNA, 198 bp, Emericella nidulans
gcctccgacgctgctgccttggaccacgcctgcgacattatgcacgacgcatcatttgtttgtatctcctccaatcacgctctgatgaatagctgggcgatcactgccggtatccgtgtaattccgcccgcggattccggaagtccactctaggttacagccgtcctcacgggatagccacggagattttggcgcctg

SEQ ID NO: 11471 - DNA, 1954 bp, Emericella nidulans
aagatgagatgattctgatgacaccacaatcgcaaccgtctttctcttcttgtcagtggccgctggggcccaacaacaccgcgtgttggaggttgactgggcgttgttgtctctgcctggctcctctgttggttgcgagattccacctcctccgaccagcgggaatggtcctcgaagtcgcctctaccctcctctcgaattgaagtcagagcaccacccacaaaagcccctgccgccgcgacaccggcagcaaccctcttgcttgccccgtcaaagatttgctgtggactaggtgtgcgccgaagccgcccttgcatgcgagccattacactagcatcctcctgggcaagagcatctgaacctgtcgctcgggcgtagtctcccccatagtcaccgcgcgggaatgacaccccactaggggcactggcaggttgatcaccggctcgggtgtcatcgtgatcatcttcgtcgtcttcttcattgcgctcagtccatatccaagccgcaacaccaatagcggcaataccgacggtcagggcaagaggtgcccagtatcccatgacggtacgccgcccactcgagctgaagccggtacccacccgccgatggcgagcatcctgggaatgaggcatcgcggtcaacgataacaattacaggctgcgcatagatccacgtcagtcgcggttggtcgcattcacatttcaaggtcgtcgaaggatcaatggttgcggtgggaggctggggcagaaaaggatgggaaaggaggaagcccagaactaagaagtatggggggcggctgggcctcggagcaaacatgtggctggtgccagcaacgctttgttttgccgcggtgtttacggctggggcgctgtttgcacggtttgcctgtattgcttagtcattcccctatcggcacgtgaggtaggcttgccttggaaaaagttgcggagttatggagttttgactcacaagcgcagaatagacgcgacgaatgactgcttctgtctgtgttacgagcactgcagacatgttatagtctggtcaaggtgcaaatttgttttatatgaccagtctccaccgcaactctctcgagagatcacagcgcacgttcccctcaaccccgcgggtgatatcagcatatttcccaagtccaccagcctttaatcccgtatactacctcgctcttccttaaagcctttagctacaatgccgcactccgttccagtgcccccgacggggttccaagcgctcattctttgcgggccgggagtttctcttaacacctttacttcgaatccggaggagtttccgaaagcccttattcctatcgcaaaccgtcctatggtatggtacccgttggactggtgctatcgcatgggtatcactagtatgttgagacctgcctatagcaccatataccaaatactcacgaaaatttgcagatattactctcatcacccctcctcccagtcaagcccctctcgaggctgcgttatcacaaaaccctcaccttacgtctcttccatcgccgtctccctccattctcgcacctgccgacttgactttgacaacgggtaccgctgaactgctacgtcttcccgaagttcaagcatgtatcaaatcggactttcttctcctaccgtgcgatctgatatgtgacattccaggcgaatcccttctcgaagcatggatggtattgcagagcgccctgggtggctcaacacttgctggagggtggaacacaaacggacctaagacgataggcatgggtggtgaagcaggaggacgccgtggcggtctggcggtatattatcagacgaagggaagagaggaaagcgtgaagggagaagtgactgactttgtcgctaccgcgtgtcttgaacaagacgaagcccctgcggtttcccatcccacagacggaccagctgcgatacgatatgggctttctaagttg

SEQ ID NO: 11472 - DNA, 292 bp, Emericella nidulans
agcagcacgttgcttggagggtgaaaggctgatgtgttgtttattgctggaggacgccgggtgaatggggagagaccgagcagtggagggcgcgggaactgtccggggttactctgtcggggaatgcgaggggaagtttcacacggtgattcttacagagtgctttccacgctctgtcaatttgcttatcatactgcttaactgtctaacagagtctcgcattttcggtagtaccggtgacccggggttctctgcacttcctgaattggccgagctgctcgtaccattacat

SEQ ID NO: 11473 - DNA, 2608 bp, Emericella nidulans
tcgacacgctccattatggagtcattccaaagaccaaggtcaaggaggttgcggcgaattcgcgcaacaccacccggctggtcatcgtcctcaggctcgttgaatctcacgagacagatgatgcgtgcagatgtgctgtcaacgaggtccttgagaaggaatgcaccgagaaagccagtcacaccggtcagcagaactgtcttggcgtctgtgagggagcatatcttcgcgtctgaacgaatttcttcgtcaagtgtggcatctgtgcgaagaactgctggtaaatctgcctgcacagcagcagtgtggccgtctcggatcgctcgcacggtatccaaatgaccgctcagcgttgaattttctgccaggcgtacgatggggatgcggaaaccgaatttccgcgacagctagaagagaggtccgcaatcgaaagcgagtgaccaccgagatcaaagaagttgtcttcaggcttaagcgtcgctttgggaaccttgagcgcgaccgcccagattgctgcaatgtcctcaatgccgatgggatcttccttctttccgttcccgttggcgaggacttcggtcgggggcggaggaaggcgtttgagatcaatctttccggacacctcgtgggtaggcagttcatcaacctgcacccatagggcgggaatcatatagtgagcgaggaatttggtcagggctcttcgggcacctgggctgtggccggaggagttaatctccacggttggacgctcctcagagtgttcctggtcggcaacaatgtatgccaccagctgcctttccaagccctccccgtgtgcaacgacggcacactgtcggaccgcgaggtgcttgacaatatcattctcgaccttgcccgggactacggaatatccgcgcagcttgatcattgcaccaacgcgaccagtgatctcaagaagacccgacggcaacatacgcgcccggtcttcagtgcggtacatgacagctcctggagaatttgaaaacggatcgggaataaatgccttggcggtcgtctctgggcggttgatataccctcttgcaagcatgggcccgccaacgcagagttcaccagaaactccctcctctaccttctcgccctgctcgttgacaatgtaggcgtgtttggggtcgagcagaggacctactgggcagtactgggattcgtcgcttacgatttctttgatatcaccgcacgcaatctcatgggtttcgcatgcgctataacaattgagcagtcgggtgttagggagtgccctaatcgcccgtcgcgctagatcagtagtaacgacctcgccgtttagccacaacgtacgcagttccggtaatcgagctccgatatcagagtgtcgagagaggatagtggcaaggagagtcggggtcatgagtgtttcggtgatatgcctcgaggcaagaagatcgacaagtgccgccgggtcatagctgtggtcatctgggacggcgaccaccgtcgcaccgcggatcaagggacgcaggatttcccagatgaagaagacattacaagccacgcgatcgcccggttgaagatcctggacgccgaaacgcaggttatatgagagaacaggagctcggtgagggtttgcaattccttttggtttaccggtagtgccggacgagtacgagacgaaagccagccggtccaagtcatcgtcaaccggtaacgggccgggctcaacagtatggccattggcgtcgacagggggctcgtcgagactgatgacggggacgctgcccttaatcttaccggtctctgaccggtgcgtgaccactactgctggagtggcatcttcgagcacgtcggcaagcagatctggggggtacgccagctccaagacgaggaacgctccccccgcccgcagcgccgccaagcaggcaatgacgaaatgagcactgcgggggagtaacacaccaacgagactgtcccgactgacgccatagctgcgcagtcgccgcgacagttcctcaacttctttatctagctctgcataggtgtatgaggttttgtcatcctccagagcgagggcgttgggactcgcacggacctgctgggtgaaaagggccgaaaggtcttttgtggtgtcaatgatggccatgatcgattagcgatggaagcagaacgtcagattctggcaaccgattgagaacgaaaaaaaagaaaaattcaacctcgacgacggtatcggcggggaacgaaggctcttttatgctcgaacgctcaatgaaaaggatcacagtagaatgtgggatgagggtgcatcggtaggcccagggtcaatgcagacgaggaagttgcgaaagaagcaacgaaagaagaaggattgaggaattgggggtagtgaagtccaacgaagcagagaccgtgacaattggaaaggcaaggaaagacaaactgccaaagagctttatcagtggggggttcacatgccattctggtgtcgtgcttctaactgattccattttagtaccgctgccaaatgcgctaatttgatccacccaactctgcacaagcctcgagcgccaaatcagggcggccaggggcatctctccctgcgatacattcccacgactgattt

SEQ ID NO: 11474 - DNA, 507 bp, Emericella nidulans
ggccatgcaatgtgcgggacggaatgccttagtgggggtccttaagcaccatatcgatgtccatgattgcacagcgattataccatatcaggatacgtgaggcaagccagacgtgcgctgattagatgagcagtattaggacccgggggataattgctatttaagatttgcacgtgagctgtgtgccgtgttaaaattacaccatagctgctgcttcagctcaggagaagtgggttcttgttaatgtgacctacgtacaggcgacagaacataattcgctttgaatgtcccatgcgcctgacctgcttgtattgcatagactacgtagcgtccgatggcattccccatattacatatcaggactgtactggctgactgaatttaaaccccttgctaccaatgagcgagcaatccgacctagtcatgatggatggatgccaacaaattcgagtctgacctgaacatcaatacatgcattagaagaatgacctgattattggccaaatt

SEQ ID NO: 11475 - DNA, 2211 bp, Emericella nidulans
catgaatcctatctgtaaagggcgggttgaaatcaggagatggcccactgggactaaaggttggaaacggtgtaacttgctgaggcctgcgatgccgattctcgctcgctctgacaccggtccctataaccccatcatttgactcgggcgacgcttcagccgcagtcgtacttgatgccgacctcgcgcgtgccgactgagcccggggtatgcgcattcccggtatgataacactcttgtagacacattgcaaccgcagacgagtgcaattggcgcaggttggtttcgtctcgtcgcagcggactttgcgagctcgacaggtgaggcagcctgtgcggcggcgaggccctgaacggccgggtccgcgggctttgggcggtgcctagcatgttattagtagagaagctctgaagacttgatgggagtaacatacctccatttcggccgataactttgtttatgaaaggagaaatggcaccacgtggtgggggtatgttggtgttgcggggaagaaatccgtccccgcattgattacgcaaatctatacaaacacccaaaacatccgcagagtagtttgaattcatgttgtctatatagtttatttagttagaactatagcctgctgtctcccatacatttagatgtgtgtataagatggcctctctcgcggcgcacataggccgcaaaacacaccgcagcaagagcaatagccccgtagctgatataaactggatacttaaattgatcaggatcggcaaagaaaattgtcgtcgcgaatgatatcatttcaaaaacactttgcagtgccatctctgtcgccgagaaccgagctcggctactcggatcaatgttctatagatatccattagcattttctagaaaggaaggatgagtgacgtacctcctgcaccagaaattgcacagatagatcgaaaccccataatcccaaccgactcagcgctacacctgtaatgagacatcccgcaactaggcgaggcctgtcgcttgcaaaggcaaaagcagccactgcggcggccaatgtgccgaactgccagttgaggaaccacagccctgaacgtataggtccgatacgatccatgagcaaaggggccatccatgtccctgatatctccgttaagacggctccaatcctcatggcgctgacatctagcgaactaaagccggagtgcagcaggaatgtcaccatagtaggaccgaaagacagatcagtaaggtagaggaggctcaaggcgaagcaagctaaaaagactgactggcctacatattcccgccacggtgcgacggtcctccggatgtactgggcgaatatattctgggcaagatgttcttcaagcggctgttgttcgtcctcttcatcatccgcggcctgtctttcatggcttcgatctaactgaggaacagagtggtatacctatcattgtaagaaccaccgtcaaccccaatcacgaatggaggcttacccctgcaatggcaaagtactcaacgagaacgaccgtaacgttcactccaaggacagcccagatcgccaccttggtggagagcaagccatccatcagtgaaaccaccacgggagcgacgagcttacaaaaaagatcgattcgtctcatagacgcattcaaatctgtaaacatcagcttaagtgcgtgttaggaaggacttaggaccaatttgcactacctttcctggaaacaagcaatgtttcagatatcacaacagcctgatgaacgttatccaagcaattgaatattggaaaccatacaaaacatacccagtccctctctactgagacagtattgacagtcgcagctagtttctcgacgcccgcaagcagaaccagcgcgatgaacagcagccttgacagatgaccaggcggtgatctcaggagcagtcccagacaaacgcaagaaaccgcgacaggaatacgttgccatactattgaaatcagaatttgaagcaaaatagcaaattcaagactcgaaacacgcactgatggaatgtctaatggcagataatcgatccgttcgatcgacaagtgacccaagccatgacgagaatagcactgcaaatagcgagcgcactagagcatacaccgaggcgtagagcagagttcctgggaatatcgatgccaggaacacgacagcgccaaactcaaacatgcgcgagttccatgtcgacagaaagtgggaagtg

SEQ ID NO: 11476 - DNA, 435 bp, Emericella nidulans
tcgttgccccagtgaccggcacaaccagctcgttacggctatactcactatctgcttgcctgcgctagacagtgatcccagccttgctctgcgtggactaaccaagggaagaatacaggaccgtgctagcctgtctccttgggcggtgtcttatctatcaagagacggcacgtaatcttgagaccagactctccccccaggagactgatgcatccactacgttctgtgtatattcggctcatggcgactaggcctccatcagcaagaggcttggctaccctcagagcggaacataggcgctccggctgtcggcttgactgaatggggacttattcactcagacggctctgcctggccctgaatatgcaagagatatggtagacaatcgctgtcatttagtcgctcttccatggcgccaacagctgatatatgttc

SEQ ID NO: 11477 - DNA, 1813 bp, Emericella nidulans
  unsure (1)..(1813): unsure at all n locations
catctcctggaacagaagcggaacctaaggtcctcctcgcagagaacataagcggaaggaattcgatgccagggttcgtatgtggaggctccagaaaagacagcgcgtgaggtatgcaccagctcggacgaccacttttgtcgctcttctggcgtcaagtcatgcatagcagcttcagctccagcgttgcagtaaacatagtcatcctggttcacgcgcgagtcaacacactgctggctctagttttgggggattggggagagactgattgaacccaccttcacctccatccaaggcagatactggccaccgagcatacccagcaggctttggcctttatcaaggacaaaggcagccatataagcaattctaacaacaccgccgttctgaccagctgtttcgcgatctgcctttgccaggccctctaccgcactggaggcaaccacgccgccgtatgagtgcccgatgaccacgacatctttcccttccacttccaccagcttcttcaacaccgagctgagcgacgcgatgtcatctgcgagggttttatttggaggctcggcgccgatagaagggtgcgggggcgcttcagatggaatgcatctctccaaaagctttgcacgaagagcgttaaaggcaggaggtgtcagccacgcgccaatcgagaagacaatggtaggcttcgtcgccatctttttttttttggccttttttttttcgagaggactgaacttgtctggcgcctgagtcaagaccttctgtttaagaacagtgcgctcccgctcgctccacccttagcgggatttgatgcggacgctcaacaggactgcggccaactaaatagactaatactaactcaacctctccgagcttcacgtctggacaaatggcgtgcaaaggaatgggtgaattgcaccggatcctagacagaaatggcaaccagactgaatgccagtccagaggccgtgaccagaacccggggcccatcagccatatgtgcaggccgcgtcacgtctgttggactaacaagccggttgttttgccagggcgcctgcgagcctccatgcccaccaagagatctatccacagtgagtctgttggtggctaatgttggccttttaccgtctgtcctcttcaaccggcttcagatgctgagttttcctgactgacccctcagtcgctagatatttacctcggcccatcctttattatctcgtgaagaccaggattgaactggtgagatggggataccgtcgccggatcggcggatcaaggtagatgaccgcgatgactgcgaatggagaaaatccaggcacagcctgttactatggattcgcaagcaagaaggcgagatagaagtgccttgatcagcatattagctgcgttttaaagttttattcgaagaggcgagtacatacctatctgggcagaaatagacaggtgaggcgcccctgaacatatatataaggaaaatataaaaaaaaaaaaaaaaaaaatttccagtttcgtactacttcaatatcgtcaagcccagtgccgtccagcagcagctgtactgctgtgcttgcagcgtgcagtggcaagctcatcttcagcaggccaacatggttctttgactaagctttaggtgttggcacttggcctattgatgattgaagcccatatctggttactttcggctatggagacatggttactctgtagcctggcgacaccgtcttttgaacgggctcatattagccaatcatcaaggcatcaagtgtctgtgcgatgtggttgaacagaaagcccnaccttgggtcaggagatcatt

SEQ ID NO: 11478 - DNA, 1576 bp, Emericella nidulans
ctgcacttcagccagtacgagtatcaagtcacttggagaatgacaaaaagaacatcttgataggcagggatatccattctatggctgcagctgcaactagatgccttacctatcccggagctttcccgcaatgatacccctccttctaccattccaacccctcttttgcactcggatcctgtgccgtcttgcacagcctcataactacctcggcgtacgttgtttacctacattataaggcataccgctggttacatattcatctacatctgcagtcaccgcaaacaaaaatgtccaccaagcccacccccgtccctccatccctggcagaaacaatccgatcgaggaaatcgcaatactgtcgctttgcagacacccaggacttcgcgtcctgggcaaccgtcttctctcccagcgtgaccgcacaattctgcgatccccagggctctgtcgtcattgaaaacggagccacatattcattcgacaacagagaccaactagtaggtttcttcaagaggcgtttgcgacgctgcagacgatccatgtcgtcggcagtggagagctgcactttgtggatgggacagacgagcagggaatcagtgcgatctggccggttatctatcatgctgcgagtcatggagtctcaggaggctggagcggcacagggggaggccattattatgagacatggggagtggaagacggcgagtgggttatcaagagcttgaagtttgtgagagggtactggagggtgcaaatatttgatcaggcttgattaagctgatgttttgtccttttgctttctgtggcgttagtggttatggaggacagggctgagagcttcccttcaagctaatagctgtctaacatggatgaaattgtgccacatccaaggtcgaagcagcatcgatttcagcagcgccctcaaagatttattctattctcgatcaataaggcgtctgcacaatattgtctcttagacgtggtattacaaatacggtgttgtacaagatcgaaaaccgcaccctcccaccagcgcctccttccttggcggatagatcacaaccagaccattaggaacaggctagcaaagtgtctatacatgattggcctggtggacgcaaagtctgcaccagtgacatgcgcatcttgatatatttggaggttattcatcggcagcatcgaattgatcctcgttttagaccagccttgtcaatcatacagcagggctatccggattttccagggtggttgccggttatctcaatatggatgcacagaaggagacgtaaattgagatccaagttccgtcttcaggtttgaaagtgcttgccctttgtggctctttcgtttggggttggaaaaaggggtagatgttcggtaactgttgcgtactctgtcaaaggcagcaaagacgtctatatatagggttagggtcaaccgactatatcgggaactgccggggccggccgatgttgctgcgcagctggaatgcacttgccgcggaattattgatgccaataatacgactatgaatacagatccctttagtagggttaattcgggccgtattata

SEQ ID NO: 11479 - DNA, 1453 bp, Emericella nidulans
aagcccgacggcgaagagttacgcactacccacctttttacttcgtaagcgccggctcatccggggctggcataccgtgcgctggcaccgcgcacccggccttgatccgtccaatggcgcacttcctctactagcaagaaagaagtcgcccaacgtgacaggcttgtatttgccctccccaaggcggactacatcctcggactcccaacagggcagcatgttgccctccgacaaccgtcgatggaaagaccgtccagcgcagttacacgcccatctcgaacaacaccgaccgcggcacattgagcttctgataaaggtttacccaaagggcctcttgaccaaccacctagcgcagatggaggtcggagagacgatcgaaatgcgcgggcccaagggcgccatgaagtactctgctcaatacgcctaccggatcggcatgattgccggcggaacaggatcacacccatgtaccagcttatccgggcaatctgcgaagatgagtccgacaatacacaagtcagtctgctgtacgccaacaacggcgaggctgatattctcctccgtgaggagctggaaagctttgcggggcgtttcccacacaagttcaagatggagtatgtcctgagctttcctgatgataactggaagggatatagagggttcgtgaatggggaaatgatcgcgaagcatattgggtcgccggcggatgatgcaaaggtattgctctgtggaccaccgccaatggtcgaggctatgaagaagacgctggccggcatgggctgggacatgccaggggcaattgcaaacgggacagatcaagtgtttcttttttagaccaaatagatgtacaaatactagcattttattgtttattttaaaacagctaaatgttgcattagtgagtctttacgtacggtcaaagtctctaagttctggcaaccctttgaatcacagaggtatcactggagcccttccaagctagattgactatgaagccagcattagaagaccgagaaagaattgggaaaaaaaagtttctttgaaaataccagctaagcccacaagcaagtccctagaccaagcagcgtccgacgtctacaaccatcttaattccttctatgccgactgtcgcattgccccgatgaccgagggcggcggcaaggctgagaaccccaatacctagcgcatagcatcaagcttgaactagacccaggaggcgtgaaggatctgcgtccggtggaaccgtacaaagtaggcagacagtgccgccaactcgtgcgaattgtatccgaacaacgtccgaaggcgtccgaagggcgtccgaaggtctccatcaagatatcgtcatccatctcggaattcggcagcagcatagagagatacggcgtataacacggatggtagcagctgggttgtcccaagttccagctagcacatatagatgggacccatg

SEQ ID NO: 11480 - DNA, 574 bp, Emericella nidulans
cctgtgccccacgatcacaggaaggcgtagactaaaacactgtctaacgagatagggactcggacgggtcccaacctaccgcacaggtactgtggacattaccgtgtacactgccgatctaccactcgagctcctggagagccgctatgagagcctgaccaaaacctcaggacaccaatggttgtgcccatacccaagatagcgcctgacaagatatatggaaatccatagagcacagcccgggaccaccatagactgtttcttacctgcaggcgccggggctgaacaactctgcctcatcccgcaccaactatccatcttcatggacttatgcccgaaccgagcctgcacgctcactggatttcgcgagcgagcccacatccaccttgatcaacggtccggaccttccccccaagatattagacgtccaatcaggcataagccctcaaagaccaccccacggtcgcgccggatgcatacatcgcttatttagcatcctatatcgccgcattcatgctgccacgaacgtgtatctagctaggcgacgggagatctcaatacacggtatttcccg

SEQ ID NO: 11481 - DNA, 950 bp, Emericella nidulans
agatcgctatgcgaattatcaaaaagatcacaaaggacggcagccatcttcatcagatggtgattctgagccgcctagtgcgcctcttcagagccagtttcctgtcgccacgcaggcgccggaggtcccagtcgataaaaacatgcacggtgacctggttgcccgtgccgccagagctgcgcagattgcgctgcagggtcacgggctcagacgttctcagcagcaggcacagcaggcccagcagcaacaagcccagcagcaacaagcccagcagcaggcccagcagcaggcccagcagcagcaacaggctcggcagcaggctcagcaatatcagcagcagcagcaacagcaacagcaacagcaacaacagcaacaacaggctcagcagcaggcgccccagcagggcatccagattctacaaggatatacccccgcgcagcaaccctaccagagcagcccagctccttcaggatatcaacagtctcagacatataacttccaacagagcccaatgcagacaaacttccagcagtacaaccacccctcgccgtcgccaatacccggtcgacctaactcgtctactgccaaccacggctacatgcccggcattccccactactctcaatctcagccgacacaagttctctatgagcgggctcggatggccgcatccgccaaatcctcgcccagcagccgcaagtctggccttcccagtcaacgccgcccatggacgactgaagaagaaaacgccctcatggctggccttgaccgcgtcaagggaccccactggagtcagatcctggccatgttcggccccggcggtacgattagcgacgtctcaaggatcgcaaccaggtacaacttaaagataaagctcgaaacctgaagctcttctttcttaagagtgggattgaggtgcatactactcaaattcgtcacgggtgagttga

SEQ ID NO: 11482 - DNA, 1843 bp, Emericella nidulans
tcgggcagtatatttttatataggccacagatcttttgcaatcgggctcaatctgaccacaataagaccaaccttggcaagtcgcttattcaattcctattttcttggacttcagcatcatccaagcttatgtttccgccggagccactcatcgggtcaattccgaggttgtgctaagtgcatatattccgaagaaacttgaaccgggcttactcctaatccattacgcgctctgagctaatcttcattgcattgtttgtctacgcccgcctcttggaaaaatcggctctaaacatatggttgttctggggtgagcttttgaccgtaccggatattgcataatttgattcaagcataatacagacttctgcaacttcttaaatcagggtttcataagtcttgcggcaaaaaaacagctcacgatgctacccgtgtcgcgacccgagggtcatatgagcctcaattacatccctaccacccaatccatatctgggacttctactggtcgcagttctccgagtgatccatccgcaaacaccatcattaggccaccattcgtctcgtcaaacattcttaatggtaatacaggctcgataggaagtgcaagactaggggctggatccccttctcatgaacttggtgcccgcttatactctaaacggtaggtggcctttgagacacaatccacgtatagagttctctcattattgacgaatctggttaccttagtgcacgcgagatacaggcggaagaaggcgtctctccgttttggggcccaccaaccagcggccattccacgcccctgcgtgaaaatatccccgagtcacctagccaggagggatttcctgacctggtaccttcaacaagtggtgcgatgaatggaccagcacgaaggacgcgggctggcacagttccctctcgattttcgccagtcggtgttctgaatgaggcaaatcttcaacagcctttcgtttctcaatcttcccggcctacaccctccactagtcccttcagacctaccggcatgtcaggaatcgatactggcgttaaacccccaacaaccataggtggtggcagtacaggcagcctttcccgtcttcgggctggttcgatgccgcagcggacaaaccttcttgggtctgctgggcctttcggcccgtcgttgttttcgacaaattgggccacagggcgtgatcgggcgacgactcttactagcattagatcttctgaggggccagcatcgccaagtcaatcatcattttcgcgcgatggactcacagatagtgatgttaagaccttggactaccttggtctcgcagaaaccccgcagcaagctcggaccaattttgtacgaccgtccgtcgatgttttactccagcagcagcaacagcaacaacaacagcaacagcaacaacagacatcctcgcttcccccgctgctcgccgagctcgcgatgataaaaaacaatagtcgaattcgctcctactcggtcaacgcaaaggagaaatatgccgatgacgaggaactcgagtacgaaagccgctactctcaactcccctctggagctatcacaccgtctgcagctgctacagccgcccagctggctgctactcaggcccagatccatcaacataacctcgcagtgcaagcctttgcaaaccatgcgactgtcaatcgcccccgcgcaaggactgcaggtattctcgaagcacctccccaacgatcatctattcgaaacaatcacccaactccttcgcgccttgaaaatagcttcaaaaagccgacttgaatattgctgaaactggtgaatatgacgacctggctatggctgtcaaataatgca

SEQ ID NO: 11483 - DNA, 2488 bp, Emericella nidulans
tctaaggtttttccgaaaattggcatagaaggatggcgccatatcagtctgttcatccatctctccaaatccctcaaagccatcgatctctcaggcattccgctaccaagagcggcccctatcccactgaatgatcctacgaatgtgaatccgcaaaggacaaattccactcctgccaatcctgatgtggccactgtgttcgcaaattctctttcaaaccggttcggtggcgaccaccttgaagaactgttgctcagcgaatgcaagcctacgatggaagaggtgaaaacgatatgtgaggctgccacaaccgttggtttgagaaggctgggcttagccaacaacggggtgacccgagaaggcctaaaacatgtcgttcggtatctagaatcgggcaaatgtgaaggcttggatttaggaggtaatccgataggggaagatttggacctcatcaccgatgctatcgaaagccaccttcctctctatgcgctaagcttggcagattgttccttgacaccttctaccatctacccgctgctccaagcgtttacgcaactgcctaacattcggtttattgatttctcacataatcctgcgctgttttcgacacagccagatgcattgtcgacccttagacgcttccttcctaagatgcccaatctgaggcgcatccatttggctgatgtcaacctttcttcagaccatacgatagctcttgccgagattctacccgaatgcccgagtctaagccacttgagtatactggaaaatcccgccatcgtcgcccttgcgtcggcgacagacccggaagcccaggaagaagcgtgtgctgtttatgcatctctcctcgctgcagtgcgggtgtcacggaccatcattgccattgatattgaagatccaagcgccgagaacaatgaagttgtcaaagccttagcatctcagattgtcgcatattgtcttcacaatcttgaaggcggtgctcttgaagcagagctttctgaaaacatcgactcatcgcagccacgaaacttggtaccgattcctgagatcctccagcatattgtcggccatggtactgcagaagaaggggctgaggatgacgatgaacttgctcctgatgaggactatgtcattggaggcacgggtgtagtcaaagctcttggggtttgtcttggtaacctcgaccagcatttgccaggcgatgtgtccggtccaccaagtggcacaacaacacctaggcatcgaaaatctaggtcatttgctgctaaacgtccccgcgatatgtccaaaaaccttttagattcggctcgcggtatacgcagcagaattgagtctgcacttgtgcgtgaggatcgtgcaggcaatgacgctaattacagtaagtttcaagtcgcctcgtttctgctggaatggtgctaacggggcgttttaataatagggcgtctccaatttcttgacagcacgctgcaaaaaatgatccagcgcttcgaggatgaatacccggagacacggattgtgccacagcctctacagcctcaccaggacacaagctctcagaattcaggagacgatagctatctcgccacgagtctaggcaaccttcaatcggctggggctgttgctgataatgagaatgccgtcgatgatgatgaaggcgaccagtatgctgtccggctatcacggactagttctataacatccctctactcccgcgcaatgacttccgaagaaggccacgttcaccgtctcggacagaacatccgtcgcgacttccttcctctggaccaggcggaggaggcagagtcttctgaaatcatggacgagtctcaattggcagcattgcgtgagaaattggatcgtctgcatgaagaacaaactcgctcgcactttgagagtgtgggtgccgacaaagctttccaggagctgggctctacggttgaagaattatgggcaatccagcggcaggactcggaagcctatgaaaggttcaggcaaagccaaattgctgctcaaatcaacagcggcaggagaacgccttctgtgtccgacactagtagggccagaggaagcaacatcggccgcgaacaaccatctgctccatgatttagcacttctttccgcggactatctctgtcacgaagatatagtgcgcatatttacattctattagccactgtattgttgattttttatatacccactacggtacatgctttttctttttttctcatgatcattagcggatacttggcataagatggttttactaggacgactattcgccatgacctctatgggtgggaagggggaatttgcgggctgatgaagtagatgcccctggtccatattggtgcgcctaggaaaactgctcatggtctgcgcaataaactggctttgttcacttataggggaggtcttttgatacaggtggtatgagggttcaaaccccgggtccattggacctttttagctcccaaacaagctacat

SEQ ID NO: 11484 - DNA, 3306 bp, Emericella nidulans
  unsure (1)..(3306): unsure at all n locations
aagcataaacgacatgaaaaccaagctgatctacatttttcatggtaggggggatccgtgggcgcaagggacgcgcctagttgaaaaagaaactggaaaggaaacttccgtattctcctttttcaagcccctgccatcgatcatagtacccgctactttgggtcgggcaatttgatgattgtagtagccactgggcggcagtgcggcaccggcagacgcctcctgcaccaccccgtagggactggcgacctggagacttcagccaagcaacataaaagcatcgtgcatacaccgtattcgaatccttaatatgccaatcttatactcagactgttgccccatggatcaacaatgcggaaatactggcaggactgagtcctttgtttcaaccaaatctcgcgtacctgtaaaccgtgccgtggccggtctcccagatcgcaaggcgataccgctgcaggaacatttcgcgtacagtagttcagaaaccgcgctgaatgttctcatctgccgtacaattaatgtatccaattgtatcgaataaccaaacactgaaaagtcttcagttgtatcggcagatgtcggatcgggttagtatcgtatcgaaccgaaccgcgcgtcgatgctgagcctcttgagatgtttcctggagaattcccgtacgacgactctcgcttgatcgacatttcgtgacctcatatttgccaggactgcgagcatgagacctctatttcagccacccctaaccgagacggaaccgaaccccatattttagcgatccatcggcaatcgcatttggatcagcgatgccttgtcatttgctccttcaatgatagcggccccttgaggcgacccaggcgagaagtgagactggagggagccggaaggcaaggcgcaggcagtggcaggcagtggcagcaatggcaactgacacgggaagtgtcagtgatgatgattccccatgatctttccgtcatgatcaccatctgcaatcaacagtgctgcgaggattcagtagtactcagagtagggccagtagtacggagcaatcatcgtcagtagtagcggtcgctggtcgatgatgaggatcaccgtctgctgaattcttcttggcttagcgccgtacccacaagattaatggtccccaactcgtggccgccactccaaggtacgtacgagggacacactccacgatttaggtatccaccgtccagtaaaacacccagcacagcgtgatctgtgacacttttcgcagaactatcccgaagtcaaaagaatcatactccgatcccctcatttcggtgaagcacggaaaccacctgagctgggagcagtgtttggtcggcaggggaggtttaggggttcgattcgtcgtatttgtccacagtccatgcctatttggcccggagctcggtcggccatccacggttcttccttgtaagcgccccttccttccacggtaatctgaatacgcagtcccgtattgaaaaaagtactgctcggcctgccgtccaaatatcgtgcagtcgtgaagatcagagcaacattgccttaccaagcctctacaacgacaataataacccaattccaccgctcctccgattttcctccttccgcggtcacaaggatttccatttcgatcagttccttcatcttccattgcctgaattacgtgtggctcctactacccactggcggttcttttgaccgcgactccgcccgccgttttcaggcttgaccacccaacttcatcacaacgtccgtacatactgcagaccaagagaccacagatcgaatccgagaggggaaacactgcttggatagaagtgcctgacttgtctttcaggcagagaaagcgactcgcanacagtggtncccgtgcagagccagatttggtgaattgctttgtccagcatctatcaagtcgctcagtcccaactttcgctaaaacccaagtccacccctccaattcagtctttcaagctttccttcccttcccctggatcgctcaaatcgactctctcctgcttccttttcctcttttttcccttttctttcccttttctctgtccgtctcgctctgctgcttgttcattctccattctcccctttcttttaccggctccctgctgcttgctccacccctctgcaaactctctcagggacaccgattcgagcctccacgacagctacctccagcgaaacgcagattttcatctgaggtgatcgctagaggtagttttcaacctgtggtgactgtacctgcccgtctctgtccataaaccagcactttctcctccaaggttcgcgtcaaccggaaaccatagaaccccttcagacacctccgcaggcgcctcccccgtaatatggcatcgacgtcagaagtgcatagttcttccccggttccgactctgcctcagccgaacgaaaccaaccgtgcccatatgtcctcgctctcgtcatcctcttccatatccgacgcggagaccgaacgcaggggccgccctgaacgtccccgtatggccagtcgcaaacctagcgcctcaatactggtgcctcgggatcaccccgaaatcgaaatcgaggaggagggagttcccgcccgacgacgcgcgagccatgagcccgcgccgcaattcggcggatttggagcgactgggaaaggaggccagacagaccctcaggagtaagcagttcctagagcaattagcctttctcccggtcactaacacgtcgactcctaaagacaagccaaggccctncagtcgtctcttcagctctagcggaacgaattgatgcagtgaaaaccgaccacgacaaactcgagaacgagaacagattcttgcaggattacattgggggcttaacacgtaatatgaagagcgagatgtcgaagagttctaaagtcaagaagtcgcacaaataggacggccgcgacgtccccttcccgactcagattcagaacggtcgggactctttttcgctttaagttcgcgaaaagatcgaatcgctttcatgctatatcatcgcgcattcttcccctggtactagggcgggcttttacgtggccattcatcatattttcagatcggacagtccacaagtcgatgaacattattcagcactactctggtgaagcttggaaatcgagacctaagccgtcgatgacttgcaaagaggcagcattcgcgagatcaaccatatcgctcatctacgactgtgcgataactaatcggccctgaatagctggcaaccgcgcagccgttgattcgcctttgtgtttgttcgacagtcacgtccacaactgac

SEQ ID NO: 11485 - DNA, 101 bp, Emericella nidulans
  unsure (1)..(101): unsure at all n locations
ttagtgtacacctttggtgactggcccgccttggggtcgtgtccgtaagtgactgtcatgnagccatttatggacacgtgggcgagagtttgctgtttgtt

SEQ ID NO: 11486 - DNA, 114 bp, Emericella nidulans
gtcaatcggattgtcacagctgattacgtcagagagagacatcctgatcaccaaaatgggattaggacgagcgactcattgaatgagacgcttactgctctgtggctcgacctt

SEQ ID NO: 11487 - DNA, 238 bp, Emericella nidulans
gggccaacagctgagcagacgcacgacgacgatctccagtcgacttcacctagtgtgacttacgccgagctgtggacgtatgagcttaccttcactgctaacactgacactgtagaccgatagaatcccgccgacgccactagccggcgagcatggcagtgcgattgaccatctgcctgattgttggcatggtttatcataggtcgtgtcatcacgcaaacagctcctgtatcgcatc

SEQ ID NO: 11488 - DNA, 1127 bp, Emericella nidulans
gatgagacagaatacgcggagcctgaaacgtcaaaaccgaagcgtagcacgcggggcaagaaacgacccagtgctgacgtggacagggacgcaatgagcataaccgccgaggacgtcctggagcagccagagccacctacaaaaaggaggactacgaaacgaagtattagtcgatcgcgagcgcagagtatagtgtctaccgatggcgcacccagtaaacaagaatatgagagcgagactaatgatgaaacggatgatctgaaagcaagtcgcggaagaagcagaaagactgcttcaaaaggtcgcgggggctcaagagcatcctcaactacgaagaaagcgtccaaaacccgagtcccgcgagattcagagctcgaggcagcgatcgaagctggactcgaaggagatgaaactccagacctgggaattgaggaagcgaaggttgaagaaatcgcaaccaagcctgcgtcgaagaagtccaaatccaagaagaaaaccgccaaaaagaacccggagccagtggatgatgttgttgatcatgttgccgaagcagaaactcacacaaatcccgaacccgaaaccgatcaaaaaatgaccgatgccgagatagccgaaccgcaaaagcccaaacccagcgagggccaaaagagcacacgccgcagctcgaggaacacaacggaccagccggaggccaaggaaaacaccgcttcacctgagaagcccgaggttgaagagggagaggaagatgaccgccggcggcatgaatcgttcgtttcggtggaaattgtatccaagcccacagcagtctacactgaagtagaatcaaatagcaaggacagcaagaaagctaaaaagaagtcatcatcggagaaatccaaaaagcccaagacgaccgacaaaagcgacaaaacagataaggcagaaaagatagagcagaagcgggacagccgacagttggaaactaagaaaacatcagaagttcgatcgccttcattgcctcaatcacactcgaccgagccaaacgaagagggaatagtgcaagaagagcccccacgccgcaggttgtccagggtgccccctaagacaaccgagaggtacagtgatattcccaggagaacagtatgcgc

SEQ ID NO: 11489 - DNA, 1229 bp, Emericella nidulans
ctcgcttgcagcaaagccgccgcaatgtcgtcgccgctgggaccacttatcacacttggaccgtgtcctttccgcgacccgcttgtggtgaccatgaccaggggggtacacctcgatctcgtgctcgagctcgaaggagtggtcatccttgaagtcgtcgttaacggtgttggtggccgtgttttctgtaggaatggaggcatggttgccgacatcagtgccgccggggccgcccataacttgaacctgggcccgcgcagtggcggccagcacggctagaggaatgccaccgtgaagtcctttcatctcgctaaattactgactagttgtcgtggtcggcgatggtaatactaagaagatctcaaatgagtgactggggccggcgcgccaaaacaacaagatacaaacaatataaaccgaaagtctcgaaagtgtcgaacgaaggtcgcctctgctcaagttcctccgttaacagcggctctgttgcaccttttatcaggcgctttagggtatgggcccaggcattcagggaggcatgttaccagcatgcctcaggggcacaccggcatgcgacactggcgaagccatggattttgcgtgagaaatgcgcgcaagaatgaaagcagtcgacaccagcagacagcagcgcgtctagcacagcaaagggtccagaagagtacggctcggtagattgaaacgagcattccaagtccctctactcaaagtttgggcaaagggatgaccccttgccggacatacagccgacgcgtctgcaggatttccccagaataccaggtccaggaacaggttcaggtacgagaacacgtccagtcatgttacaggtcggttcaggctaatgtcattatcgtccatctaccaagataatcataaatactgctagaatgtatcccgtcatcgacattccttccccatcggacggggaagaaacttcctatcaaggagttattctccagagccgatcagtccgtagaccgaaggcaactcgtcgccgtagaaaaggctgaacgacggtcgtggcaggctctgttagctttttcgatgtatgggagagaaaagaaaaagaggaaagaaagtcggaaaatctcagaatttatctgtgaccggacccacgtgcccgggccgactgttccggcgctagtagagcagtatagacacctgaggcaatattagagcatgaataagttgttatgcctgaggcttacaaggca

SEQ ID NO: 11490 - DNA, 792 bp, Emericella nidulans
gatcttggcaaggatccaggtcgtcacccgtcaagcattccgtgcatcgaaagacttttaaatgccgtggccaccgcaccgtattattgcaggtcatgcacttcccagtcgtcaattcctcctttgggggtactcgtggcaggcccttgcggggactcgaagatatgggattcggattcggaatgtaaatatcatcgtcgtcttcatcatcatcatcagtatccacgtccgcctcaacagatatcgatttgtttcggcgtttcccaactccggaaagagcggacgcaaagggctggctgattgaacgcgagtgtccgcggtggaatgtcgggcccgacggcggggagatcggggcgccggtcacccttggctcgccatagcgcaggcgatttggggagcgacccccaactataggcacgggaatggggcttgtgccaggttggacgccggccgaactcgcggattgatgggccgacggtttatgcgcagccagcgacggcatatgggagcattagtcgcaccgactgctccgttcaattgagcgttatgggatgaagttccgtttggattactatcatgtattgccgacgcaggttgatcacgcgatgagcgactagagtgaatgcgtctcgtggagttgtagtcaggcgagcttcggatgacgagggcaatcagcttctgacgagcgctattggtatgcaatcgaaggggagatacaatccgtcgagatcagtctcagcgccgactggattccgaggcaggaagtggcctcccgagagcgaaggcagttgc

SEQ ID NO: 11491 - DNA, 118 bp, Emericella nidulans
  unsure (1)..(118): unsure at all n locations
gcctcgaggagcagcgcacataaagcccacgtttccggtgccatcgacagtgaagtcgcaaccaacgtaggtcatctcaatgngattatcatgggtagtcagaccgatgagcttggtc

SEQ ID NO: 11492 - DNA, 3314 bp, Emericella nidulans
atgggggctttccccaggattccattgggtcttgccaagcagtcgatcgtttttttcgaatttcccgcaccattgacaaccaggctatcagacgcgagctttcacagtccaggagaatttatacgcgcgcagcgatcaagagtattagccagtttaacctgctccattggcccgatctgctgtccatacagtcgctgatttcaagtgtgagttccggtttcttctgctatttttcgatcgagaagtaatactggtcacaggctctgctcatgcagcatttaggaagattcaaccagtgctggctcatgatttcatacgcggcgcggcagattactgccttgaactaccacaagattaataacacgcagcccagtacacaagccgaggaggatattcacagtgccgtttactggtgctattatcttgatcgaacgttaagtgctcttcttggccgtcccgtttctctgccggaccttgatgtctcgcctgttgacctgattaccttggatccgtcttcgccatacggtagcctctttcgtgccgtgcttgagctcgccgaggtacagggagagcttcaccgagtatcctgctgcagcgataatagcgcgattgttgagacatgtcaggctctcgagacaaaaatgcacaatattcttcccgcattacagacagtactgatttctgtacttaaacatattagcagattgctaagatttgcgcccagggccgccatgcacttaccaaaatggtgcaatacgaccgcgtcgcctttgacttctgctactacgcaatcttcgtggaagtacagcgaacacgcttgaagagcttttttacccctttgatacacagacaatgtctcctaaatgcccgaaaatgcctccaagcgttccagtttctccagcagcatcaagatccagcggagccgtcggggtttggcgacgcatatccatcatttttgacatggttcgctgacccttctctgagtcctatcttcttctaatcttgtctgcaaaggacactattcctatatccactcagcgcattcttcgtcgtcttctgcaatatcatcgcgaccctagaccataacgactacaggctcatacgaagcatcatcgaggacctgtcgcggttcaatcaagacccgcacctagaaaagctgctgagcttgttgcgctctttagagaggctatgtgagccgttattcctggagaatcacagcgccggtccagcaagacaaggccctcccgtacagcaggagacttctgtcacttttcaaactgaggctcagaccagtagcgggattacaacggatatacctcagacctacccccttgacgataccggtatgggttcattgaatcatgaaccgattccgctccaaaataccgggctcagcttccctgtcaatgaactcatgtggcagctcttcaatagcgaagttcctgctggctggttggctgcaaatatgtatcccttcaatggctgaggtatttggaggttgtgcaaaggctcgcatatgatatcccgccggttacatcgactactgaaagcctccaacgcctcgttcgtaatcacgcaaccgctcgatctcgtcgttcaatacttgaagacaggtacagggcctggcgtcgtgccggccgtggccgcacgcagcatggcacgttgaaagctcggtctacgtagcgtaggttgcgaggctcattgtcctacaatagcctgaacaggaaactcctatatatcagggcgaagagcaatccaggctccgctgactgagtgaattgagagctgttaggaataaatctcaccagagattcgaactgagtatctaggatatcaagcattggggtgtatgatcgggcattaagcggtctgtaatcgaggaatacttcggtagggcatgtaaacctacaatcgaagccttgtgcctgagtttcaggggtcttacttgttccataaaagcatatacttggcctagatggattctcttcctgtagtgtacaatttcagggtgcaacatttggctaccacggttccgtttgtgctagacataaaggacggagtaacgaaatatgtttctgctgatagcaccagcactcacgtttattatgcgttatcaatgcagtccagtcattgccaggcccgaggatttatgtatacaaggtacaaccagaccgactgtgatcacctgcgcgcggtaacagtctgattcaggccaccacaacggttcccacaaaattcaataaagtagtcagcttaagacaatgcaggcgacctgtaacactatccatgcacagtattgttgccactgaaaacagcccgaggtccacggaggttcaagtgaggcttaatacatttttgggtaggtggcatgctcacgtgatttcgcgcctttccccgcgtcacttcacaggcagacgcgcagctggatgaagaaacactcgcctagagaagcaagaggacgcaccacgtccctgttgtcgtcttgctaaactgtcggaggcgggaggaacaactttcatcatgtaaggttttggacgatctatacatcggtgttctaacatgaaataggtgtaagtagcggagcttccacttctccgcagcatactcactagccgcatagcgaaaatcgacaagctttcgattctagggtaagtggactgtatatactctagttcgttgctaacacacatcgcaatctttagtgttcgctcgttcgacaacacccgcagcgaaacgatccagttccacacgccgcttactttgattgtcgggtacaatggttctgggaagacggtcgttacaccatatatacattcaaaaaggggcatgctaaccctgaatctagaccattatcgaatgtctcaaatatgccacgaccggggaccttccgcccaacagtaagggtggtgcattcatccacgacccgaaggtatgtggtgaaaatatacacaacggacacgggctaagggatgtaacagctgtgtggggaaaaagaggtcttggctcaagtgaagctatccttcaagggcacatctggtgcgaagatggtggcgactaggagtctccagctcacggtgaagaagacgacgcgacaacaaaagactctggagggccaacttttaatgatcaaagagggagagcggacggcgatttcgtcccgggttgcagagctggatcaaattatgcctcaatatctgggtgtgtccaaagctattctcgactctgttattttttgtcatccagacgagagcttatggcctatgagcgagacttctgttctgaaaaagaagttcgatgaaatatttgaagcactc

SEQ ID NO: 11493 - DNA, 750 bp, Emericella nidulans
gcataatacgactcactatagggatcgcctttctggacgaaggcaggtgcggttctgtgaaatagagccctttggctaaaggcgcgaggaacgcttgcggctgcggtaaggcggcgggaggcgaacatggtagttttggaattgatcaaaatgaattagcgttgttgttatgctaataagataatgatagggaattcgaggtaattgtccctgggagctgtgatgcggatgagctcgaggacgcgaggaacttgcggtggcctgagtcagctacgcacgtcattgtttagttacactatttatccccggcaaccgttaactgtcagaagaagacttcatcttctcaatctaacagcaacatctaactgtatagacttctaagaggagtaaggaaggtaccttcgcttttgaaatcctgcctgagctgtaagtaatcgccgcacgtcgaggacccaacggagtaattctactggttctaccccgagatcgtacaaacagccatatggctacatcttgcctctatgccagttccctgaggtgataagtataccaagtgcagatagctggctttccaacagagctttgggggagcagacgttcaaggctagaaaaggaagtagaagtacactccttagtgcgttctccaggattcttcttacccccaatccacgcaaggtgttcaacatcattgttctacaaagacaccggggtattgggtctattctcccagtaaatcaggatgtgtcttgt

SEQ ID NO: 11494 - DNA, 429 bp, Emericella nidulans
ggaaggagaatagaaggaatgacagaggatttggaagagagagagaagagacaatgatggagtagatgtgaatgagaagaagaaacgaagagaagtgatgatgagctgaagagtgaagaaaatgtatgtaagaaagaagtgaaagagtttgatgatgaaaggatagagaagtttggagtgtagtaaatggagaagaagaggagtaggaagaagaggaaagagggaaaaggagagtgcaataagaggagggtggaaagtctggttaatgagaaggaggagaatgattgcagacggaagaaggggaataaggagggtgattgaaaagatgaaaagaataagaggaataaggagatgagaaagaatatagaggagagatttgatgggcggtagaggagattgaggaagagataggtgagtgaagatgaggaa

SEQ ID NO: 11495 - DNA, 3146 bp, Emericella nidulans
gagagacaaccgtgccagtaactgcctccaatctgcgataacttggctgattgtatcggagtagtcggtcttgtgctcccaaatgcgatagggcaggctattaaaaaatgattcaggcctctcgccggcttcactggggaacttgaagtccttgaaggagaaactttcgactgcgcaggccattctgaacagagtgcagggttgcagttgccggtcagcagcaggtggggagttgcctctttataggcagcttggagcgaacaaaagcaaaaacgaccatgcgtctcttcctgcaaagttagaacgcccgtaatagtcggccctgcacgatggttccctgggggccaactatcgtcgctgcagattcaccgtcctgcaagatatagcaatgggttagtcgatataggaaaatgctgtcagcttgccaaggcctggctgaactggaaatattcatctaataagccgtgcacggtattgaaagcccctgtacagtgtatccttcttattgaaaggctcagactagctctggtacggcctcccctctgctctattcgcgaatagaacaggccctgcaggctatcccaattcttggcctaccacccaccttctcacctcatcgcaatagtgactcgagaaagagatctacttcgagcccactggcatcttctgctgatctcgagccaattccattgctaatggcactcgcggaaatctcgggctccatggccttcagcaaaagaataagcggtagaatatggtccggtggtcgtgcagtgctaacagtggtcactctgattcccatcactatccaagaagagggcctttggaacgctttctagattctagccacggctttgcttgtcttgaaatacagggtgcaacgaagtgcgaccccaatcatctcgaacctccagtcacaatctcttacactcacacgagccaaactatgtcagacttcgactgggagttcgtatctaggaacctctttggctattgtagccgaggtttccctatcgaaaatgactgttgcgaggttggtttgcgagctggcctatatcatagcaatacttcgtgaagcggaagagactgcatatccacgacccgttgatatgctgcttgtatgccgatacaactggggtgtcttgcctatcataacatcaaagatgcctggatatcctccgtctgggttgacagaagtgtacgacaggctgctgcggacactgtcagccattccccttacgtgagtccgcgtggccgctgatctatgagcacagcacacggaagctcatccgtctctccgacagcattcttttgcacagccttaggctgacgtgaaagcttatcgcgtatgacgaccactcaactattgggccgcagctcggctgccgtaccactcgagccctcccttctcctttctcgtccaggctctacggtctggccatggccatgtggctggcatcgctaaagtacgatgcaggtaggtgacggcggttaaggtcgttgttgtgacacaaagaacggtgcaccgtacgtctgatatgaggtcgcggaatgctggatattagacaactctcttcgccatacctggcgtaagaagggactcaatgattagagtacctggccagtttttgcgtacacatagtgatctgtatggtgaccaggctcttcctgatcgaaccgctgaagacggtctgtatgtgagcgaactggatggagttggctggttttgagttcatcacagtcgcacgtgcaagctagaggagactacactaagagaccaaagcgaccaggactgtgtccagaaccgcctgtcggagcgcatgcctagcattgcagagaatgtaacaatcaaatcaacagaattcagctgagtgatggcgaatgacgatccccagaggctgggtaaaccctgtcaatacagaatcaagtctcatttaagcacatcttaaataattacggtggttatctgtcacgcaggataaggcaccccaaacctcctactatacttacactcaaccagtaggtaactcatccagaattaaccaggttatatccatgtccgtatatacaactcttccgaatcacctctaccttcgcaccttgtataaggctgtctccgccaacaacttcgtatactgctggtgcaaccaggtgatatgaggcggcatcggtgttccctccgccttacccagtccctgatagaagcagctcttgagtccgaactcggcaacaccctcctcgggcttcacaacggcagagatctcaaagagaccatccgaagcacgcacgccctgtcggcggggcgagtcaccgcaacgaacgacaatccgatcgttcgtcttttccacgacttcgaaatgatccgtaatcaatgtaccaacatcgtaggtcgaagaagctagctgctcagtcgtccacaagtgcgacgcggtatcggcggcttcgtatttgcgcgagaggtaggaccgttggaaggcgtagcctgcaatcacaattcagagccattagtatcgacttctcgatccatctcaagggttccctttatcccatcgcgtcaaggcccgaagggagagaacgcaccccagccactccacacacccgcgcagaacgcctcaacgagcttccccttcttctcgagcagtgacgggttgatctcggaaagtggaacgcggcgaatgcaaaggtcgtgcgtagtcgggttcttggacgggttgaatttggcgtagagagggtggttaaagatcgggtcggtcgggggcatgtccacgaagcggtcattgcgcgtgtaggcgaagaaagcgccgagagacgccaggcccgtgtaggtccctagcttcagggtgcgggttatgagtcccatattgatgttttctgccctgtgcgaggggataatccgcgtgatggataattaaacagaagggcgatgataggagtgcggaggtggagagctggcgcggttgcgtgagacgagaggctgggagtcagggaactggtgatgacattggaccggtggccggaccaactccgactagaccaagacactaacataacaaagacaaacccatctttagcacaaaacaaacattctcactacgcatagactaataatgctaattatgtataacatcagagaatccatgggacga

SEQ ID NO: 11496 - DNA, 1874 bp, Emericella nidulans
agactacagatgaagaccttccccctccagctaccatcactcacccgcgatctatcctccgccgcgactcctctgcttccttggttgctggggttgaagaaaagactgagcctactccccgacgaaggagaggccccatcatgggcacctttgttgcagaccctcacaagccagttgccctagtagattgcactggcaagcaccttgtgattattcctgcgtatgcttcatctcgccatgactggcttgagtcagcggcgaccagcgtttgcggaaccgcgaataatagcccacgagcgacgaccatgcatctgattgacgagagcgacaccgacgcgctcatctcgccgaatatggatctcagccctatgttggcgtctagtgctaacctaatgatgacggctctgggtaacgatattgcaccgggtggccaggtcatgggtcccccagaagcattttatccgtctcgcgattttgcgattgacagctcttttgaagaagacgacgaagacgaagaccccgaagcccagttgaacgtagatgactttattgactttggcgatggttcttccgacgaggaacttgacaaggactcggacgaagaagccatggcgtctcccatgacagcggcagcagtgggcagcacgaatggaccccaaccccgaatcgtggggccgacccgcagcagaccaacagtgcggaacggttcttaaaccacctcgatcggggaattgtgacggccttccgccgcaatcacaatcgctaccaggcgctactgcgactcccgcagcaccgggaattcatgccggccaactcgccgtcccgcgcatcgagtgtgtttcgacacgcccgacatgcagaccagcgcacgccgacccgaaagcgcaaggcgagcggaaatgcgggaggggaagcagtgcggcgaaaactgatgaacgcccagcgacacagtcagataccgttttaaaaaaaaacggcggcgatggcgtgttagatagatcatgtggctgtctcagcttgtttgaaaccggacagggatcggggctcaaggtctgcagcggtcaagaatcaaagcacgaccaaaagtttgagtttgatgacgaaggctatgaatatctttttcttttcttcttcttttcttcattgttccctttcactttttcttttgcttctttgtttttctgtttgtgcctggagtcggagtggctttcgggatataccatacctcatctctgttgcagacacggcctgttacgtattttgtggatatagcaatcagctacatattgggttctattggttcttttcctgcaacgtattattcttagtccctcgagtcggcaacagtcgatcatctgcagggttgtaacttgtgacgagtcagcgcggttagcccagggcgcacactccataccgactccaggcgtcactcagactgcagtcagacggcacttacggacagtccagacagtccagacagtcttagtctcaactgctgagcactgacagtggctcctcccccaggcccctcttctctccctgagacctcgaatcagacaccggccctgacagctcggtctagctgcagcaatcaacctcgatcgacgactgaaccactggccgttgttctgcctatcatagcagcccaaaatattaatagcctggcgagacgcttctgcagagctggcggctaaggagaagcggtcagtgattggtggtggttagtagtggcttcgcgccggccgctttctgcaacgaaccagtccctgacaccccaaggaggcttgaacctgcgacaatggcgcttctcatgttgtcttactttgtagcagttcctgattcttgcaggtcgaccgaatgtgaccctatcaccg

SEQ ID NO: 11497 - DNA, 707 bp, Emericella nidulans
gtgatctccatacctacggtcacaggctgccgtagtcaatgcatcaccaactgcgctgctcaccgatattatccactgcgtccatgccggggtgaagcgcccttccttgacattagatgttacgagatattcacattctatggagcgctgggagcatcacgccgcattgatggtgccttaaagtgccgtaccgacggactgttagggaccgaatgagatgtgctgtatcgaggcatgctgcacacaattaagtgggtggagaatcacgaaggcatgccgagctaaaatcaggcaggggatggagacaacatcgggactgttgacagttcacgactgcgcgaatccaacatggaaccgacgactgctgctgcaaacctgtgatgcaagatgacattgtcgcgcgaaatctattccggagttcatgatcgatcatatcctgacctccatatgactcgacactagctcgatgcacacaggtcggcgagacggaacactgacggcgctaaattggatcgatgtctagagttgcaaaatagtattgtcccaacggtgacattggttcgagcgtataagcatttgagtcgaacggagtgaacatgatgatcgtgtgttcacggaattccgaacaggcatgcaatgactgctgatactggtcaaacacgagcatatcgcataatggagtgaacccggtatgatagagtaccgat

SEQ ID NO: 11498 - DNA, 3476 bp, Emericella nidulans
ggtatcgcgtggctctgctgcagcgccggctcagccaatttctcatctacctcgctctacatccgatactgcagcccttaccggcacaacgacgcagaccgcacggcctacaactggagcgtcaatggcttcgttcaaaaccgggcgtttgccatctcgtggttcatacggacagccagtggcacccactgtggcagcaacgaatgccgagggccgactggcgcaaccaaagagcaagcagtacgtcatctccgcaccgatacaacaagatgccggacaggcttctgctatgggtagcccaagcgtacagaatttcccttccaaattcaacactacaccgcgccaggagcctccaaagggtcacaagcggtcgaatactgtctcggctatcgcggaaaaactgttcggaagatctggctcaatatttggaggtcgcggaggccaacaaagtgcgtcaaagcagaaggctggcaggcgttatccccccacaagcatgagggatccttatcctggtgatgactccaggacatcggtggattcacggcgctcagctcagtatggttatggtacccggaaggcaagcgaagcaggcggcgagaacaggacacggcgtttctccttacttccagcttcattttcactgaagggcatttcgtcctctagcagatcgcaaacgcccgatgaggaatccaaagccgaccgcttctcggacaatcgtgtcagtcagcgcccatcgactggggctatacgaacacgcgtccgagctaccagctacggggcccatgatacgatagccagcgcagcgaccgatggcccgtcagatgatgttattgtccatgatgaaccagtcaattaccaggctcgcattgatcagcagttcgcggctctacattcaaacaatagcggaacttatcagccatcgccatatggtacagtttcagcagagcaggttcaccaaaatgataatgaacactattaccgcaataactacgccaaccattcaacacctaattactatgacgaatacaacggcgttcatgacaatgcgtcgggggcgtccttgcaaactgggcgctcttcgaatcggcctggcgtcttgcagaaaaaccacaggaggttcgcagacgcttacgagaatgagtcgcaccattctggtagctctggggcagcccgcaaagtgatggatttcttccgtcggcgagccaaatccagagttggggacgaccgctagaggggccagctgctctatatcttgctttcatctcatgtctccccttctaagattctgctctgatctgactggattcaacttataattatggcatgtagccaacgtgagaagacgctgaagaccaacgcatccggtcttgatgactatgctgttgcttctcgcggccaagtattcaaaaaactgcgaagacgttgaacttgggtgagcaaagcgcgtttgaattgacgcgttttggaagagaaagaagtcggccatgctctatctatgatacagtcttaaagagcaaagaggttatttggatacccctgtgatacccgcgcaacttctgtccccttctgctgcatgtagccatcggtttgtcttctgttgcaccagcagccgtatttcttcttgtatggatatctgcatctagcatgtctgcgttgattttgtgccggttaaaccctttttacttattccctttgttcaagctctgattcttctcttatcttcctgtttctataaccctgaccgattgtaaattgagtctttgctcatccccacgtctgtattgcctatcctttcaccctagcatttgcttctgcttgaataccttgcaactctctgtacgaaggcgagatgccttgccctgtcgtcctcactggcaaggtgagaccaaccacttcccatcatccccatacatcttcatcttctcgtccctttcgaggacctatttaaaggtaatatattacggattccgttaaatttcttcccttcttttctcgtcgccgcttactgtgagcgtagatagtctatagattaggtacacaggtgccaccgtttgtgggtaataatacatcttactagtcactcaaatattcgtgcgcttttcccccgagatgggtgacataagtggtagcaggtatattaagcttcgttcgcgtactgtgtgaatgcattaagtcctgagtaatggtatggagtccagggaagtagcaaaaaggcagtaaagatttcagattgtactggcttcctacaataggtttcagagagttcaacccaaatctgacaccacagaaagataacgatatttacagtagttaaaaggaccaagcgcgagcacagaagttgcgtggtttaggtagattatccagaaagtcctccgtataccctcattatcgagggtaggcgggtcataagtatatagcatatggtatctgagtgcataactaaataagaaatgtataaaaacttggaaaaacaagttcctcgtcgaatatccgacggacctgagccagaacgaatcgctcgactttgcccacgtttttgaggacttgttttccatcctctttgcggccaatttcgctctcgactcggatttcttgtagaagactgaggcctttctgatgcgggcttggattgccgcctccactgctaccagtagatggacccggggtctcctgctggccggaatatgagccggagccaaccagcgcttcagcgtcttcgggggaaagaaaacagaagtgaacgcgtttgcggatatatgctatgaccgcgacgccgtcgaaggtgatgccggtaacattcagttttagcggaaggccaacgaagctaggcatcgggtagtcgagaaggatctcagctgttagcgataggcgaatgtctccggcgtacttcacgtggcagaggatttggaagtcctcaggtcggcgttctcgcatgcgtggcggaggctggttttgcaggagcgggttttctgacgatgagatcgggtcgtcattatgttctggatgtccgtcggggtgagaggatctattcgagccggaagggtgcgtgcttgctgacgaagggcgggaagctgggttgctggagtcaatgaccgcgtctggcccctgcatcggggatggccgattcccgtttagttgccttgtcccattggtgacggccccttcactggtgttcgaaaggtcaatcccctaccgtagtctcgcgctgtttctctctccctcatgcctccccactccttatggctttccctctcccttaccccccccctccctcacttccctctccttttaccctttttactcctctcctcctcctctactcccccctcttccccctctcacctctttcttcccctccctctcttctctcttcaccttgtctttctatccctctcttctactctcctttctaatccccaccccttctcctccttactcctcctttttttcctcccctctccctcctatcctccctt

SEQ ID NO: 11499 - DNA, 994 bp, Emericella nidulans
atggatggacacgggtagctctctcttcagggctccctttctccctcctgtttgacttcgtgatgatttgatcctaattagccgtctgtttacatagttgggtctaagttcttttgtcgttttatttcggcttctttatcgtgatcagcgacaccttttataccgcggtacaactgttcgaggattgtcaattgcccagtgctctcatttcactcgcaccaagagtttgcaaatcgcttcgaccgtttccttttatattttctccaaacccgcgacaggaaaatgaggccatttatagacgatgcgaagcggcgagcggagcggagactcagcgcaagcaggcagtcaatatccgcaagacgcatgttcgccagctccttcccagaccgcctgaaagtggatgccgatgatgctcagatggactatacggctccccccagtagtaatgattctcgggatggcatgcaatacatgcaacaatcggtgatgtccttgatcgccgccgtgggtagccgaaccgatctccgtgcgcgtttcgatgactctagcgatagtgaggaagagacgagaacaagaccacgatttctgtctgagaagccctttgaccaacaaattactgcgtcgccacgtgcggatgtaactcttcatgtcccgtcagcgcctgaaacgagaagtagttcgagagaaagaggccgccgtcaccggcgatcgatatcggagcataaactctttcggccgttcaaggcaggatccgcaagtcaggataagaaacaagatgcgagcccggaccctgggccgtccaccagtgacaggctatctccgattccggttctcccaaggccgcgcagtgcaactcctagggctgcccccatcctcagccgcatggtcgaggctcgagcccttctggaaactgagaatccagaggaaaacccgcaaacgctagaagagaaagagcaaggcgtctctaaaaagtcccaggtgtccccgctctctc

SEQ ID NO: 11500 - DNA, 1569 bp, Emericella nidulans
ccgcaaaaaccgtggacaatgataatgcctagggggacattattcgacgaagagccggcagaaaagcctcgattggtgcgaacgaagtcaacaaggacgagggcaaagacgttctccgagcagaactttgatatatttgctgatagcgacgggacgactgagcgggatacgcctaaagcgaagaaggcgacgcctctaaagctggcacgcaccaattccatgatcttacccgtaccacagcaacctcgagcgcggacaagccggaaatcagaactatacaattatgataaggagaatgacccgctggaggaggagctggatccggaacctacttcactatctagaaacccgtctgatgcgtcttcgacacgacgttcgcccacaaggagtcgagccgcgcagcaatttacgacgtaccgacagtcgcaacaggaatcagaaaatgagaatgagaatgatgacagctacaattcgctcgatgactttattgttagcgacaatgacgagccgagctatcatgaaacatcagaagatgaatctgaggaagaggaagaggaacgcaaggtgcctccaccaacacaaaagagaaggttattccggggaaggcgaccgaaccctacgcttgagctagggaatgctttgcgagagtcttcacgacggccagaccttcgtcttgagccgtctgtaccggctgcgattgcggtaccgtccccgaaacggaacagtgtctcaaggaaactattccagaaagaagcagacgtctctgagaaaatggatcgtttgaatctggaagacagtgatccgtcatcccagcttcaaaatgacctgttcgggtatgcctcttccggcgtcaaagccgtgcttgctatactaactctaggcagggctgtagcggtctcgaaatcaccatcttccccacggcctagagactcccccttccagacaccgccctccagtccttcaaggagtctcctgcgctctcccagaaaggacaaagttcaaataccgccgacaccataccgtgagagttcggacgccttttggagtctggaaatcactaacaactggatcgacgaacactctccacggaaagtagattcactattgcaagagtttgatgagtctgactacgactctcgagccaagccgaaaatatcaggggctaagcaaccggtaaaaacccctagtaagaccgcactgaagaaagcagaagccgaggcaaaaagggctgcattggcacgcaagaagtcgtttgacgacaaaaaagcagcacttgcagaggatttcctcaaggttctcgacgatgccgtttccgggggcgaggttcaaaagcgctctgcagagaccggtggtgttcgtatcgtctggagtaagacacttcagaccacggccggacgtgcaaactggaaacgagataggtccgtgacggacagccggtccatgtccccggccaatagctccagctcatcaggcagtgagacgccatcagttaccctaacccactatgccaccatcgaactggctgaaagaaatattgacgacgaggacagactgatcaataccttggca

SEQ ID NO: 11501 - DNA, 2049 bp, Emericella nidulans
gcggtcctaaactgggactgccttatcaggacccttgtccagctctgtattctttatcggatgtagcatcatttacggaaaacacagcgggccatatatatcctccctctggacatcgagttagcagagcaggaccaatccattagcaggagtcttaccaagtgtccaccatcgaaccagttcctgccttgcgggtcctgatgctagtcacatatatcgtatcagcaactatacttatatttaccaggtagctacgcataaaaaaaaaagaaaagaaaaaaatggggaaaaaagagaatttgcaaactcacccgactaccatccgtatactgcgctggatttggcttataccccaaccaccgccgataaaagtcctctgccggctggccggtgaacatataactcatgcgataaacgatatggtcgagcttatggtcccagttccagaagctatcttttccgccgttgatcttctccggcccgcctgcaaccttattcacgatgttgttcagctccttcggcatccacttgccgtctgcgtagatagggtgcggagcatgaacggccttgaggccatgccaaagtgcaaaggatgagggcatcatctccgagaccagcgccacgccctgctcgatctgcgcgttgtgcatgacttgaagcagccggtgcgaaaaccggcctatcatgacaggagatgtgcgccgcgtcgttgtctcaatgggtaggttccagagcaggttccagaagacccaggtggtgtcggatgggtcaaatataggaaggaaggtgatgaggtccgcttcctcgccgacaccccattcataatcgtcatcttgtgggctcgaaatgggcggctcagggccgacgggctggatccagctatgcggtggcgctggtccccataccgtattgctttcccttttgagcagggatttgtcgaccgtgtgcataaattcctcccaggttccgtgtgccccgggaatataaaaataggcgtttcgctcccagaggtacttcctggactgctgttttgcaaactcgcttgcccgctcgaggaagtgataggtgtgcccggtgaagcgggcgtccatttcaagttgccagtagtagtggaagtctgggaaaacggttgaaaagatctgcaaaggctgcgcgtactggtataccggcctggacaggttaattctttagcggtttcacggataggggttatatacctgtgttcgtctaccttgggataccacgattgcagggtccgctcgtcgaagagaactgtaatatcccagaactcacgagggataaacttctttttcagcgcgcgaatcttcgcctcgtctacgccacacaagaggagatcattatccttcacatgggtcaggagaaacacctcatattccgcgccagagtgcagtgacagttccatgatgagcgatcgaacatgctcttttagattctcggtccagactatgtcgtgccatgcgcgcagtaccactgccgtcctcttcttggttgctggagaggatatgccttcatcgtcgtttgcaggcgcctccgttcggatagggttcagtggaaggatactcaggcgaggtgttcttttcggctcatgatatctgtttatgttccgctggaggcattccgactgcagcgtaccccagttcacgttgtcccagacaatagggtccgcagtagaattcaaacccgactcggagtacccatatgcagccaatcgagaggcgcgcgtggtgcaagtgtatccgtctagaccaagagcctcgtaggagccatactttggatacggaaagcctacgatcgcaatgaccggttagatagtcttgctcgcataagccaaggggtaacacgaatagagtaagtacgcaccaccctgaacgccaggataggtgaggaccatgtcttagacagtttggcgatccaaagtccctccccgtggaccctcgcaagttctgaacgttaacgagcatgtatctgaccatactccactattgtagtctggatacgggtcgtagatggcgggcataaagagaaacg

SEQ ID NO: 11502 - DNA, 585 bp, Emericella nidulans
gagcgccgtgggccttcacccaagcatacagtctgaattgggcggttatacaagttctggggtgtgctccttccctcgcttctattactctggtaagggtacgatgctatgcattagactctgcacttactatacatacacgcttatcctatgccgctgatcggataacgagcccgcggcgacaaagcttgtatggccaaatagctggaggatatgtgctgagctacagaccaactcctatgggcctgtgggagacttttgtatctaacctgccaaatagctacatgacgcagacctggatatcactatccaatcttgattgacacgactgggactgccggtatgctcccgcataagcgcaaatagaaatgtactctgccagacaacttggaggacctatacgcgcagaactctcagatgcaacgtccttacgcccactatcgcactactcgattctaagaatgaatcacgctgtgctaacgtagtgtctgagagctgacgatccttgacaagcttgcgcccacacagcgtgacatgttacactcaggtcctgtagaaccgacgaactgacgtgtgcctgaatcc

SEQ ID NO: 11503 - DNA, 2161 bp, Emericella nidulans
tcctgtttcgtaacggagtaggttaccatgaaaagcgacgtcgtccaagaagtataggtgactgagccgttatttagtgctgactgggggcccgggatcctggaacaaatgacattctcatccgcctccgggcgccagataggagtaatctttgtacgacttcaacatacgccgtccatactatgtgcattcggtacacccggctttcacccgtagtgccggttgtgcttccgatggagttggaggtggctacttatcctcatatgtcgaaaaagaagggcttggtgtatgccaggctggtagcatttcctcgagtcgtgtcggttgtcacacacaaatgaagcacccttgtatgaaactgggtactatattgcaagtgcgaacaaatcaggccacgaacaaaccgatgacccattcaaagcgaatgccgagacttgatgtataggtcattaggcctggcggcgaacgcagacggcccagacatgactaccgtcttaactccactcggcagttgttgtgatcagagcccgtgcatggggaaccctgttcgtccgatgagggaattgtggtccgcccctggcactatatcagcgctcaagatatcggaatatccggagtccacaatctaacggcgcataagcgcttacactacggagtaacctcccaggctcatgtaagttgcgcacggggatataacaatggggcaagtatccttacaaggtatttgcccgcttcgcgtcaaaggattttcttgcgattggcgttgcatgcactcctgactcgtgcagacagtaacaacgttgcaacggcatactccctccttggaaatagcgtcttgcttgaatccttgccatattctattcgcggcctaggtcaatatgcaactgtaagcgacgtgcaaaacatcctcgtaccgaaacttgactagcatagagcggtacgagatttatcgtcctagtgtgaaggcaatttcccagggtttccaactgcggtactcgaattcaccttgaaatgactgagaaaacaaccgaaatgatgttgccaatcgaatagtttgttccagcgaagcgatccctgcttgatagaagagctatatagagcaggtatcgcagacaaagcaggctcggcatactacccgctaccggtaatgtgggagatgaattgcgcgtcttcaacccctttacacgaattagttcctgtcgtacttccagaaagaaacactgcagggacccacagagactggtaaataaggctcatgggcattttctcgtctagcaaggaggcaatggcccgttgttgcaccttgagtagggcttttgggggctagccggctaggtgccttcgacgaaggaagatgcgcgatattaaagcgtgaaaagtcaattgctgtggataagttaccgatgtcaagcaggggttgcttgacaactcagccagccgggggtagataacttccaggagagccgaggaccagcttgtgagcatgcagtggtattgtcgctctcgaagaggaagcacgtgaggatgctggaatcttttggcaacacatgacgtagctcggcattgtgcaattcgaacctcactgtttgaacttgtagtcacagcttcaaaggcctcagcttgtcatgaaaattaatgccggatggtattattgttgtcactgaaatttctacctgaagatcctgtagcacaggcagggaccatgcataaccaaccattgaatttcttgttggcatcaactcgcttatgcagcgcctcagcggcagcctacagcttcatcagccctttccaggttgcaactccacaggtacaaaccacagcccggccaagtctcgagccttgcacatcgtaaaggggccttgtctgaaattgatgatgaagtggtctctaatccatcttccacaatttcagatcttgagagctggaatccaaaaggtcagtgatctacgtgctagtacactgggatcctggctctgtttgatgcgcttttagaggaccgacggtagcgtaccgctttagcctcttttcttgctgcagattcccttttgtacaaatttattgctttaactggatttgatagttcctacttataaggcgtcatgctaacaagcgagcgcctggatagacttgccaccattttcatatgtctctccggactcca

SEQ ID NO: 11504 - DNA, 899 bp, Emericella nidulans
acatctcgcgagctccggcaatcgcttcaaaccctttctggtgtcccttttccattaggaccagaacaccgccgttcggctttaggagctgccacagattctcaacgtattccttccgctcatattcttcgctaaagttcattagagcgtaaggagcaatgacgaggtcaaactgttttcgttttggcggtcgactgtcatgaacagtcgggctgtcccgcgtgtgaatatagtcaggcagtcgagggaggaaggttgtgttttcgagcattaaactagcccgtagacgaagagggtctgatcctgtgagaacagttgatcttcccagaggataaggatccgacgtgggatgatccggaaccatgagctcgtactcagctcggagaacatctctccatgccagaatggctgcaccaccagctccagcgtcaagaacatttggcccaccctcttgcgaaatcaatgagcgtagccaatcagagcccaggcgcttccgaacctcagtcaacacactcaatgtcgatgcatacatcccgggatagaggacagccatgtaggcattggcctccatttccgacatgaaacgctgggatgcgcttaagccgatagcctcttgtggctcctgagcgtgagcaggcgcagtcctggtagactgaggaaggagcttgcccccaaatgctttatgagctgcttctgcgatatgtttattggagaactctgaaagaatggcggaaatggggccagtcacagtatctttcggtgggaatacagtgtacgggtctgtcgcaaatttcccctgccttgttaacgggtgaaggcgtggcgaagagccctcggccttttgttctccaaagtttctagcattatctcggcacccagttgctccgctacttctcgag

SEQ ID NO: 11505 - DNA, 155 bp, Emericella nidulans
gactcacaaacaggaagagcgtcggagctgtgtattaccttcgacatcggtggcatactcgcacgaagcactttcatggacgcacgctatcgcttcgccgaacccaccgacttgagaaaaggttgccttctagttgatcgcatcggtcagcttgt

SEQ ID NO: 11506 - DNA, 2552 bp, Emericella nidulans
tatttccacccatctaatctagagccggtgctcttgcagtggacgcactgatcgctgaccgtagcttgaatatgtaacgcccatggttacatgtttttagcagacagtgtacactaaagacatgctgtgcgctccacagaaaggttctattcccgcgagctagttatgagaaaaagcgaactagttctcgctatgagagtccgacaacattgctaatctaatcagtttagaagacacaggcccattctcgttcatcgtcagctcttccatcgctcttccccgctcagtcaagttcgacgtatcagcctaatactaatcccgatgactctccttgaccaatcaacgcatttctccccgtataaacactgtcctggatccgacagtctggaataacaggggtaacactgacatccgcagccctcaaccccttgattccgtgaaccctcagctcaggatcaccaacgccctgtttgacgtcctttgagagtctggcggtcccaacagggtggaacatcgtttggcaccggtccagcattggggcttcatcttggcatcgctgtcaagtggcatctcccacgggtactcgagaataactagctctctgagcccgtcagccttggtcagcaggtcgtatgcgaagcgcatcccctcgcgcatggtgatgatgtcaaggtcattggagaagaagttgaaatcgatggcaggctgggtgaggggttcggagttgatgagagtcacttcgccgggatcgaagatcggacggacgaggtcgaccacgacggtgagacagtcacccttttttgggacaaggttgtgccattgaaacgcgctaccgaaattgacgaaatcgagctcaaagtgcagctgtccatcagggctgaaggggtccttcccgtcacactgttctttaaacctgcggtagtgctcgtctctatcgaggtagtactagacgcgaggaaactcgactaactcgagaagtccgatgaaacagggcctgtacgtgaggtttggtaaattgactgcgcagctttgttctgctcgtagacttaaaagtcatctcagtaaggctgctggttgattagacgttggataatatgacggttgggcctttgtcttggtgagatatggctattagcctgcctgatacactggatggtgagaccaggacgggatacgtgtaattgacggggccagtcaatacacaagtcattaacatattgcacaagacacttcttagcattattcatgggttacttcattgagcgatggattgataggccgagacgtgagaatgcgaagtttagggcttacatcaaaatgacgcatacgggacggcaaagatctgtagatttgataaatccagtctaacccccttcctttcgaaactctcatattttccaagaatctatccacggctcatgctagacaaatattgcagatagatattaccgacagatattaccgccaacatgtcaaaaataggagactcaaaagctccctcagagaacccgtcacacacaattgaccatgccaacccctcaatcttcaaacccaagtatctcgtcctcgacgatatcaacgtcgatcttctctccttcaacattctcgccgcatcagggctggcttatttattctcctgcctcgatgcaaaactcgcagccgccgtagcggccactgttttacctctccggctcatctttcctcgtcccaaaaccccaaccggcacagttctggtaacaggcgcatcaagcgggatcggcgcagagctgagttatatcttcgcggaaaagggccacgatttgattctggttgcgcgaaacgaagaccagctcaacgtcgtgaagaacaatatacagcagaagtacggcgtccgcgccgatgtcgtcagcatcgatctgtctgttccgggatccgcgcaaagagtgtatgatatcgtgacaaaggagaagcagctgactgtgaacgtgctggttaatggggcagcactgggcgcagcgggcgatcccttcgagcaaccggttgagctcgttgagcgcatgacgacgctgaattgtatctcgctagtgcagctgtcgcacttgttataagaacgatatgatcaagagaggcatcgggtggatgatgcatatttcgagcgttggctgtatgtttccttccggccactatatcgctccgttgaccctgcacaagtctgaagtagactaactagttgtatagcgtatatctccagcccgggccaaaacatcaaccactcaaccaagtactttgtccgcgccttctctgaagctctttctgtggaacttcgtgcctaccctggaatcgtaaacacactactccttcccggccctgcggaaacgcaattcatcacgcgatcgcacgcccaggaaacggtcatgatggctgcgtcgggggcggttgaggatcccaagtccgtcgcgcaagtcgggtataaggcgttgtgcaagggcaagcgagaggcgttcagtagttggaacgccatgttcacgagtccagtcttcaacgtcgtacggagtcgagcgcgccattttttt

SEQ ID NO: 11507 - DNA, 613 bp, Emericella nidulans
  unsure (1)..(613): unsure at all n locations
aacccgatgaatgcgcatggacgctaccgctctctatgtccatgccatgttcacatgctcggtgaaccgattactgggatagtccacaactacatatctatcattactctactgatattgcagttgctagagaaccaatgattgaacgatggaagctctccgatactgaacggaatgcctggctggacaagcgctcagactgtttatacagtttgccatcgaacacccagatcggatcctagcccttagagttgctcatgaactctgacagacacgcctgtattggggcggtaaccatcggcacagtgagacagatccctttatggggattgaatgggaccggacttttattggacagatagatttcttgacacataacctactcatctgatgacagggggtacataaaaaacgccctccgggactatacancctgctagatataccgacgcatacgtctgcctgtaagagatggtgacctgttcaaaatatctcctatgcagactagcgtacgggaacatctcgaagcggaacgaactacagggaaacttgctggaagacacagtaggaaaccgtccgttacaccgaatgaaacgcattaccggagacgaac

SEQ ID NO: 11508 - DNA, 1013 bp, Emericella nidulans
tcatgaccaatgagttttacaatatggacataaaatgcataccaccgaatatagtgccagatggccccgatgcgcagcctggccaccaggcttgcgctgtccagggaagtgagccggatcagctggtcgttcaagggtcaaattatgtcagcgccgctttcacatacagccggtctcatctttggcgcaactttggcattatcataggcttctttgtcttcttcgtcgccacagcgatgatcgggatggaactgcagaagccaaacaagggcgggagctcggtaacaattttcaagaggggcgaggcaccgaaggagattgaaaaagcggttgaacagaaggagaagccgaatgatattgagtccgggtctcgtaatgacaccacagataccgtgggctcagatgacggccaagcggttgaaggcattgcgcgaagtgaatcagtctttaccttccagaatgtgaactataccattcctgttagtggcggaaagaggcagcttctgaaagacgtccaaggatatgttcgtcccggtcgtcttactgcgcttgttggagcttctggtgcagggtaagtgtactcgagcctatagcaaagagttcaagctaagcatcctaggaaaacaactcttctcaatgcactcgcccagcgattagactttggcgttgtcacaggggacttcctggttgacggaaagtgagaaacccctaactatttgtgtcactcttgtactcacaatcccagaccccttcctcgcagcttccagagagcgactgggttcgccgaacaacaagatatccatgagccaaccgctactgtccgagaatctctgaggttttctgctctcctgcgccagcctcaagaagtccccatcgaagagaagtacgattactgcgagaaaattatcgacctgctagaaatgcggcagatcgctggggccacagtcggtgctggcgggactggactgaaccaagagcagcgaaagagacttaccatcgcagttgagctggcg

SEQ ID NO: 11509 - DNA, 213 bp, Emericella nidulans
tggcataatgatatgcagatggtctgaccttaggatcagatttcaccttcggaggacctgctgcaccagagttattagcgtacccgtaccggtcacatagactttgagtacgatgtcggctacaatgttcattacaccactgaatcacgcgtactgttcgcgctctgcatgtttgtatccgccctcattcagcactcgctagcgcgcaatatt

SEQ ID NO: 11510 - DNA, 492 bp, Emericella nidulans
ctgacctgcggtccatagttgaggaagctgtcctctgtgttgcgaagaccgctgaagccatcgcggtagacgttgtttgcgatctctgcacccatttaaatgttaccatattgtgcaatggaatgtttggaggtagagaaaggtaaaaacactacgcaccatgatcgtcccaaacagggatccaaggaaacttcgcatgactggcaacgagatcctggtcggtgcggtactgtcccagccgcgtgcggtagtcataaagactgaatatttcgcgaggcgggacaacagcgcgctcgtcgacgcccgggacgccgttctcatactcgtagatgtagtcacctaaatgcacgacgtaatcgacattgtctttgcgagcgacattgccgtacggttggaagtagccactcgctttacccacccagactcgtcagctatagaacatactgcagaaggggccagtggcagagaacgcacgataattactgcaagaat

SEQ ID NO: 11511 - DNA, 771 bp, Emericella nidulans
cttgtgatctcaggatccggcatagatccgaggcatatcatcgtatacagcgaggcattcagtatttgagcatccttgacgcatacaacatgttgcgatctattcggctgcactgattcaattgttgcagattagccgctccacctggagagatgatctgcaaaatgaagcgcatccataccatgacgaagtgccagcgcagatggaaatatataaagatccacttcacaggcgcactatcatactcctgtgatggatactgcgctccataaaacaccgcagccgacagcagtgcatcacaatcgagcgcataccctacttgaagaggaccctgatggaactcagcgctgactgaaatcttcctatggtcgaacgtgattttctcctgctgctggagcaaacaagcgatcctaacaaagttttgtacatctatgccggaatggcgctgcaatgaaaggcgacagcactacatcaaatactaattccacgagtagagctttcagccgtttaggctggcttgcctctagaggaagagatctgatgtcatgagctaacgcggaagcctctgatgtgaagaaagagcctgtcagaagaaccacaaaggatcctgactcatgtctctgagggctctgcaggactacttactctcgctactatcagtgcatgagcaacaatactcaatcgtgcatcgcaaagcgtgtctttaacaccaacataggccgaaaaactcaacggcatggactctatctgatgaggttcgacagtttgaat

SEQ ID NO: 11512 - DNA, 183 bp, Emericella nidulans
ttcttagactatagctacctaccgacagtacctaataaactttataaaatatttttatataaaatgagttaagatctctatagtatacgatatttattcttagataattttcgttacttctgtataattccctaactttgtttttagatcttagcccatttgatataggagactgtaacttcc

SEQ ID NO: 11513 - DNA, 2287 bp, Emericella nidulans
tttttttattataaaaccccccaccccaaaagggggagaattttgggaaatcctaaaaacgaggccgattaacaggttgtaagaaaactttcttggctattcgtgaactcaatcggaggccagtttattaaagtttttatagagaaggggtagtgctcaatagttggcctaaaccaaaactgtgcagccacctcggtcacaaacaaaaataaagtgggatttccgggttcttgttaccaagcgaaccgcccctcccgtgccgggggacgctcacatctaatttaaatcagcctactaaccttgctaaccttgtctcaattgatcgaaaatcattcaagactagcaatcaagaaatccccctttttcgccctcggccttaaattgcctgcccaggtataacccctcagttccccgctctcgcgaatcttgagttcgcctctggaagttgaccttaaagagccagggaatgcactcgggatcttacaccttccataccctatcaggcgagattccataaggagaattgtcaactactcaaatctcaaggtcgcaattctgtgggcttggtgggtcatttttcactactagtactatctacccgttttattgacaacaatatattccgtgtaggtcaatctcgtgcgctcggtagtcggtatcttcaagaatgccggtgatatcacatcatgatcctgaaacgaccctgttctcgagagcgttgacgatcacgtttccgcgcatcggcctctggtgtgctgataccactggccaagcctacctcggcgacacgccacttgcgagggtcccgtggttatgtaacagtgcctatctgcgagtgaggtgtagtttgaattgagggctctggtccacagcacggcagtacttggcactgcttgcactagccttgctgagcggagtcagtctgctccacgttttcgccctcgacgtctcgtgcgttgcacacggggtagatttaatgcaacctactgaagccggcgactcggggaaaaaggggactagactcggggtacactacttcgattaaaacaccttttatcttgttccagtgttgatgatatcctctgcaagtccaactgcataagacgtcaattgcacatctctcgttcccacatcgatccttgaggacccgttgatttggcccctctttggttgactccgattttctgacaatgacaacaccaacgccttcggttatccctttgatcatcaacggcaaggaggagctggcttcctcagtgttcgatgtaattagtccttacacaaacaaggcctgctgggccgcagcatctgcttcacctcaagatgccattcgtgccgttgaggcagcccaagcggcgttcccagcatggtcgcagactaagccgactgtccgacgagatatcctcctcaaggcggcagacatccttgagagtagactggagaagtgtgccgagttcatgcggacggagatgggagcagatgctggggcgtcacaattcttcgttgtccccctggcaatccgtatgttgagggaagtggcaagccgcatcacctcaatttgcggcactgtacctgttgtcgaggcggaaggacagagcgcaatcatctataaggagccgatgggagttatcctgggaattgtaccatggtatgtttcctggtcgctaagcggcgtcgcactttactgatgatataggaatgcaccgtacgtgttcggtgttcgatctgctgcatgtgctcttgccgccggcaatacgacgattctgaaatcgtccgaactcacgccatgctgttactgggcgctgacccgcgcctttcacgacgccggattgccagacgggtgtctcaaccttgtgtcctgtcgcccgcaggatgcagcagaggtggtcaacgccatgattgagcacccggctgtgatgaagattaactttaccggaagcacggctgttggccggaagatcgctcgtgcttgcgggcagaatcttaagccgtgcctgatggagctagggggtaaaaacagctcaattgtgtgtgctgttgcatattttgataccgctgttaagtccgtatttgccgttgtctttttttttcgtatgtttatctctatccttgttctttttttactaattattaacagcttgtaattctttcctatttttttatttcttatgaacatttttctcgttgtatttctattttattcctattttttattatctgctcctttattattgtttatttttttttatttatattttatttttatctctcttttatttcttattta

SEQ ID NO: 11514 - DNA, 2472 bp, Emericella nidulans
ccagggccgtgctttatatacaatgtcagatctcgccatgttcattatcatcaatgcggggcggaattaggtccgtttctcgtctgtatctagtacctaagtgcttctattttaccctcaagcaccgagacttcccatattcaagtagtacatgaatagggatccagcagtgcagcagtgcgaactaacaccttcttccaggatcgagccgcctcagactagaccgttctagcgctggatacaccggagaagagccgaatctggggaaggacacgacggacactcgcaggcattggtggtaattattcaaaccggatgagcccggttgaagcgctcggatattaacagcgaatcggatgaaagatatcgagaaaaccattatacgggtatgcttcctggctagtgctaaatgtatttcagctcttctgcatagtgaacatgaatggattctcaagagtttacaaggccgatattagcctaagtcatcttcggcccgcggattcgagccgacgctgctatacaagccctaagtctgcgcttatcttctacaggtttagggcggaacatagttgaatcatccattctttagtgacgaaaagctcaaaggaccagcagagttcaactcgactaaaaaagagccagtacgttgagagattctcccagaactcaacttggcaagcagacaagtcgtgacctacgccatatcccgaaagatccctaatgaaaatgtggcgagtaatctccaaatgccgcccatttctctctgaccggcagtcggattcttgtatgcaaagcatatgagcaaatgcaccgcagcatactgccaaggctctttgatacatcagtcggcgtgcgcccaagcacatcctcaacatctgtcagcgccgcgaacacaaaacatgatgattacaggaatgtccctgtaagaagctgcggctgaaggggcgccatatcgtggcgtgcgcaccggcttcaacaagcagagagactggaccgggataccatgagttcagaagggaagtgcagagctgcgtagtcgtttcgcagtcaacgcgaggggtttgatctgcgctgtgctgaagatgagaaagcatcatcgccaggcttcagcataggcttaggattcgtccaagtatatagcgctgagctgccggatccgtcagcgtctcatccgcggcggtgaaatctccgcatgctagattcgtgcatttctttcagaggtggttccacggcgtcttcattacctcctctaccgcagtacgcagggctacggtgagcatagcggtttcgttgcattagggcagcatacgtatcagtgcacatatgatttggttgcttgcacaggggttccttcctggcactcgtggtaggatgagcataggtcaaggtcagcgaacagcaatgacaagcttgtttggaaggtcgatcagggcctttattgctctgaacctgaccgagatggacaggcgggtatctctccgaaactgaagctagataatagtcaagatggggaattgtggtaagaatctcagacatgtcgcccagaatctcacactagacactgaatcacgtttataccagaaaagcagagcgttgcataattgttttacctggaggtgtttttcatggttgagaccccagacctcagacctccttcgcaagagcgtagcaccattcaggccatcgttgtttcgaagatggactccatatgaagccacgtatattatcttgctaccgataatgaactatcagtccatccaagtcacactttttgtaaccaagaattcttccaagccttgagaggcattgaatcgaccccagccactgttcttaacgcctccatgaggcagtacgggctcgtcgtgaatcgtcatgctgttgatatgtacggcgctgcaaagggcttgtaagcattatatttcgcaaaaaaaatcatatgttgcaaccaatgaggttgattacaaggttacttacccagactgaattttcctggcgatcgccagaccttttcgcagatcctgagtaaacaccgccgcggacagcccatacccgctgctattcgcaatccggactgcttcttcctctgtgtcgaatgtcatgcaagctgctaatgaagcgaacgcttcatcctgccatacggccatatcctccttgactccacctagaaggacgggtggcatacggactccagaatctgagtttgctgcgtcagagtctgcagttacggatccgtgaattatatgggcaccagcttcaagagcactctcgattagccgctgcacacgcgccttggacgcaacgttgaccagagttggaggctcagatgagggatcagacattgactgcaaagcactcttgagagcttccccaaaagttggtgcaatggaggaatgcacaagaatccggtctgtagccatgcaaatttggccggactaaaagctgttagtgctcatattcacgtgcaggagagga

SEQ ID NO: 11515 - DNA, 2010 bp, Emericella nidulans
aacaagttttctggacgtctgcgtcgcttattcgtcttgccggagttcttctcgatttttgacacaaagctggagtgtttgatgaggcgcttgtctttctttgtcgtcggaaatcatcgccgaacaccgagggtttggaaaccgcgcttcccgcagatttcttcgtgcggtttgtctgttgcttggtagatcggataggggcctactcaattagggagatgcattttgtctgtattctcagtcacttaccattatttcatgtgtaacggctttgcccggaagaatctttgaaagaatttggtgacggtccgttgaaacccgatcaggactagtcccgcacctattctaccgcctcagctccccgcaccacgtgagcattccttagactttcttggagcattgctttgctagccataggtaaggcctgtctgaccaattagttagtatgtgcattattaccttatcattattggactcggctaacgaagtccagaaccactaatcggtattggcgtccattcgtgcaagctcaacctaacatctgatctcgtcttgtcgttccctgtttttgcactagcaccctgttggggcaagatccacctaaagctcgccgaaatatccagaatcccaagatcgtccagtgtcgggactacatcattcactccgtatcttcttcgttttgccaggaagactccagagatcttgtgaatgcgtttgtgtcagcttctcagatctcgtgcaaatccagttatacctcggttgcgaccctctcaacagttccgatccattcaaatcattcgcaactccctgccgcggtcaacgtcattgaaattgtcgggcccttcctgcttgagacccccttcaaaatcaatttcatcatattatcctacaaccaccacggcagctaacaacatgggctctcttggaccgtataagcaaaagcacaaggtgactgtggtgggatcgggtaactggtatgtaccggcctggcggcttgcctgcagaatttcaataattttggtactgatagcacaaaaggggcaccgctatagccaaaatcgtcgccgagaatactgccagcaaccctgcggtctttgagaaggatgttcagatgtgggttttcgaggaaaaggtcgagattccgaaatcgtcgaagcattatgatcctgcctcttctctttgccagggcccgcagaatctgacagatattatcaaccatacccatgagaatatcaagtaccttcccggaattacccttccggaaaacttgattgccaatccatcgctagtcgacgcggttcaagacagcactatcctcgtcttcaacctaccccatcaattcatcatcaatatttgtgaacagatcaagggcaagattgtcccatacgcgcgtggaatttcttgcataaagggcgtggatgtgaatgaggaaggagtccacctgttttccgaaacaattggaaagattctcgggatctactgtggcgccctgtccggtgccaacatcgcgaatgaggtcgcccaggaaaagtggtccgagtctagcattggttatgatccaccgcattttgactctaaagccccttctcctcccaaccgatccccttccgcatcgtctgacaatatcctgcacttcgagcacaaagacgtttcgggtcaactttcgcgggtaaagttacaggctctaccttccgaatttcctcccatcggccatgcccttctcaagtcgctattccaccgtccttacttccatattggtgtggtaagtgacgtcgcaggtgtttcgttaggaggtgcccttaagaatgtcgttgctgtcgcggcagggtgggttgtgggcaaaggatggggagacaatgcgaaggctgcaattatgcgagttgggcttttgcaaatggtgaagttcgccccccagtttttcggtgctaccatcaacacaagaaccttcactgaagaaagtgctggtgttgccgatctaatcccgacttgcagtgcgcacaaaacttccgc

SEQ ID NO: 11516 - DNA, 613 bp, Emericella nidulans
atcgtacggccgatatcatacctatctcattatctagcccttcgttacactggtgtgtagtgatcacgatcctaacgatacgtatgcgtacctaatcctgataataagcactgaatgtggaagaatatttacaatcaacctaaggtcttgactgtgttgtattttaggctcgaccgcaatgagaactactcttattacgttccgtttgtcgaaattgaaattggacatatttagttgcgtattggactccttagctgctgactcttactaccaacgagccttgagatttgctttagtgaagtcctctacagaaaaaactggttctggcgggagacccatcacctttgctttatacacacttttatccgatgcattcgaacgcgcatgttcggtggtgccattcggctattccggcatatgtaagagactgacctatatgcacctcggcatagcactacgacgatccgtcgatcactgagtctgacgccccctccattcctatttcaaaagcgcatcaccgttgctggcggaggtctgatctttaccaagcatggaatagcgttatgtatgcggataaaacactgcatgtttaggtactatcgcactgtagtgg

SEQ ID NO: 11517 - DNA, 156 bp, Emericella nidulans
attatccttgtgttctctcggtgtgtgaagtgcagaggctgtaatccctcaggtgtcaacaacagagaggtacataacgatcttctctaatactggaattgactgcattgccattcagagcttgtcgcactgagctcatcacgtccctgctgggtg

SEQ ID NO: 11518 - DNA, 206 bp, Emericella nidulans
gtcgtcaccggtcgtaggttacaggcgccctgctgacctcccgactcctcactccccgtacaactcagactcgatacaccagacactctccatggacctgagcctacactgagctcatcaggcacgcaagccgcagtctggaaactgcactcatggcagactcttgcagtgcgacatgccaccctgaagactgcaatcgttgccag

SEQ ID NO: 11519 - DNA, 607 bp, Emericella nidulans
atcttgagccgagatttcgtcaatactactggcccacccaccgatcatccggactccacgatcgatccttgtaggacgcttgaccgtgtatagaactgatatggactgggctgcagggtgccgatcctccattaatcatacccgaccgtatttcccatgtatcctagcctaccaagcattaaggacaacactattgctgtctgctgcgccggcctgagaccgcaccaatggaagcttacctatcacaccatgcaggattattttaatgttgcttccccactgttatctggccagattgaactgccttactgaaacctgtattgcgggcggacccagctgaaccactaattatacagcctgccaaccgctgactgccacccacgaggctacaggggcgaattgtcttcttccccgccactactgcctcttcgtgtagaataacttataacgcagcgccaggggtagcgcagtggttgtgactgcactgagcaccggcagacctagcctctgacttatcatcttgccgtgcggctttcatctacctaatatatacagttatatatacggctgcacctctgtgtactatgatacaatgttacttttgatt

SEQ ID NO: 11520 - DNA, 384 bp, Emericella nidulans
gattagatatgtattcattccacgcagtttcgaatctctagcttgaaatcattgatcaaagcacaagagactttgaaagaaacctaacgcgagcggggcaggtaaaagcgcacagaacgcgaccttggttcacgacagcacgtgacaactgattttgtggtcaagactacaagggacaggggcccaggagttgaaggactcgtacatgctaggtgaaatgtgtagaatacaagggcactatgtagatgcactagtcagcgcctggacactcaattttcactatttattcaacatcccgatggtataagctaaaagagatacctgcaaggccaggttcggccataatggccaaaaaaatgcaaatactgacccagcattcactct

SEQ ID NO: 11521 - DNA, 123 bp, Emericella nidulans
ctcctcgccaacacaaatcacaatagaagacatctcaccgccctctccccattcacagttcaagtccgctcagatatcgccataattgcacagatgactagacagcctggacacaaccgcgag

SEQ ID NO: 11522 - DNA, 600 bp, Emericella nidulans
atctaccatcaaccttcctataaaaaaaatacaaaaaaataagaaaaaacaattttatagtacccgcagcccggttgaagaccccctcttgcttttctttcttcgcacgacttcgctatcaacacccatcagctctctaactgcaatctgcgccccgcgacgctatagtcccccgtcacagcgagctcatctggaatttctacaaatgccccgatgcacgccatattgctgatcccctgtggaatcacgggcggcctatctgttgattccctaggtaggagcgtcgctgtagcacgcggctggatgcaggggattgtcatggtgctattaagtatggtttcatgggacggatgacctggtgggatatccatatggcagagaatctctgtgagaatttctctacccgagcagtgaagcatcggtttggttacgtacatcccctctttctcgggtgcaagcgcataaccatacgcaacctggactcccgctggttggtctgggaagacgggctgggtcggaactctcagcgtaacgacccatggcgtatcggagaatgtcaggattgtgttcggacccggtaagggcttgatcgctgataca

SEQ ID NO: 11523 - DNA, 601 bp, Emericella nidulans
tctcagtctgagagagccgtacctatgactctggagcgagcgagtgagaggcttgactaagctcctgatggctgcgggagacccagtctcggggtggactcatgatctctggacacccatgatcctgagaccggctggggcgagcggtcactgggtcccaaatctaaccacgcactttttttgtggatagccattgatgtgctattgtgtcaaaggatgacagatccgcggtgtatccattcatgttaatgtcagcacattcttcacgtgggatgagcattgttatgtgagcattgagtgcgaaataaggcctagacttacattggtctcttcatcgagccgggaccagccacacattgtatattacacacttactgcacttgctacattgttcagcggacagatcgcatgggaggcgtcatcttgagcggagtacgttatatttacactgttgcggacataccgcgtgtgagcggcactatatacgctggggagtggcactgtactctggctaggtttcgcatgtctagcgtgcatggctatgctaggggttgatgactacactcattgcaattgtacgcgtggcacattcggactggac

SEQ ID NO: 11524 - DNA, 154 bp, Emericella nidulans
ataaaataatatttttgttgaattgataagggcttagagtatctattatcgggctattgaacctaaatttaatctgcgaatatagtaggatattagtattttaagactaatttgctagataaaggcttgggtaggggaatagctatgataagag

SEQ ID NO: 11525 - DNA, 1321 bp, Emericella nidulans
tgcattcgtttgaagctctccaggctcgaggcccccaggttccgtacacgcggccgggtattcgggaagttccgacagaaggacaatgtggacagatccgcattgagccaaggtgtccgttcccgtaacgagatatcaaggactaggtccgcgacttcagggatgctcgtaccattcgatggtgcgttgtccgtgcattgaatcggccatccagccatggatcctgtatctggggcgctggcgttgactgttgtctccgttgctccggtcagaagctcgcccatggggtctgcgtttccttcttcgagtgcctttacggcggagacaacggcgggccatgctgtggggagtttgaggaaagaatacatgaagaagctgaacatgccgacagtgatcgaccacgagccatcggagactgagacggggttctcatacagcgacccttgtaggttcgcaagacgctccgcaatatctatagagctatttttcgaccttccgcgtgcatcggcacctccaccggcacttgccagagcacaagcctcctcgccagccgcctcacagagactcgcaaggtccgcaattgcatccgctacatatagctggtcattcggcagctggctcgtataccgttccgcattggctttgggattgaaaaccccgtcgaagacgaaccgtcctacacgctggggaaaggtctgtataaactcagcgccgtagatggtcccgtaagaaaatccccagtagttcactgaagcgttcgtcccgtctaatgcatcaattatggcgaccatatcgcgcactacgtacgccgcgcttgaagtatacagagcagaggaatcgtacttcgcgcaatcggctgcgatctttgctagcgacgcatcatactcccgaattgccgtctcgtattccccacccggcgcagtatagctcttgttcgtgaaaagactgtactcgatttccgctgctgcagtgacactggccgacgcgtctgcgtgcctgcccgccgtttcccagcaggcaagtagaggcttcgcggcgccgacgccgcaggatcccaggacacgatatcgtagtatccacccgtaatatttgaaatcccagacccggccccgttcgagaggaaatcgactccggagacccgggaccgccggggttcgtgagaagggtgccttttcgctgagtggcgggcactctagcagcgtaccgggcgagggggatcgttgcgagctgaccgttgtgcgggtcagcgtattcaagtggcactgtgagtgtcgtgcagtcaagggcggagtttgaggggcatggtgtccagtggagggaa

SEQ ID NO: 11526 - DNA, 647 bp, Emericella nidulans
atcgatacactgctcgatttgagtgccaggaagataattgatactctcggctgatgagactatgatcgctgtacaccgctattggggacttgcatcatcagacacgcctcagggggatctaatgccgctgctaggggaacactataacccacttgatctctatacgaagcagtcgagctggtagcgtaacgactaatagtatttgcatcattactaataccggcacgggccttactatgggacgtgatatatccgacgatcctatgatcgctatgaaagctgcctggtggagcaaagatagcctgggggccttgatgccaatacatacggataagacgaggcacattatctaatgccgatagcttttcgtgacctgcgcgcactcctgaatcgaaaatataaccagatacttgcatcatttcgataatacatatacggcgacattcagcatcctgagcgcgcaagacgcgtcatctctgggtggtgacaacactcttggaacagggcatgtatgcttggacgcgcttcgaacttcttctgagtgtccaccgctcaacaatggaactgctgcctactgcggcattaaccaaatctacgcctgtcttactaacccttggctagggagcatctccacctgttcggtgctt

SEQ ID NO: 11527 - DNA, 110 bp, Emericella nidulans
  unsure (1)..(110): unsure at all n locations
ttgaccaagaagtgcattacgagactgacgaggaagcttcttagcttgtactcccagnagcaccgcgacacatgctgccatgtcaggcgcacgcaatacggggccactca

SEQ ID NO: 11528 - DNA, 1502 bp, Emericella nidulans
atcactctgcgctgttagttctgcctgcgatgcccgtttgaaatagaggagtggtagctgtcaagcagctgtggtcatattgccaggccgataaggatgcggggcgatcgctggcgcggggctgttacgctgcaaatcacgcacttagcttcaatcgatgaccagctccatcatacagagctcgtatcatcccgtctcgaggagattcaaagatcttgacgagatgtgtggggcgtaaaaggacgaaaggggtccacgccctgaccggaaccgactgagatagatgttgagcaacggcatatagcatcaagtgtcaatacagtatacgaaggaagtccgacataatgccataggcgtttgtttgttctgtatagacttatacaagcataatgcctgagaaagggaaaggcatagcaaacagcatgttcgcctaagtgggagaaccaacgggcggtcatggctcacgtaaggattatatactacattaaagcgagagcagtagcagtatgcgtgacgaccaataatggatagacagtcatataagaacaggagtccaccccttccgcggtacgaatccctgtacgccttcgtcgcggacgacatctggccctcgccgaccggtgacaacgctcctttcgacctcaggccctcgaacatagaacgggtcaaagcccgtccttgctccagtctgcttatcaatcccgcgaatccatctcttcttgcccagaagatctgtcttcgaatgagaggccttctcgggaacaaacccgctccccgcccgatcaagcatgatgaaccatcgccgttgatgtatggatccgatgtcgttgaccgccccgggatacgcgttgttcaatctgatttggaagtcgacatcggtatcgcctccttcagcatccgagtgttcgtgttcgccttccgtgccggtgtctgtttgtctcccccgtttgcctgaccctggactttgtgtatctgccgggccggctgtctctctatcggattcggagctcgacgtgctcctcggctctgcttttgcgacgcgtctccgtcttcgtttcctaggcttctgtaagagagaggctgccgtcggggcggagcggaagtcggttttgtcccggcggaggaaaatggtatagttcttggggaggcgggtgccgtggagacggaggtgaatcttgctctgtggaactgttagttttactatcctctcgttacgacaacttggagctgacgagatgaataaatacgttttggaatgcgtttcgcagtttctcgttttctggcagcgccgaggagtctagccctgacccggaatgcatctcaggatcttggtcactgtcgtccgtttccggaccggtattcgaaactttcgttctgtcgggaaggacttcatacactccagtatcccagatgatcatactcccagttttctcgctcgcggtttcgatgaggtggttctagacatggaccggccgctcagtattccgttagaagatcccttt

SEQ ID NO: 11529 - DNA, 122 bp, Emericella nidulans
gtagtgctgtcctccgtcgcagtagagctctgtcggctctaaagcatctggcgacccagcggtcttgcctcgcgagactgggatgtgtcaggcgatgataattaagctctctcccgttgcgt

SEQ ID NO: 11530 - DNA, 134 bp, Emericella nidulans
tccacgatgggagcacaggtcttctaccagcggcaccagtggtgaggagtcccaacatcgagctaggcatctcacttccagttggccaggatgttccactacttagcgatctactcgtcggtccggggactgta

SEQ ID NO: 11531 - DNA, 2109 bp, Emericella nidulans
atcgtatccacgatgctgaatccgtcgctgataacagactggtcctggaagtaggcgtcttccttctctgcatccaagtacattgacttcagctgcgggttgcggtcaagatgcagtgcaaagtggtcatccttcgcattctcgctcccatacgcacgagagtagaactttgtctcaccacgtctttctgcattctcccttccgtagaacttgaggtcgcccattgcgaccactgtctcgggcctggactgcagccagaagttgaccaggtcaaaatgatgagtcgacttgtgcacgagcaagcccccgctgttccgcttatcgcggtgccagcgccggtaatagtcggctccatgctgagtattgagcagccattcgaaatgcaccgagttgacttgaccgatcacgccggatgacaacagttcgtagatcttggtgttgtgaggcgcgtagcggtaattgaaggttactctcactctgttgcctgtccgctcgactgcgtcgaagatctgccggcaccgaggcgcgtcgatggtcatgggcttctcagtgatgacgttgcatccgagttccagcgcgcgcacgatgtagatattgtgcgtgcggtcaattgtcgtgacaatgacttcgtcgggctgtgtctctgcgatcatgcggtcaaagtcagaggccaggaaggttgggatccgggcatggccaagtgcttcgaggcgtgaattggcatagtctaggcgcgtctgattagtgtcgcaaaaggcgacgagctgggctgtttgagagaagtcttttacgattgccgtgtagaagaagatggcccggccgccggtgccgacaagggcgtatttcttgaccattttctctctttttgtctatgctctctttttctttatttcctttggttgatgatgtgctcttgcccccgcctgtgaaatatcgagccagcctgctgctaggatataaagcggagagggttgtactcggggtgaacaagaccgaggcaaccccgcaaccactccaacaaacgcgtgaggaggcgcctgctaagctcaaagcggacggagtggtgtgttggctgggaagagtcaaataggctgaatgggcagctcgagagatcgtcgtggattttccatcaatcaccggacagtacaagcccaccccgcactctggcatggacagtcctggagcagcatggatgacagcggcaggtctgggcaaatcctgggccatatcagtatccaatgcaagctatactgtctggaatcagatgagaaaagtctcgggagggagttagagtctccaagaccgagtagatgatcgggtagtatatgcccggggcgggtatatagggttggagatgagccccagggctcgttgcaggcctctgcacctttcgcgactagacggcccaaaatgacgtccaagcagagtccctcagcagaacaaatcgagtctgcagactacatcactcccgccgttgagacggtccccaaacccaccgcaaccgccgagaaagcagcccagttcctggcgacgaccgccgtagaccgcagcttcacacccgaagaagagaaggctgtgcggcgccggatcgattctcgagtcctccctttgctcttgggcgcctacttcttccagcaactcgacaagtccagtctttcgtacgtctcaatctttgggctcgtcgaagatgccaatctcgtcggccagcagtactcgtggctcggctcgatcctctacctcgcgcagctggttatgtttatcctggttgccattatcgctgtgtatgtcccttccccgcagccatactgaatgggttcaatctcagcgcgtacaaacactaaagtctgtctacagtattgcggatctgtacctctactggctcaacaagcggcatgccagaagacgccaagagctgggtaagaatgcaagggtcgtggatgagagtatgcttgggaaggccaagatccagcaaagcaaggctgctgcagtggaagacggtgcaggtgaagagcaaaagacggaggcgagtgttgtggacaaagggttccaggacacaacggacctgaagaccgaggactttatctatgtatactgaaatagggatagggg

SEQ ID NO: 11532 - DNA, 730 bp, Emericella nidulans
tacggatcttcttccgggtcctccttgcagcacgcgatcgccttgcagcagcctcgaccccatccctggggaaggaggagctgtaaggccgcgcctgtctgcgtctgtgctcaagcttcagtttgtttacacgatactgcctctggcatgcgtcgacagctctctttgctagccacctcacgtcctagctggtctataaactgctccccattcaccctccccccgcctgcttgactgccattcctgaacctccctcctcccctcttgcacctgttccttattcgcaattgggataccctgatgagtgcaacttgatccacggccatcatcacgaatcaaaaacacagcccatggctaacggatacgctcgtctgcccggcgaactaaacgctcttcccaaaagccggaacaggtcgcagacaaccgtcggtcttccacccactccatcgcctcaaaagaaacgcgcatcgtctttctaccctcctcgcggttcggactttcttgacgagacgaatcccgaccccttctacctcgaacactctcttgccaacgcctccagctggggatccgataaacagagcctccgcaatgcgagatcgggcgagaacattcagaaatactttatgctgtccgccgtgaatcaatcctgcaaagacgtcaccgttccagtgccgcgcctcgtaccattaaatcacaagcaaacattgatcgttcaacactgtcggtagtc

SEQ ID NO: 11533 - DNA, 2843 bp, Emericella nidulans
atcccgccaaagcgttgcacgatgtcctgcacgaccttccagtgcagcgggtggtattctctagagccgtaaagtccagcgcctgcaaatccatgaagggaggcagaagggactgggttccttttggatcctggtcttgtgcctatcatttaccgccaggtagaggatgcacatgaccagcgcgtccggggaatacgtctctgagatattggcaacctccttctgcagctcctgcagcacaagtgacttgagctcgagctgctcctttgattctagctgcggctcagccgcaccgtatgtgatgcgcaagatatccggtggtacgaagccgcccagagaacagcgtatagaagcaacttattactctcctcgagcggatacacccacgacctgttgcaactggccgcgtaatcctgcgcccggaaatgcggccacagtgtcgcggtggtgagatctagcagctcgtgcaggaaattggtcgtcaggtggctgacgctggcggccgcaggagccgcaggagccgcagggaggatccgcactcttccgcaggttggacagcaactcgacgcctgcagggtcagtgtcggatcctgcatgcggccggcacgaagtccgtcctgactatgctcacatcgaagcgtgcggtggttcgcaggcgtcgtcggactcgcctccaggcgcagggcctgcccgagcccgagcaaatcacggcctgtcctgacgccctccccttgctccacgcctgagccacatctgcattcactacttatagatagggccgaccctgagccaggccctgtccctggccaggaccgcaatgccaagcttggctctggtttctgcatccgtcctttcgcaacggctgttcaacatcgagtctagcttactcgccgcatcttcgcgttgcttcgtctttttctcggccagaactcggcgcaggagcgttgaccgcacatggccagactgctcgttcagcgtggggccccgacgaacatgaactggcctggaggcgcgttttcgctctcagattcggtggcatctagggtacggttcgcgcggcgtgggaaatcgtgtggctgtagtggtactcggtacccccataacttgacaggactggatcgacaacgactcctcgcggtgacactgacactgacacctcacaggctacacctagcggatccttggccgcgctaggttttattctagctagcgttgtcgtggccaatcatgctgcataaatcagattgattggcactatatgtatagcttatctaagcatacattagccatttggctaatagttacatgcaatcaacgaataaaagagaaataaagatttcaatctcctttccagacctacttcatcaccccaaacaagccgctcatgatctcctatccctctacgtttacccgcagaagtgctaacggcgcccctgaatcgacccgtggatcaatgctcgtctcaattctggacctgaaataaccgaatcagctcaaatttaaaggggctcaagatccacagtgttgggtccaacaacggctcagactgtcaccgcgtgcaaaagaaaattcagctttataaggaccgtacctggagctccaagcctctccctttgtctggggagcctatcaatcccatcatccaagcaataatggatccaccattgatcccttttcccacagaataggaaagagactgctccccgtattcgctaggctaggatgatctgagttagaggacgggggtttacggggagcttagggctaaattttgtttgtacggtagcggtatggcgctgggaaaatgggttgggactggttagactgcggacttgggacaggagctccgtttgaaatctctgactttttttctttttgttctgtttgagttgtgcggttttgctttcgattcatctcttttctctttatagtactcactggtgcaattcaccggtggcctgtcctatatccaatatggctgcaactgcaacaaccctagcagagattgaaaaggtacttaccttactacacctgacgtgcttcagcagaccacacgaaacctgacatagaaggcagaaaaaagaagaaataactctgcagacaatcaaaaatgcgattcccaaacactgcttcaaccgctctctcctcatttcctctgcatacgtcgtccgcgatctcctctacgcctccgtcctcttctactttgccctgcacattgacaccctcttttcctcgcaactcctccgcatcctcgcctggaccgcctacggtttcatgcaaggctgcgtcggcaccggaatctggatcctcgcacacgaatgcggccatggagctttctccccataccaaacgtggaacgatgtcgtcggatggacattgcactccctcctgatggtcccgtatttcagctggaagatcacgcacgctcgacaccaccggtacacaaacaacacagagcgagatacagcatttgtcccctggacagagaaggaatacgacactcgcccgcgctacttccctgcctggtttgagatgtttgaggacacgcccgtctacaaccttattagcctactggcgcatcagatcgcaggatggcagatgtatctctgtttttacgttagcgccggcgcaaagagtaagcctgtaccgcagggaaaacagagcgggtggtttggaggccagcagagcgccagccactttgatccgggcagttcgctgtggacggaaaaccagcggcatctgattgcgatttcggacctggggttgctgcttgttacgacggcaaattggtaccttgcgcagcaagtgggcgtgctccgcatggtgctgatctaagtagtgcc

SEQ ID NO: 11534 - DNA, 2756 bp, Emericella nidulans
aaagtatagagagatgaaatgtaatgaagactatatgaaataaggatgagtaaagataaataataaggatcagatgatggatatattaaagaagaccaccggggggaagagaaaaatttaattgattggtgaaaacccacaaattatctttgtgtttggtggtaatgagggggccagaaatttgaaagccccgaattcattggcttggctcaagaaactttcggtgtgcgggcgagttctaaacttcagctttaagaggtggatgtaaacctacaataatgccagggcaccatcggtgttttgaattgccatgtggcacattctggtgtagggggcaagcagctgccaagcggtgtagtgctttcaaaggttagcgaacaaacgtgcatatcgtcttcggagactagtgattcttttgtggccttccttgaagcccacgttctgcaacgatgttcctgcccgagtgcactgggtcctcaaaactgccgtctcccatctttccgcgacctcgccgctgccgaagcatacctccgcgcgcaatctgactggctctcgccgacctttgtcaagcccgggggggcttgtacacgaccaggcccgcggtcacaaggtctgtctcgaccgggctcaaaccccgctctcatttctcgacttggctgcgggcatggtcgaggtggccgacgcggatgatggccgataccatatgcgcagtgtgagtgtggtgccggcgtcaagggttgcaatatttccatgggacggcgtttactatacgtttacgggcttgctgtttcatttttgcccgtggacttaccggtttcttggtgaatataagttgcagtcgagaaaggagagggacaagcaagcttaggcagactccatatttcaccgttctccgtacttattacttcccattttcggaggtgaaactatttactcttgtctgatctatctatgcatattctaagccggttcacctctctgtagcatccatacatttatcgctggtgttggttgttgactgcacgtttatcaataatatggacgccatcttcaagcaaatcaaagatgagtacgcccgtgccgacgagcatggcaagcgagagattcaaggctatatccgcgagttgcaggttggcttctattcggattgggatgtggtgatgcggttgagcagtggtgtatgttccctccttactatccacttcagctaccgacagtgtgtagcccttgcaagttgcacttgccaaaatcgccatcgacctggaccttttccgcaccctcaaggagagtgaagctccgctatctctggcacagttggcagagaagacgggggcttcccccaagctgcttggtaagtatgcagcgttggctatgttggattgccctcactaagtcacaacagggcgcattctccgcacgcaggctgcatttggcctcatcaaggagactgggccccaggaatacacttcgagtgcattcactgatgtcttttccaaccccgatgctgctggtgccattgcacagctgtatgtctcattcctccacgtcaaaggcacagtaataaatttcttctcagattcgacatctccggcccttgcactcagcttctgcccgactacctcgcggagactgggtatcaggagatcgtctccaacaaagaatgccccttccaaaaggcgtttcacaccagccagaccctatttgaatggatgccccagcacccaaagcacatgaagtctctcggccacttaatggcccttcaacggcccacggtctgggttgaccactttcctgttctcgagcagctaggcgagttccctaacccagacaaaacactcatggtcgatatcggcggcggcttcgggcagcaatccaaagcgctccgttccagatgccccaatgttgaaggcaaaatcattgtccaggacatgcctcagacgctagccagcgctgagccagcagaaggcgtagaattctccgaacacgatttcttccagccgcagcccgtaaagggggccaaattctactatctccgccacgtccttcacgactggcccgacgagcagtgtgttcaaatcctgcagcaggtcattccggctatggcacctgagtcgcgcattctgattgacgaagtggtaatcccggtgaccggagtgccatggcaggcagcgtttatggacttgctgatgatggagtcgtttgcgagtatcgagcgcacgcgagcagaatgggaggccttaatggacaaggctgggctgaagattatcgaggagtattactatgatgggaaggagcaggccatactggtggttataccgaagtaaattattgtacttctactttagggtagaatggagtctcaaaccctccgtgacaaatttaaccaagaaattgagaatatatatttatacctgcataattcctgcaccttctctatacattctatcctaatcctacatcaggatgccttcgtacgcccttctaggagccaccggcgctactggatccagtgtacttcgccatctgctttactcaggctcgtccagtgacctcacagtgaatgtcctggttcgctccaagtccaaactgctggctgcctttcccagcctcgacaagcctcgaccatccgtgacgtcgtccatcccgacgatccgcattttcgaaggagactctaccaatcccgatgtactttgcgcggttctccaagacgctagcctcgtgttcatgtgcgtcgcgcagaacggcagtccaatggg

SEQ ID NO: 11535 - DNA, 1951 bp, Emericella nidulans
agcttcgaggtcgaacaaagtagtcgacgacttagcccacaggggtgcaggtggtaatgaatgaatatacttgaagccgagagttagagtgattgcgtgttcaggacttcaactatgagattcatccgacaggctcagcctaataggcagatgcccgatgacaagctaggcggctgttggatgagggggaggggagccgggcggaaccaaaagagtcaggtgcttcgagctagtaagtcaagaaaaagaaaactcgcctaatccgttaatgggatgcagtgggcttggttattagatcttggtcttgtatgcttcttttgtttcgaagatcgatgttgagttaaaaagaagagatggagtgagggaggtatgtatgcaggtggaaggaagcagaagataagcagtcaagttgcagcggggcacatgactacagttgtggttgacttccaatggtcggaacctacctaatgagagtcgtagtgaatctgtcttatggggaatatggaaataatggaagtgttaatatgctcgtcatcgttctaggtaagccgcagttttactgaattaacagctgcttccgtgattacaaaggttgaaatgctggttctatgagctttagtatgcatgattgtacgcttacagctactactgtaaatatccatgaaactgaaattcacataccgaaaacgacttgctgaagttgaagagcattgggctcatcgaagtatatgaatgagtgctcggcaaggcctagctgcctttccatagcagatgccccgagcaagccgtccactgtctatccgcttttgacctaactcgtcccctccattcgacacacctgagctatgtatccggaagtcaagggcggttttgggtcgagctgaggccttcgacccacgagagccgtccattttgcgtagtatatgaagaggtaatcatgttcgctgcgcaagcactcaacctttcacacaaccacttgctccaagaccaagaataatcgggttttttaagaggtgaatgaagtccttgaacatacgaagcacgttatatgagttggcgatattggtgatgatagccacgccatcttccagagaagaagtcgtcagatccgtgaaaaacgccgcccacaaccccacagccaatttacatataggctcaagcaaaaagaaaaaataactccaaagacaatatgctcatggtcgatcaagtaggtatggaaacgaggacgtgaagattatacaacgaatattataggcgagccgtgtctatggagatgcccaccctccagcaacttccacccattccgcaaggcaactgccttgcttgccttcgacatccacaatatcggtatcacaccggcatctgcagccaactccattttcctttacaggatcggggtttgcccaatactcatcctcttcaatacgctccttctcgtcctcggtcgtcatttcaaggtacggaatgcgcggtagttgtcgggcaggtgcgttcgcagggcagtgttgaatcgtggtgtgtcggtaaccgaagtcacggaaatagtggatgtcactcggtgacagaagcacaccagcagcgagggaatgaatgggagcatcaccccactgaaagctgcgttagtcttggacgcaaagagaacgaagaacagcgacacttactctctccatccagaaaccaccactcctatccatcatctcgaagaaatcctcgtactctttgctccggaagaagtccaagcgcgcaatttcaaagttactccagaaatggcacatgttataactctctccctccatagtttcgggatcaatttcgttcttctcaccgggctccgtaataagaatttcctcagggagagtctcgggttgctgttctccggatttggttcctcgcggggttccaaaaacatctcccacagtccttgggattttatattgttctttcgtttgta

SEQ ID NO: 11536 - DNA, 1901 bp, Emericella nidulans
gcagtatcttgatgtccagacgtacaattgcaacttagagccaaacaacctggaaatggctagaatggatccatatcaaggtcaccggtggaatgaaagtgtgtgagttgcttcatacatgttgcctgttgcagaagagatctactaagagtaaactaactctgcggtagaccagcgcacagaatggcacgaactcagggtgaaattggcggagcattctgaggaattgaggggcatattgtgtcggatgctggacctgtttccgtattggaatcggtgggaggagtacgctaatccagatgatgcgacgaccgagtttgagaatctggtagatgctacttggtcgtgcaatcatgatgaggcggttgctcagtttgtgagctgattaaaagcctgggcgatttggaacagttggagcctgtctacagactctttattacttaagtacagaggtactatatcaaaaaatgcaactgcacatattgattacagcacgttcagcgtggctacttcacagtcgagggcttcggcgcgacgtcattcaactattatgagcaaccctatcccgacgaatcattcctcgatggtataagtggtttacgatctgctgggcctacctctttagtcctcagtcctcatagaggagcggggtactgcagtagatccatgaatgggagccagtacctctcttcttaaggcacagggggattttttgcggactctagtctgccttggcatatacagccctgccttggcgaatatagcctcgttcagctcgttcagctgaggcgcgggaaaaacattgtgcatgtttaatctgaattgcttaatggcttttcggtattttcaagtgcgatgacgacgctaagctactccgcggtggaatattaatcaatgctaacccacctctctctaggacggtaacgcatggtcattgcagcgtcgggccgcaactggttaaaattctcagcgtctggagcagcaaaactgaaacctgctagcattcagtggatcgtctaggtcaacattcgatgtgttcattgcggtgattgaagttactggcacaggaaagagcatatttgtggcccagtgtaccaatcaagattagtcccatcaagatatcaatatccaggttccattgttgtcaacactatcagatcccactagcctacttgggaaacggcgtcagtgctctcgtatttacctccacgtatccgttggttgaccttcctggtatccctgacgcgcttttgctgatactgttctgtctccagcatatgacaagttccttggtagaatcgcatttctgtccgactgtatcataccaatggatacataccgcccatagtgcgtccaatgacgtgatccgtggacatcatgttttgacatcatttgttcaatagaagttggacattgtctggtaatctggtataggaggccccgcagtatggatgtcgccgttctctgatgttcagacccggagtcgcaggaaaagaaagagagaatactattactattcaagaaattgtcttttttctggagctcctacgatttggttttttccgattccaggattgctgtatagccacaagatattttgttctatgtcgctcatgaattcagcttgtcgaaaccaagacttaaggtcgcctgattccaagaaccagctaaatgtccccaaggtgcgattgccttttcttctcttcaatctgttcaggtcctgaccacaaggctgtaatagccgccgagctgggtagccgtgtcacgttgctgtaaatggccatatagtaagtctttggctttatacggcttcatcgaggcaaaattggttgagttgaaaatatctattgcctgttcgagtcagaggaagagttgtttctttgcgcctagaccatgaaagt

SEQ ID NO: 11537 - DNA, 4006 bp, Emericella nidulans
gtaatatgttcgagttatagccatattcagtcgttgccacgtatatacggaacatgtaatcatcccatttctcggtcaataagttcccgaaccaaatatacatgctccttcgtctgtgcagtcaacaatctgttagcaaccacagcccacaagcaacagaagcagagaacataccatcagcgtaaaatgatttgccccttcagcgcgcacaatatcaaacaccgcccccggacaaaccacatcccacccatccggcccaaaatccttccttttctgcaccataaagtgcatccctttcattttgggcgcgttgtcctcgtccatcaccgtctcagacgcccagataatacctacctttggcatgcggttggttttcagcggcgcaacacggtagtcgagcatcacgtcgacagtggcctggaaatgcgggattagatatggcgggggctgcgcggtgccgtctgttgtgccaccgggctggttggagaagagaccgaggttgttgcagtactcgtagaacgaggtgggaagtttttccatcacttgtgggacaggtgcgtcgattataattagcgagtggacttcgttgcctgcattgatgagggcttaagctgttacataggcgaaggcgccaccggaggaccagccgccgagatggtatgggccttctggctggcgacgtttgatttcgttgcagaagctctggatcatggactggtgagtgcagttcatgttttaggggtctcgcgcgtaggggcagttcagcccgacgatggctacgtcggcatggagacgcgggattgtgaggtacgaagatgccgatccgccgccgtcggggagcatgaacaggatctgtttggccatctggggaagaccctgaagaactaccgaagtggttggacggcattcagggacccgggtatctgcggtagtgtattcctccggagtcgatgggatgctatcggtctcgtcctcagagctgcccgagcctgacgaaccggtcgtgcttccgcttgtggtgccaaagaactcttgtaggcgtgcaactgttggtacttcctcaaataggttgaacgacgagtccagagacatcccaaggtcttcacggaagcggctcgttatcaccatggagctcagcgaatcgatgccgatgtcagcaaagacagtctcagcgctcaactcatcgagcgccactccgctctcttccgaaacgattctgagcacgttccggaacagctcatccccaagatcgagtggctcgatgttggcatctctaactttgctgggcgcggcgtccccaatgcgtaagtctagttgctctggcgccgccgtctctgcttcttgaccaggctccagctcatccttgtcgttattcacacttaccgctgatccagagagaagcgttttgagggatctgacagtcgggcagtcgataaacaaggagaattcggctccaagttcaaggccaaggtcctcacgtagtctgctaccaatgaccatagagctaagagagtctatcccgatgtcagcaaaattggtatcagctgtgagttctcccaacgcaacaccactctcctcagatataacgctcaaaacggccttgaatttatcatctccttctcgcgataggtctctcgcagccaccactggttttccagccgttggcgaggttgctgatcttgagtaagccacctttgatgcatgcggctgtgttggtgacgactggggtttttgtttaagagctgcacgctgtggtgcctgggttttgacggcttgttgattcccatgtagacgagctgccttgtcggacgcctgctgcagaaccattcgaaggcctcttcgggggacacggcggagctaccacgacgttagctgggtctcctataagtgagacagacttaccgaaagccctttaaagaatgcaacaacagcatcgccatacagcacaatggtatcgccatgaacaagatctcctttctcgtcctctgtcatccgcacatacacttcataagtcttgcccttgacgaacggctggtaaacctggaacgagtcccatccatggtttacgaaaacttcctgttggatatccgtattgtcgttggcattcatagcaaagccgccaacctgagtaatggcatcaacatatgccgggtgcgcagcgaatgtgccctcgctcttggctgcggagaaatccattgtcgagaccgcttcattgtccgcctcgttcaggatcagatggttcaggagcttgtagtcacgatggaaactggccatgctgctcatcaacttgtatccgctcttggtcgtatatcgaatgaactggccctggcgaaggccctctcctaatttctttattcgttcctgatattcgggtacttttttctgtaatgacttgagctgcgcctcgcttgtgaagcgaacagtgcaagtcgcgtgctcagtatcaagcttgccatcggcgaagtaggtagcaaacttgattttcgcggaacgtgtggtagctgcagccttcggcggccatgtcatagtcagcgtcgtccgaagcagctgtggcgatttgccatgaggaataagggccttgtcgattaccatgtcggcaacgtcgacaacaccgtccatggcgccggggtgacttgctcgaaggcggttcatggaatacctcccaacatgaagggcgatatctgcatatactgacggggtacacagtggtattccatccaccaggtgaccttgagcaatctggttcacgtctgggcgagagatatcggtctctactaccagagtagccccaagtggctcagtcttctcttccactacacggtgcactgttgtagtggccactatctcgggatatgcttccttgctttcatcttgttttgaaggcctcttagctgccacctgctcatatataaaaaaatggtagacgctcttgtcagactcccttcgggagtctcgcacatctacaacaaatttcatggcggtgtacaccccattcccccttgtatggaatgaagtaatctttcaggtcccagccgtaagaagggagttcgatgactttcttcgcagatccaaacggctcgtgatacgcaacccaattaatatccaaccctcgtgaatacaacgtacccaagatattagtcaggctcttccaaacgtctagactgggtcccagagttggcagagccgaactggtgtccttatcaagtgtcgtctttatcattccagccattaatgccttgggtccaacgtcaatgacaattgtgcgatctgtgatgatatgctgatcgcgagcatgttcaaggactgacaccatcttgactggctcccggcaatggcgggcgaggtaaactggatccacggtgcccttttcatcgatcaccttaaccaaaagaggagacaatactggtatctgtggcttgtggaaggtcacaccacgggccacgttcttgaactcttctagaataggctgaacctgagcagaatggaaggcaaatggcagcttcagtaaagtacctttgatacctgtcgcagacagggaattctgaaggttcataacctccttaagtggtccactcaaaacagtgtcgttagggccattatgacaggctacttcacagttggattcggccaatacttcacacagcgtgaccggtgatgctcgaacggcgagcatcgcgtgggtgcctcgctgacagcgttcttgaagcagcttcgctctcatcccaaccaagtacaatgtatcggcagctgaaagaacgccgctgatgtataatgccgcgtattcgccaagactatggccaatgactgcacttggtttcagaccgaaggagcccagaaggtttcccaaagccatttcaagactcaccaaagccaattggacaataacggggaggagatcttccatgctgtcgccgactggcttggaggtgtagacctcaaggaaactgggaaacccatagctcctagccaattgatcaaagtcgctctagagtcaaaccggaaagtg

SEQ ID NO: 11538 - DNA, 128 bp, Emericella nidulans
tgagccctacgcgtggccggagtaaatacgatacgacaggcaggagccctattctgaggctgcattgccaggaggatcgcgccaggtgtgttcacgcgaggtggaccaaaggagggcagtaagggagt

SEQ ID NO: 11539 - DNA, 1548 bp, Emericella nidulans
gcacaaagcaccctaggcccagccctataaagcctaattcagttagactgccaagagtacctaccgtcaccttcatccgcagcctggaccttttctccacattcttgggacttgaacaacaacactcaagcgtcagaagctttggaactgaccaaaattgctctttcatcaaactcagtgcgggaacttcctctgtactgccgcataacattgcgttaagcgatcgacttaactgctgttcttctggagttcacctgcatccaggcatcacagcccagctcttattgctaggtagttcctttctccaataccagcgggcattctggaacagtgccctactacatgtcatggccacccggcgacccggaaaatcatacgcagatgccgctgtccctggctctacgccgggcgagacgccctcagaactaagctccgatacttcgcctgctgtgccgatgtgagtgttctactaactacaccttaaaccctacctactcctaatgctacatcgctaggcatgctagctaacaagtatccaggcatgtaatctacaaactgattggctttactatcgccatgatcacgacgcccgtgggaatgtatttcgtctcagtgacgtttgggggtacgtttgattctccttcatctcttctccgtcccctctttcgtctcccaagggacaaccgaatgaatgcatttgcttgcgctgacgatgcatactaaaagcgagcactactgttgctgggattattgcggccgtcatggcgaatatcatcctgtttctgtatatctatgttgcgtggcaggaggataaggaggagagggaagcggacgcggcgagaaggaagggggcgaaggctcagtaagtttctcagtgtatgggtgttattaggtatccatattattcgacatttagagtttgctatgttacctgtaaggtgagaatacctcttttttgtgaatgggctctaggatatacgtagggctattgttttcaggtagagaattgctttatacagcggtccgaatgttaaagtagccattaatggctaggtcccaaggtagtaatatgtccagtccatgttgaataactgcgcctggaaatgcatcgcaatcttgcacaggaatcgaaaaagcaaaaaaaaaaaaaacccgacgaggacgttattcagggtctccgcctaacgaactcttccagatctccctttgtcgcgactccgagcacaaacttcctctctgcgtctgtcactacagcaaactccctcttctctccattcgttccctccccgctctcaaaaaacttctccagttcctcaagcggcgtttccattgtaataacctgatatgtgccccgcttcctgttgaacctctgcatagctgccgaaactgtatccgattcctttaccttccctgccgcaagcagttccttgagtcgcgggatgctgaggtatccgagcagagagcggtgcgcggaggaggtacagtgaggtgtgtgtagtcaccttcaagggcggcagcaacgcaacagagatgggagtgctaggggaa

SEQ ID NO: 11540 - DNA, 2952 bp, Emericella nidulans
cttcgatactttgcccttgacggtatgtggtctgcattggatccccagtatgggttctggtcgagattcatctgactttgttccaggccgcaaatgaccgagtccttcgttatgcaagaggcaaatgtttgggtggcacctctgcgcgtaacttgatggtctatcaccggtaagtgctccgtaagcgttctacatcagtctcatcattcaatactaaccacttgatagtggaacccagaaaacctatgatcaatgggcagacatcacaggagattcctcgtgggcttgggaatcggtgctgccctacttcaagaagagctgcacgctgacgccaccggatatgaccaagcgcaacaagaattcgagcgtgacttataatgcagatgcattcgacaacgatttggatggccctctccacgtcagctggcctaattatggctccccattctccacgtacgtggaagttgggctagaaaaaatcggcattctcccagggcaagacacgaacagcggctacctcaatggctctgcttgggcagccgcaactattgaccccagcgccgaaacaagaagctcttcaaagacaagctttctacctcaatttacgttgaacttcaacgtctatgcgcacacccttgcaaagaagatcatctttagcggaactaaagctcgaagcgtcaaggttgagactctcggcatatcttacactctcacagcaaagaaggaaataatcgtttctgccggagccttccagtctccccaaatcctaatggtttctggaattggaccaaagtcaaccctgcaagagctcggtataaaagtcataaaggacctcccaggcgtcggtcaaaacctctgggatcatgcactcttcggagtcgtcaatagagtcaatgtcgttactgctagccgccttgtgaacgacgccctcgccgccgcagaagctttagccaatacgccttccaaaagggacccctcactgctcccggtttcggcgtcctaggctgggaaaaacttcctaacgatatccgcaagcatctcacaaacagcactcgtgaagcgctctccgcctttccctcagactggcccgaagtcgagtaccttagcctcgatggcattctagatggttggcacagcgccgatgaccagaacttaggagacggctacgaatacggcaccattgcggccgcccttgtcgcccctctctcgcgggggtctgtctctataaacagcacagacaccgccgaacccccccttatcgaccttggttacctcactcaccccgcagaccgggaagtcgccgttgcagctctcaagcgcgcccgacaggctttcaacgcatctggtgtcacaattcccggggttgacgagcatcgccccggcccggatattcagaccgacgaggagatcttggattttatccgctcgactatcgtgcccgtttggcatgctgcagggacgtgtgcgatgggtaactctagcaaccctgatgctgtggttgactcgaatggccgggttattggagtacagaacttgcgcgttgttgatgcaagtatctttccaactttgccgccgggacatccgcagagtacgtgctatatggttgccgagaagatcgcggacaatatcaggaacgggaattaagaccggctgtttcgatctgtgcctttatcgacgactctccccctcgtgttgtggcagagttcataagcaacattggccctgaaaacaatatattgggttatgtaaaaatggaagaggattacagttgtcttgagtaccttttttcctcttcttgtctattaccagtgtttgaaatgcattcagccaagctgcgtgattactgcgtaagagctgtgagttgcatgtcaattgtctatataaccctagtccggtatgagcatcaatggtctaatattgagcaagtctatatattctccttaaccttaccgatccaatgtaaaagaaatgcttgactacatgcggggtgtagaacttatcccaatcacaaacaacaaaaaggtaagccagaaatatttaagagacgtaggtataatgcaaggagtagatcgagagaagaatggtagaagtccgaagattaattttaactggtttaaggtaattcaggcctttgccaccgcatcgacctgattaagcgtagactgggcctctttaatcagggcccttcgcgcactccgagtctcgtcgtccacaacttcaatggagtccgccttaatcatgacttgtgccagaatggtctcgccgagcttcttgtgttcaaaatcacgagttttctcatcctgcggcggatccgtgatgtaccgattacagagcgggacgatctctttgcggaaatatgcggtcagaccttgtacctgcccaagcggagtggggaaggtgttcaggtttggtgctggcggtggtaaggcgtaacggctgccgccgtcagaagatgaagtaggttgtgggcgctgagcgggcgttgatgactcgttatcgtcagagtcggctttggacttcttcttccccttgttcttcttcttgcgcttgttcttcttgcttccatctgacctgggcgtgatctcgctgatgtttagtgatgacaatcgcggagtttcttcgctcgtccgcccaatagaggatacatcgctaggagtcctagtaccggactgtacttctgaaacaacacacagaatctcggactgttgcttgaggccctctgcacgacatggcagcgagtcatcatctaggagcttgcccttgtaaagcagtttgatgcggttaggatcggcggtacgcgtgacctctgccgcggcctgccgcagctggccaatgctcagggtgccatcgttgatagagtacggcgggaaatgcagttcgtaggttacttgcggtggttcagaataagcttatccggttcagagtcatcctcctctttatacagacgagagg

SEQ ID NO: 11541 - DNA, 415 bp, Emericella nidulans
atgttctctaagatccgacacgtgctcgcggcccgcaaccttattgccccgtgcatgttgctcatggaagaccatatccttggccctcgtcaggacaaggtcgggacttatttagctaaataagcagtccactactctctcctgcgtctggagagaccacacctgtgcgtaatgctatctgggcttccagtgggccatagtgctgctttactaacatattctgtacctgatgatacgcgtacggttccgacagcttttcatgcttgaccctgcctagtgtatgccggctcatgagaaggggcttgaattgctccaactgccagacggtgcaccgatgtgtgatacttctatcagcagtagacatatgttgacgtgtccataacccctaggaacacatctgcaacacgtcagtacg

SEQ ID NO: 11542 - DNA, 401 bp, Emericella nidulans
ttctaggatatttaatatgacctataggtagaaagaaatggctttggagtctaacgaagaagagaagaaactgggctcggcgtcccgtggagaattagagcgagggagggtagtgagagttggacgacgggctccagcgttgtgtttctctgaaaccttagcagtctgcttctttgttggatatgacctccgccggaaaaagcaccctgtgaccacaagtttacatgccagattcagatcttcactctcaaatctgttgtttcacataatgccgagaatgagggctaagacgctggctagctggctatagtgttgtagtacaaggccaacagatgggagagttttgcttagtagatgtgtcattgaatcatacattgccattactgtcagtgtgagtatga

SEQ ID NO: 11543 - DNA, 460 bp, Emericella nidulans
tttgaacttcggaccttcggaagagcagtcgggtgctcttacccactgagccatctcaccagccccgataatcaagagttttgaccggacctttgagtacgcatcgggatagtgaggagcacagactatggcgctgaaatggattattaaggaacttagtgttttgttccccccttctaagatggctatccatcgtagagaaggggagaacaaaacacccatggaagggtgttctctctctctctctctctctctccctccctccctccctcccccttctcatttttgtcgctaccttgcccttctgtctctcaaaaaacctcatgtagaactgttttgcctggtatggtccttatgaagcttcccaaatatcacaacattggtgctgaagatttcgataatcactaggcagaggagctgcagatcttaggcgaccatggagaaccaaagccacatgaac

SEQ ID NO: 11544 - DNA, 2447 bp, Emericella nidulans
cactcttctcctactattccatggtcatatttgcggttgctgcctttagcgggtggaagctgacgatgaggtctaagctggtcccgtcgagcgaggtcgatttggtctgggaacgaccaacagtggatgcgtacgaggcagtcaccacggagagaccggtaggattttggacggacatgaaagacatggtgagacgaaggagaagggatatttatggttcgggtgtttgaccatgaggacagtcccatcttgtaaatcgtcatgccctacctctaccgcgtttccctgtcaatcgacgtatacccttgcttcagcatgcgacaatttgttgctctaagtcgagatagaacaggcaagggagaatattagagagcctgtcgttcgcagttttagatataccttgcttctatgtacgcccagtaaaagacaagggctgctggatcttccaggacaaatgccctaacatattggcagtggattagatatgctactgtaagccagactgcatgatgccataagcaacagcctttccctcgactgcctagatagcgacggtgacgagcgcgttcgagaacgccctcgtcccgattgcggcctggaatatccatcgactacgccaaacaagcggcccagccaatccgaagacaatgcagccactggcattgcactttcatgcccagacgtcttacctttgaaaaaaagtcgctgatctgtgaatctcagctctggtggtagtcattgcgcggataagatgtaggctttcggcagcgtcagcgccaacctggatgatctgctcaagctcgaccccaggggttctggacagagatgctgatgatgaattattattcagagccccgctgattgtaggtgtgtccaagacagtggaagcttggtcgctgagaggcaaatgacattaagaattctggggagtgtcgttgaagctggagttgggatccctctcgctgggggaaatggtgatattagatatccaattgccggctgagaatctgatgagagaacggctgccaggggaaattgcaaatgtgactgctactggaataaaatacgttgtgggaatcagaaggttacctgccacagcctagaatgatcaaatgtaagggctcccttgtaatggacatcttgttaacacgaggaaagcgtttctggatggaaacagagatttgatgtattttcgttctttccaacaaacctgctttaaagtgatgcattctggcctagactttctactctatatctatctaggacgaggacatggccttggacttctccgcggccgccataatagccctcgtaaaggccgagcgtgcccccagcctctccaattccaacagagcctggatcgagcatccaccgggagaagcaattttctctctcaagacgctggggtgatctccagcaggaacaagcttcagcataccgatagcgctgttaacgaccaggttctgcacctcggatctcctgacaccttctgcaacagcggcatctaggagaccatcgactgcaagaagcagcaaagagcccgcacatcccactagaacggcgcagatgtcgaaggaagcctcggggatctgatgagattcgccaacctggccgaagatccaggacgcgatacttagattctctgggctcgtgccggggctgggggtgtagagcgtcatggcctcacggattttggcagccatgttgggcatcgcacggacaacttgcagaatgcctggaacaacgccgtcaccaatcgcaagacgagcgaactcctttgtcgtaatccctgccataatgctgagaacgagcttgttgcggatggcctccttgaaccctggagcacagaagacctctgctcgcttgaagggcttcacagcaagtaagacgacgtctgcttcttggatggcgcgaacattgcccccatgcgtaaggactgtcaatcgcgactcgtgcgtggacagcgcatctctgacacgctgtttggagggctctgtgcccactgtagctattaagcgcttgatgttgatgccactcttgtcttttggatcgaggataccagccgcgatggcagttcccaaggtacctagttgtatcagtttcgttctcgtgtcattgagagtgtacgtaccgcagccaatgacggcgactgtgaggtcaatgtcgattcccatgttgattttattgtgaatcgctcgtagggtcggctctagctctggtttatatcgtcgtactgacctaaatagacccagggcaacggcagtccagctcttctcggcccgatcacggttggtctactgctatatactactcgggcgggtatccgagccaacaggctcaaagacaaatgagatttttcaactgctaactatgctattccggaacatgacatgcgcccagggtcgcgctcccagttacgtaggtgtccttaccagaaaagctcggtt

SEQ ID NO: 11545 - DNA, 2981 bp, Emericella nidulans
ggcttagcagataaagactgtgaccgtagattgtgtgacccgaagtcatcagagacagcaacaggagcgccagtccaagggttctgccattctgtcggagttgatgggagcgaaaaagcttgatcgccaggctgatgcagtgagtgtgagctagaacagcctggagctgcttgattctgtggtggctttgatagccggtttgaacgtcggcggttggctttagtttgcaccgagaaagagcttcccatgactctcagtgaaacctagagtctcctgggttagcttgtcctggtttcaactttatgaatagcatgagtggaactgaaaagccgatcaattgtaaatgaaatttgtagaaagaacaacattggggaagcaaggtatgcccgacaggaattcgatttggagtcggtcagaacatacatgcagtatgtatgccagatttgggatgacatgtcataaagcggccggtggaccgcttccatgccaaccgactattgaaaactcgaatgaatttccttcacttccctatgctccagctccgttttcgtggtgaaagggggagtaggtatagtgccagtgtggtaggctctgtggacagatacacttacctaatagagggctgcagaagcaaaggcaatgcgtataataaatgatctaacgataaataagtgggcgtttgggcaagaatttggggattagtgcagataataacggggtatagataggaaaccagagaaccggcacttttatacaaatggtggccgaatttggacagaaaaataatgatatgtatggagaaagaaagccctggttcagcacaagtagccaccccgagggaacataaggcgctccatgagacatagaagaggagctgtacggacgcgatcttaacgccatggtcggtcggagatacaagtaacacacaatgacgaatgcgtttgttaatgacaatgaccaaacggaaccggctccagaagatgacgagaccggcagcgaaaagccgggggccagttgacggcgcttagaggggagatgcgtggacgcatagcaataaccttaatgcaaccggctctgtaaacagtgtcagagagtttaatcagtcatttccggtcgcggacagcccaccagagcccacccaagaagcgcgttcaagccgtctgaaatcatgacatacatagtcacactctcatctagtttaggaccttaggtagcaatccagggaggtcaagaatgttcattgatctgcgctagttcaacggcgtgttccttgttcccatgatgggcgggtcggcgggggaccgttcggagatgcttccatcaccgtaagtttaattgggatctgctcaggaaacaagaggaaacaagatagagacgcagtcacgcagtgagaacgtcagttgcgagaccaggatccatcctggtacacgaggctttgatcgaatggcgtcctgaagatctaggagggtatcgcgcctcagggttgcaggatgtagtcgagcaggtttgttgtggatggagtggatttggcagcttcattaccccgctcttcagattctaatgtcaaccaaccgctttcaaccaggttggacgtcctcaacttccacagcaacaaagtcagaaaggacacagtagtgagccacagcaaaatactccggactttccacggtctagcattggatacccgatctgacgtcttgagagggtaggtctgcctgtggccttaccggttacggttagagattattttcgcattcggttcgtagctggatacgcccaggcggcggatcaactactgcgttttactacatacttttgcatccagctcctgcaagcaatcccaagctctgcagctgcgactagacgttgtctgtgctcgaaacacctgggtactgagtgttgatttccgaacgctgggcacgagtcggtgtacctcggtgaagcattcctgcaactgaaaagccttctgctttcccggctatcgctcgtaggatttgagctcaatggtccaaatggccgcagggacaaaacagggggtgttatcgtcttttccttatctcgcgaatgacgagttcgagagtggttgccgcgcctttctgcaccgagttcaattgaccggtaggttaccaatgcagtggtcgtcggttcggttccaggtaaatcaattattcaagccgtcctttctcattcttcaccccattagttaattcatctcagctaaccggctagacaaatggccaaatcttgaagatctgtcaaatactcagccctgactacgacggtcccgcacggtcactgcagatagaagacacagcggacttgcagctagaagcgtgggaagaggactctgtaaagagagattggccctttcacttatttctcattaccttctgaccacagcagcaggaagcctttatccgtacatccaattcttgtgagctacaggtagactatgatatcctcctctcaccaacctaccaagttcccgtcctatattttgtcttacggcgtatggacaagcttctgggcttagatgaagtctatgaatatctagtccccgatcaatgtaagaggaatatccgaaacatgggtatcatgggtggtattagtttcggtgtacgtgccagtaacctcgacactgaacgcgcggctcatatatggtagtatcatccaatattcgaaacaccagcgttctttgtccatccgtgcaacacagcggacaccatgagggacgtcgcaagcgagcatgacatcagccccgaggcatatctcattatctggctcggcttggtgggtagttctgttcgtctccaactgtcaagtgatctcttcaaggcaacaagtatcccaaagcccaatgcttaaagaatgcccaagatcgcctggttgttgaagggcttctttagctcaagtattatgctccttgccatatttcaaactaatcctcgtctgagcaggggtgctttcacaaaaatttcctc

SEQ ID NO: 11546 - DNA, 145 bp, Emericella nidulans
aacgtactacggttatatggtactcaacctgctaattcccgaccatcgctccaggaacaaaggatgattatcgctgcgttcttaatccgctcatcttatgctgacagaatgttaccatgttgaaaccagcgcgggtctgaaaaac

SEQ ID NO: 11547 - DNA, 459 bp, Emericella nidulans
actcatgccgactgcctcatcctagccatccggtaacggctcgtagagccctgtgacccgccaacaagaggtgcaactggatggggccggagccccaggcattgcacggaccgagcccccggccgggatacagtacgacttaggggattctcgcattgtagcccatttgatgatacaggatcatgattgtgaccagcatactgggccgccgtttgtgataccggacgatcatgaagagaacacggaagcttgacggagcgactagatagtgaccagcacttacgagctgggcctgcgagcgacaacatcgacatagctatgtgaccaagcagccattgttgtaagacctgcctagcgagcggatccggcaccataaagactgccacagcaggctatcgtagatggagctaacgccttactgatgactatacgatgctctctgacgtcctagagaagaca

SEQ ID NO: 11548 - DNA, 206 bp, Emericella nidulans
tgcatgaagcggggaggatgatggaattcgaagagccgggcagtaagcgtaagagggaggggacgaagtagagagaactcgatatagctcgagagtaatatgggaacgaagccgacggggtatagtaatgcttgagcaagacgggaaggaggaagttaacaaactgctgcgagtggagatcctacagaatacaggaggcagtagac

SEQ ID NO: 11549 - DNA, 261 bp, Emericella nidulans
tggctctgtggcggaatccgaggccgccggttagaagtttcctgtactcctgccggcccacgggccttttttgggcaagtgaaagcaccatcgactacgagatctgaccgacttgatctagcatgctccccttcaaccttgatacttgccttgtagctaacattgcattctggcttgtgtgtcctagcagacccacttaatgtctatcggccgccgcctagataccccttgctcgccgaatcgtactcatttgtacaagtg

SEQ ID NO: 11550 - DNA, 1622 bp, Emericella nidulans
caaaccgcagcctccagctgatagagatgaagtcatcgagaacgacgaggaacgaaagggccacttcgaccggcctctacgagaagtccgcgttggagaatcaccgagcaggccttgggggattcacgttcctattccaccaccagcaatggaacctactacgcatgcgccggcaaccatggaacggtcgacggataaaccgcttgataatgttgcaacaagtgccgccaagggtcgttgcccgttcggtcacggcggaggcgtgcctcctccaaaccacccagccatagaaacagatacggctcctaaagagcctattacgacgcccgacgccacgagcacgaacgaagacaaggcgactgaagttaagaatcctccaaatctttcgacagccagcatcgtgttcaatgggccagtatttttcgggttctccccagaacagactgcggagttcatgcaagagctggccacttggggccacaacaaatcatgatcctgatatccttttctgttattatcgatgtgtactgtgtacttgcgcggctgttactaggaccaaatctgtgtaccaaagcagcgcggagtctgggtaattgtacaagtgtactaaatatactagtcctaggtcagtcggtctcacatgtgttgacaccataatacatttatatgtgcactctgtcttatctgcacttctctggccctaactcgcctctgattcttatcaggagcctccgtactgcgtcgaggaccgagtatgaccccgcataagttctccgcaaccgagaaacctcgggattgattctaacgggaagccgtggtgccgctatagtggcctaggagggggcatcaacaagtgacaggtaaagtggatttgatcaatcagcaagactgtcccttattttaaataactccagttcctgcctacttgttcgctttgtcttgttactctattctgctgaaccctgtgtcgcgcattcatccctcgtacattagtttgaaactctacaagctacacctgcaagatatagccctttagctcagtcttatctgtccaagttttctgcagatcatcgacaacatggtggtatatctccctgagaaggactatgaattccctaatatcgatttgttaactcttctttttggtatgacccggtccattttctcgcatgcctctcgcattgaactgacgttacagcagaatcgcccattccacatagcacagagagcacagtacttcatgctgaagcggcggatccctcgaacgcaaccaccaaagctcagacgcgtcttctcacccgccagattgcgtacatcttgcgcaaccacttcggtgttgggagccaaggcgcagggaaggatgtcattgtgggtgtttccgaaggccaggtgttattaccgtccgtcttctatggagttatagcagctggtggtgtgtggagtgccgcttcctcaaccgctactcctcctgagttggaaaggcaaatccgtcagggaaacagccgtttgctcatcacaggcccagggtgcaaggatgtggtgttaaggcagaaaaggctgctggggtgccacagagccgcgttcttattttcgaagtcaggccatagcgtggtttaaagttc

SEQ ID NO: 11551 - DNA, 1041 bp, Emericella nidulans
gtttgatggagcccatgtgtcaaagatctcacctcgcctatctattcactttacttatcataatgtgcttcactactcatctgcctaaacaccgttgtgttatgctctattatcagtgatcagttaccagttcaatgcttgataaatttaataggagtcgtcaatcccaaactcagatcagacgcaccaatacgtgccagacctacatttctccctaagcaattatgcaccgcgacgtctataccatcaggacctcgaagagctagagcttgggaccgggcacgacgagctgccggttccatacagagacagagaaatcccacacccatcccgcgtctaccgtcctgaaccaaagctagcaggcgccgtacaccggccggtcggtatatgtatgcattgattacatcaatcgtatttcgctgccatactatgtcatgctatctatatccatgaccaaccccaagacgaaccaatgtcttaaagacagattattgtgaaggccttcttcttttccttgcctttctttttccgatttttctcttcttttctttattttctaaacacggtatagataggagatattgtatagcacattgaatagcagaaaccagagatacaactaagggttagctctgtcctctatatattgaatctctgacggtgtagcgatgcaacaggcgagtagacgatcgtatttgctctactgacgccacccccacgttctttgctgcggtctgcagtgtccatgtcatcagacattactttgggatagcactgttgcgccgccggccaggaaatgaaggcttgaccttgttcgattatactagcggttgcggcggcagaggcgcgaactcataccgtttgaccacgttcatgaacctagatctcgttggtgaactctatcgcgcacgatcttcacctcttacgaacctaggaaggtcttattatggttttgggtcccggtgagagaagagtcgcgaaacagacagggaggtcggtggcttgagattcgtggcaaagcagtgtagtaaatgttggatg

SEQ ID NO: 11552 - DNA, 925 bp, Emericella nidulans
aagatatacctctcaggcctttattctcgccggccattctggcacgtcgttctggccggtcattttggcggctttttggcgggtctctctggcgggtcggtctgcctgttttagggcattagcagcacggacagccacttgcactgtaccaagatgaaacctagccggggccagaaactgcgccggccaaaccttctttgatcgctgctccactctctgggatccgctgggcccgtccttcgagacggaggtggactacggaggactccgtagtaaccctgacggtccggtgggggcgcggctggaggggcgatgtgctcgacttaaacggattgacagacaattgcggccatggggattggatctcgatgtgatcgacaatcgcattccattttctcaggattcttctatcggaaggtatcgatcgcaaatgatcatgtccccgtaaattgttgttggggctgtcttagtagtttctctgcagattgggattgcagaatggaccgctgctgccaattaatatataatatcgttagcacttccgaggtcttccggggctatacaccagagtagtcatcatgcccttcaagaggccaaggcatcaaatccctcactgggtcactggggttgggatcgagattgcatccatagcgaaccctgtcaatcctgccctagcgcggcgacggtggcttggctgcagccctagttcacgcccaccacaacggtgcctctggctcggacctttctcctttccccagcagaatttgaggtttcagccaggctgaaccttcagcgagcgattgcacctttgcactcaggcaaggatcttgtcgatataagaaggcacaatgtcccaacgaaaccgttggttcaggccgccccaggatgataccccagaacggtattgcatagcctcaaggactga

SEQ ID NO: 11553 - DNA, 108 bp, Emericella nidulans
tccaccgtctaaacgcaatcatcacaactgagccaatgcgaccacctccagcactaacccacactcacaactgtgagaactccgtaactcgtgtgtcgcgtacacttc

SEQ ID NO: 11554 - DNA, 1155 bp, Emericella nidulans
gaaaaggatgaacccttgaatcgcgcgcagatgaaaccaacctcaaagctatatcatagaccaagtccaaggcagcagacctaggcggttcgatcagtagaccaagttgtcgtaatagcgcccgtccatgcccgccattgcgcgggcatctctgttgaagggctctttgaggcctccgacgaagtacttgcgtacgttcgagcgaaatacctccactgggtcggtatgttcttgctcgcagatccacgtaagccatctatggccggttgtcacatgggtaatctcatcattgtgtataatctcgagcgcttgaacgctctcgtcatcacgcgcattgcgaaacttggcaatggtcattggattgacatcgagaccacgagcttcatgaacgagcgagatgatgctgatccttgctcgaagatcgtgcgctgtcttggtagcagattcccacaagccgtggtgaacggggagagcgccgaagtaggaacccatttcctccaggcgggtccgcagtaacgagaaatgcttggcctcatcattggctaccttgagccagtcgtggaagaacgtccggggtaattgccgtgcagactcctgcgctgttggactggtttggaactctgcgaaccgcacgcagatgtctatagccagatcaatggcccactgctcgatgttggccagagcatgcagcatagcgatcctactcttcagacttcctcctcgtcctggttttggcatggcgctaggccggacttccacgaggttttcccgcggtggcatgggagggagtgacgcaggacttcctcgaatgatggtcatcggtgagggtgtcccctccctttcggtgaaagttgagaatagatgggcagtgagttcgatcttgtgttcaggattcgaggtgtttaggatatgggcgcaccagtcgcaaagcgtagcatcctcgtcaagatacggcgcagcggccgccagggttgatgcaggctccgctgaggccgcagcagtacccgagcaaggagttttcaatttaatcttctcgctgacaggctccaacttctcgatcgagacgccatccgatgggtaggtcaaagtcaccgcgtcctcttggacgtcaattggaaatgtgcacgctttgataccgacgctcgattcgtaagc

SEQ ID NO: 11555 - DNA, 531 bp, Emericella nidulans
ctctgaatgcttctttgggcctcaaccagcagaggctggcgccacttgcgtcgtacactccggggcatgtaatgtttgtccgtgccgatcactgctgattgttggcgcgaagagtaagccgattgcgttctgcgactacgcaggccctaaggatggcgctagaggcctccactgatcagtcctagtaactctgcggcctatgcacctgcatgagatcactcattgaccgaacgagaatgagcttgtgacgttcagctatggtaagggcaccttggacagtcattgttgaaccatagcagctagactaatgctcagcgctaaccacacttgagccattccaatgcaacagtgctaggcacctgcacgccataaagcgtcaagggcagatagtccccgataaccaggccccgcacttggttacattcacacaccccgttaacaccttacctggaacttgttgtgcgcattatgcaccatgattactatcccgaggctatgactccatcccttgtacaaaaacaccccattgct

SEQ ID NO: 11556 - DNA, 478 bp, Emericella nidulans
acgatcgtggatgcgcatcccgagacgctgactgttatctctaatgagactatacactggccgttctttttacatatgatagaagttctgagccaatgcggacgagaccagtgctgtgaggagctctcagagaccatgaacacattgtcccgcgctatgaaagagcactaaggctggctgatttggccgaattctatggccggctcaaagctagcgtatctgccgctgtgaagtaatactcatacacaggccgctattctacatccagtggcccatgacgcacctgccaatgatgagactactactgactgagaagaggatgccatgggtattggaagcgctcttacctggccgcacgcatggatattcaagggactcaatcagtaccggctaccaggtgctatggttccaagaaactatattacacttgaataccgcgctaaaatctgtgcacttctttggatgccacctagatatc

SEQ ID NO: 11557 - DNA, 184 bp, Emericella nidulans
gtgattgtagagagatgcagttggaagtcggattagcgtgtgaagtgaagatggtagcatatggtgactgagatttgttgagtgaacaacaaggttactgaacgaagaagaatctgtgattaactgcgataggcctgatgctgattgtcaacgtcttcatgatactgcggtagtaaatatatca

SEQ ID NO: 11558 - DNA, 170 bp, Emericella nidulans
tattacaaatatattctatattcttatcttataagctatattatatatcaaagaataacttattgccaggacagattattaatccttagggcctagtagaggtcaacagctaggaaatataggaggttaaagagattataatatgaagactgcagaaaaaagctgcaata

SEQ ID NO: 11559 - DNA, 472 bp, Emericella nidulans
agaacttccggctgctgctgatactcaagcccacgcacatcgcccgcctcgccccgtacaaataagtaatgctggagtcacagaaacagtggctggccctgacagccatcatagagctggagtctgtcacagcattgcacgccatgttcggcagctcccaaagcagtccttccagccatcgtatccaacacctttgaggctgccgtgttcctgcttagtctttgctgccacggggacttcctccttgaccaagtggaggagcataatatgctactggatgcttgacgcgcgacaaggccctccaggcggcggacaggcactccgtcggctgcaaatgctcgctcaagttagtgagatggccgcatctggggctcatgtggtgacccagctcttcatcaaggccgcacgaaaacaggcgtcggagccggtgacgctgatgagtccattaggagctcgcctttgccgggctcgt

SEQ ID NO: 11560 - DNA, 2426 bp, Emericella nidulans
ctttcctgctgggcaacgtccaatgatcgcattaattcgagcccgtcacagagtcgtaggtcgtcctctgcgagaacctgtaatattcacccatcatcaaacattgtctggtggaagattcgagcggtattgtacatgtattcgtcattcttcgtcttcgatcgtagtgccggatgtacgcaattctaaggcccaattcgtagctagtaaagtaagtagatccctattcatcagggatcggaagccaagaggatataaagctgggcgacatcaactgcgctggaattatggacgggaatcttatcggcattcagaccatctgcattcttggacatttaaatagtaggttggcgtagaagctgtaaaatgtgtccgcttgacctctaggaataaacgcacggctatctccttatccagacaagggtcctgtagattgataattatgataggacgagtatgcataattcatagaatagtctctcttatcttaacttatgatcataccatagaactaggtgcatcgtcattgggaaatccttttgaacaggtacatcagcaagcaaataaagctccttgtacaagttcacagactcgcaatcgcgtaagcccatccgatactttaacactgggtgagaatctcagaaactgcgatcgtcgatcgctggtcgctgtaccgggatactgaagaagtggggagccttattgggctggtgctactggagtcatcttgcatgaagtagcgttgtctatcacgcgatggtgatctaagagctcgactgcacatggagatgaatcctatgacccatacgaggcagcgcttgacggccatttaattgcaggaactctgataatagcatcgtcgcactgctctattatctcgcattcgactatgatcgtggaaattgtggaagcaagacggtctccaagaataagcgaattcccagaagcgacgaggtatcactgatttggaactttcgcaatatgatgagtacgaaccgcctggacagctcgtcaaggctggcgtcagtgtaagatggacttcttttgggcaaaatctggaccggcaaccatgagatccttgtcgagtgttttcggaggcaccccgctccctgcggctctgcagtctgtggcgccacttgtgctacccagctctaaggtattgaacgatatgattttccctgcagcctgttaagcatttcccgtctcgtctgcatcggcttcgacctattcagacagcgctagtaccggcggctccctatgtacgcaacaaaatactaacgcgacattttcgcaaggcaagactcgctagaacggctaaatgtggcggcgttcatagtcatcagagatctggttccaataatggtttcgatctcaaccacttcattgaccgggtttgttgtcatagtttattgcgtatggcattggcccaagtctaccgaggaccgcgtcggcagcaacgtcgcaaaaccgagtgagtgggccagtgacctcaaatgacgcggttaaaggttcaataatcatgcatatccccgtgagttgcaatctgtataccagtatagatccgcttttctgctccgctgcgctgctaacgcggctatgtggatcttggtggctgggcaatgcttgaagatcatggaagctggtcggcatggcgcagtaaggagtaacgcggggtttggctcgtgtgccccgcgccccaggagctcagtatttggttataatgatgattggccaatggtttcattgatgaacgatgaactgccatggacgaaagccgagagcccctggacagacacaaggaagaaattcggcattccatattaggtaaggctcgtggggttccctggagcttcccccgcacgtcgtagaccccggaaaatgctccttagccgagttcattttatcttcaacccttttctcccccttcttccctcaagcctgcgaactattacggtttattacactactaagtcctcagcttgtagcgtgcgatcatagccgcagccatggttttcacatccccaagtcctgcggtgttaccgcctattcctgacaatattccaatcagcgagttcatgctcacagacgccaatggccgctatcctctatccaaagcacgacacccatttacctgtggcctcaccggaaagacatactcggcgctcgaggtcaaggacagggtagagtatatgtcgcgcgggcttgcgaagttgctcaattgggagcccaatgggggttccgaatgggataagacacttgttatctttagcttgaacacagtaagtcttggataattgttttatgcctggaacagatgcttatcttttaactttgaagatcgactcgattcctttgggttgggcgacgcacgagcttggcgggattgtttctcccgccaatgccgcctactccgcagatagctaagg

SEQ ID NO: 11561 - DNA, 572 bp, Emericella nidulans
gaagaaaaaaaaatggagcttcgagtcctagtgctctaactatccaacacaagtgtaaccattgcctggcgaatacaccgccttgtccactaccgcgtcctcaaccggtgataccagcaatgctgttgcgattgtgaaccacttcccccttacttgtctatggactgattcctacgttatattttattatggtctgcctactctgaaattttcactgcacctcaccctttggttcctaacaagggcatgacccacccgactagactttactaacactacgcatgcatctctctactaccactttacgaatactcaagctttatatgtcaatacactggtaactgatgcatctctaactaatatgctaccaactgcccttaaccccgccctaagatttggtctaaaataatgtttacggcatatataaagccttgacctgtagcattgcctggacaatcctattgcgaggcttcatacacgacattcctactaagatactccaggcttcaatatctgccttgtcttcatggccgcttttgctttcatgggcttgtacacatactatttcccat

SEQ ID NO: 11562 - DNA, 139 bp, Emericella nidulans
agtaaggcagaacccagggatgagtcaacggaaccagcaagcaggagtagctatagcaagcaaagccgggactgtgaattgcgttagccagaatacatgcggttcacttagctcttggattcgaggcacgggcgatccg

SEQ ID NO: 11563 - DNA, 223 bp, Emericella nidulans
ctttggtgcttacaggcatggccggacaaatggggaattgagagtgcttacttctgcattagtgcggtcagtgtatagtcgtcgctgtgaaacacgtaggaattatgagaaggtcgggcatgacatttggtcgagtgaacgatagatgctccagtatgtcgtcctcgtcgaccgaatacgccagagtgggctcgagcttggagcgctttcgttcccattcggc

SEQ ID NO: 11564 - DNA, 2985 bp, Emericella nidulans
ccatagttagtctcagtccaaaagagaaaataggggtctagactcacgtaaaggttcttgaggacaaggtagttaatgttaatccacacagggcttctccagtaattctcagcagtgccataaaattcatccttcttactgagacttcgaataccatagtcagaccaaagctcctcagggtcttcaatcaaatccaagatagcctccaagcgaggactgtccggacccacaatgcctgtcagaaacggcgcaattgagacatatcccttgtggcagacgtgaacagagtcttcgtagtcatcgattgtggcgtcacagtaggtcttcgcatccgcgtcccagtgaagatcgtcgatgtttcgttcgatggcggtttcgtaggccttaaactcctcaatatcctcagtttcaccaagggtctccgcaatgcggcgtagcgcccgagtcatcatacccatccagctaatgagatccacgtgaagctcaccaggatgaggaggttgggcccggggatagtcatccaatccagatgttaagatgtgctgcacagaccgtccacgccagcggtacgcctccttggtcgaaaatgcctcacggtcgtaagacttgatgtcaccgtattgagtggacctgtaccaaaagtagtgcttttttagtagagggtaaatggagcgaatgaaattctctcccagcttcgggtgctttacatagacagagtgcagaccctcgtcctcaaggtaagtctgcgtcgattcgtcttgcgcctcaagcttatcaacaaaagcttctagtaccatgaagagggtcggcgggttggcgtagtgagggtactggactgtaaactcaggcgggaccttgcttcgagcttcgttacccagaatctgctcgcgcgcaatccagccatcttcgtccatcaagctgaaccaactcttcacaatttcgagtctgtgaacagttagttattgtgcatccaggtaaagctgcttaagccaccaggtgaccatcggggaggcatacgcaagatcagggtcccagtctaggattggtatcaagtggaatccctcatcccagagaaaaccacgtgggaagaatgggcgagatggcacggcagtaaaaagatcttttggcccttcaagcacaggttgtgcccggcttctggcttcctctgtttcctcccagaaaccttcattctcttcatcgtactccggggcagctgagcggtcaacaatgtctgagccatggaagaagccgatgccaccgatgaggtttgagagcatggacttggagaattcaaggtaatctgcggaatcaaagggtgactgcggggaaagtattttcttgaacctctcggagaaggagagtgaagcactcttgatctcagcagtaaggatctccgctacaaattaattagtatcgtttacacttgcaacatctgatagccaactcacatgtgagaggttccggcgcggaaccagaggagaagagaatatcaaactgacaactgtgagcttaattaccaaacaaatgaggtcatgatggcggcatacctcaaaagcaccggagaaaaccttttgtaccaactggacatttccatcacctggtgaattgttgacggtgaagacctgggcagggggtggcggattctccgctccatacttctgaatggcctcatcaactgcttttttcatttgcgtaaacagcagcactggagtataatcagcattaactccagaagtacaaaccaagcactaaccctttgtctgccaggtgtgctccggcggcaccggaaaactcgacactatggtcctgtccagcggcttgtcatcatatgagggatgattatacgcaggatgctcgttggtcttggggcccgcagtcacatctattgagaatcgaccaagctcagccgtgaacccgtcaagtttaacgtccccctcaaatcctctagggtcgtcgctctcggtcgaaacccccaagctgccaagtccctctagaccggcgtagaagaccaccgtcgtgggctgatcaggcagagcatcatctcgagggacacctttcacccgtgcggcccagctgcctccatgttgtccgccagggactttaacgaagtcgatagttaagtcgagcgagtttccggcatcgtggattgtttcgcggccgccttttcgaacgtcatactcgtcccagccgtagcctgccattccttcgttctgttcgcatgtatgcctaaaatcttgatattgtcagcagggttcagtctgaatgcctttggcgtcaatagtcattggcgatgaacatgggcgcatactttcttgagcggttgcatagttgtcgacctttgcccacatcaggcccgcgaaaacgctattaggtattcgaggacgaacaccaaagtataaattcggcttgtaaggaccccatagtagcgattcattgctggctctggcagcctcgtgggctactgttgacacaccgtcactaacttggacggcaagcgcggccgcgcagaacaggggcgctgaaagtaatgaagatatcgagagatgcattgttatgtggacattagaaaagagaaacaaaacagcctcatacactgaggaagagcatgtaagagcctacttcaagcaaaactaattgaccagctctcgtgcctctgtaacgttgttgcggagttcttacctggcatcaccgggagcttacgtgcgctcggcagatcgacttggcccaagctccgctatatgaagtatactccagggcactacggtgccttacaaaggatctatgataattactcataaattccatctaaaaaccaagcagcttgattatacaacatctggtacatatttacaggacgtttcttggatccagagattcaatgttggcactctttgcacggccatcaaacacgaattcgctgatcagttttcctgtgccaggcgcattttgaatacccagcaagtatgcccagcagcaagataaagt

SEQ ID NO: 11565 - DNA, 110 bp, Emericella nidulans
cggtaccgtcaaccatcaccagtggcgttgagtcggtaatagagtggatggttaattcgacattagagtcagagtaagccgtaacagccggagatagcgccgtgatttgg

SEQ ID NO: 11566 - DNA, 145 bp, Emericella nidulans
tgtcattagatgggctctgaacatgcttccatccatcatttccgtctacggtccaagacgcatatggcgacatgatgtcctagtgataagagcctcactcgcatcaagaggtccgtctgggatatatactggggcaagcggtata

SEQ ID NO: 11567 - DNA, 632 bp, Emericella nidulans
atccctagcctatttagcaggtctggctgagcccagtgctatagccattgcacccaactgagtctgagatcaagggagacgtgttttacacgagaccttttcaaactcgggtaagggatcacatgactcaatcacaaactttaagatagactatgctccaagcgacaggactatcgtcactggcctatgttattatgacgtgctttttaccaacgtctatactaaattactgatgctcctgctgtggatgtcagacctgtagcccagcctatttaggcctggcattcaattggatagatcgacttatcataactatcccaattataccgcccctactgacctctaaagatgtaatacagaccctgctttatctggctatcaagtctatacaagctgactatatccagaaatgtacgtgtcatctccccggcccttaactgtactgacactaggagagactctctcccaaacactatactatcccagagccatgtttactcttaattatctgggcaagatggtcaagcatcagataccccatcgagtcccatctgatagatccaatactgtcggacctatatacttctgaacagacgtcactgagaacaactcaacatatacgaatactatca

SEQ ID NO: 11568 - DNA, 966 bp, Emericella nidulans
agcattgtcgtccatgtactctagatcattctgtaactattagtatatcaaaagctttcgaagatgatgtggacatacttcgaacctgctgtccttcgcaatcctctcggcgagacgtcgtccctctccgccaaactggccgcgactcctacgctcttcttggaccatatcctcaatcgtcatgtcctcattctcttcgacctttcctcgctccaagccgcgtttcgtctgtatggctttaacttcgttcctcttcccggccagcattctattctccatgactccgagcaccataacgtccggttccttcctattagccatagcagccgcggcggcattatattgctcctcgagctcagcagcatctggagcggccctgagcttcgctcgcatcatttgcgcctttagtttgttcagcgccgtgagatcgagatgctgcgttgtctgtgcagggggtactgtctccatcacctgcccctgcccacgagcgctgaactccttctcaggatcccggaggtgctcatgcacatcacggtggacattttcttgttgcttgcgctctcggaatagttcacccgtaggcttctccttcccaacgtagccctcaccgtacgtttcgcggcgctccaattccgcttcctcttcacgggcatcatcaaaagagcgcagatccccgaagcgctcaatggcaacctcctcctcggaacgaccactttccttcgcctccctatacacgcctttgagcttggtcattctccagcttgaacccgcatcgccgaaggtgtaattgacctcatgttcagccggctcctgctcaatctcctcgagtgccttgccatctctcagatcgcgcaagtgggtgttaactccttgttgtggattttaagctcaaagtccgcctgcagcattcgtggtttcgctcctgctcgagtcgtgtcttttcgcgccgctggacatagtcgatgt

SEQ ID NO: 11569 - DNA, 557 bp, Emericella nidulans
tgctatccccgccttgtattggttgtgtgaggctcaaatgtcttgctccatcgtccatcatcatggatagccgcgtcggcctgagcaaaagctgaaagcacgtgcatattggattcgacattctgtctgtgccatcctcttgtagtgacggggggtgatcgctgctcgaccacatgacattgcgtatatccgcactgatgtaaccttaccatactgtgctagcagctgcatccccggtggaacccagttttgtacgcatgatacgatagatggagttttacttgaatccagctgatgaacaggcaggactgactgaccaagatcgcttaggatagtgactgacccatacagttcgtgccctgtacgaccgaggacactgggatgccttatgccacacaccgggcagcatgctgccgtgtgactgttcaggtactatccgcacttatattaaacctctcataggtggccttgcatttataccggaccctacaaaattacactggggctgactgatcatacaggctgagacatatgcagtgctcgccactgagcacaat

SEQ ID NO: 11570 - DNA, 3605 bp, Emericella nidulans
  unsure (1)..(3605): unsure at all n locations
tatgcgggtgttactcgtagacttatcactgactttcctagcacatgaacctagtgctagccgatacggaagaattccgtcgcgttaagcggaaagcgaagtcggcacccggaaacgcgccccttgtcgaagccgaagagaaacgaacccttggtcttacaattgtccgcggtactcacgtcgtttcttgctctgtcgatggacctcccccggccgatccctcagcacggcttggaggcggtccgagtgttcccgccgctgccaccctggccgccggccctggaataagcaaacccgctggacgtggtctgcctgtcggacttggaggacctgctgctggtgtcggtggaccgccgcctccaggcggtttccccggatttcctcctggtggtttccctggtgcccccccaccgggctttgctggacgcggaggccctggaggacctcgtaagttgattctaccctgaagtctgatatatgaagctgacaagtgttagccgggttcgctcctcctcccggatttggtgctcctcaagctcgtaagtactcccattggaaatgttaaaactacgtcatctgacttctactctagctggcggtttccagcctccacctggcttccagcctcctagtcagggtcggggttatcctcctccaggctttggaggacggtgatttggctcttgagttgtgtgtgatatgatagcttgacaatacaccaacggctgctgtgctccagtattgacggagcacagagtggaactaaactggagctgagagcgcgggctagttattaggtctgcccttgaattagcagcacctcatattttacaggcaaaggcgttgcggcgtgtgcggatgcaaggaatgcccaagagaaacaacaatggacacactaggaggactgtattgctagaactcctcgagcgttactttttgactctaatacatcaaattcaaagctctaacttctttgtactagtgcatgaatagtaatatatcacgtgatcattctgaaggctccgttcgggagcgattccgcccgccgcgccttaatgatgaccaaaacgggcgctctcgagtcttgctcccattcaatcctaaccagcagcagtctgacacattcacccaaacgtcctgcaagatggccgctgcaatcaaagcaatcaatgcgaagatccgatccaacaaggtcgccgactatgtctgctcaacacgtaagtccggcatccagcttttgtccttccaaacccattcccgagatcggccgcatcaagctgcggttgagatacaggacatacacacgccctacatttccccagacactgcattgcgcctaaatgtaactacgaaatttgaaaagcaatggctaactatacacctctctcaagacttctggggccctgtctccaacttcggtatccccgttgcagctgtgatggacacacagaaagacccggaaatgtatgtttacgcctaaataaacacttatactttgctgccagatgtatcaactgtatcagctggtgtgcgcagaattgacactgaagcaaagaacactttcgcctgataagcatacccaagccagcacgagctaactttgtttatatacagcatctctggccaaatgaccggcgccctggtcatctactccgcaaccttcatgcgctacgctctcgccgtttcccctaagaactacctcctcttcgcctgccacgccatcaacttctccgcccagtgtacacagggataccgttatctgaactactggaagtatgtggctatcgatcttctctcctcagtgctttcccaccatcatttggcaactttttgtcgattgagtgatgtcttgctaaccgctatcgtagctggggaggccgcgaagctgctcttgctgcgaaggctgcgcagaagggtacggaggctaccgaggcagcaaaatagaatgatgagtggaaaagggtggttattggtgatctggcatcccttgttacctataaatttatcatagaccaggcattgtacttatcttctaatccacttggaagtgcatggtgttcgtggtcgacgtatgttcactaaatgtggacggaaagtgttggttatgtaggttcacctttatgctgatatacagagaagattttcggcagtgtcgatggtaaaattatagggaactcgagttttcagtctattttcaaggcagtcatgagatgtgtccaatgtattcaagttacgtaaatcaaccatatcgaccagtcatcgttgaatgtccaacaatcatatcaacagaagcagccgagaatccaagaaatgcggacctcctatgctcatcatcagtcaagactgtacgcttccttgtgttaacagttcaatcggaccagggcatgtcgttcgtctatacgtgaagaacctcctctatcaaagcgtccagttaaaaggaaagtatggttggggagctagtgcgaaggggatcgaagttgaagatgggacttgaattaagagtcacagtatcccggagctttcgaattattgccgttaacccagttattgagcgtcagagcggtagtgtagatgcagctgacaactccgaggacagtgagcgctatgtctgcgagtttctggcgcttggtctccgcgcaggccttgagatgaaggaggggctagaaagtcagctaggggtaataacaacggctagaagtgacataccggataaacataaatgagaggaacgcaggcgaagctaccgacaagagaaacgaacttgtcaagatcatcggcaccgccccatgcaacaaacgcgcagatcataacgaggaagaaccgaaagccgttcttcttccacttgatgccggggttatattttccgctacgggtgaagagctcgttctccatgattcgaatggcagggaagagctgaagcggagtgcttagaagtatagctagagagtagaggaactggacagcattcacgagcttgtcgtcctgaggaaggttgagcagaatgacggttttggttgcatgtccgtaagcggcatagctgacagcgcctgctgccaggaaaatgatcgtgataataaccattacgccagccagcacgcctgtgaactgcttcgggtgcttcattgactcctgaattggaataatgaggccaacgccctcgtaagtgaaaatagcggttccgatgaatagtgtccatgtagacggattgaatgaagcgatttcagccacaccctgcgtggatattgtgaggaagtcgtagtagaagaggtataccagaccaagcaagataaacagatcagcgatgagcgcagtgaaaccaagcttgcttatgtcgcgaatcagcgagaggggcaggaaaatgatcagttgcatcaacaccatgaatttgatgtcgatgaaagacttgcaattgctcacagcaaggacaaatgcttgaagattttcggccgtgaagacaatgtacgcagagacaaattcccactggctagaacgatcggaccatgataatgcgcgcatgttcttccatagagcgcgcctncaagtcacccaaggacccttgatcttttagcgggcgttaccaaatgacgaaacaataaagcttaata

SEQ ID NO: 11571 - DNA, 138 bp, Emericella nidulans
taagtagaactgacgggggtagatcaggagaaagtgaggataaggtgcgggagtattctcccatgggacacgattgaacgtggtagttcatataggtagcacgaaggtggggatcgaagtcggaatgggctaaggagt

SEQ ID NO: 11572 - DNA, 477 bp, Emericella nidulans
tctcgctacgaaggaaggacctcaaaagcgttgaagaactcgatctcggctaatctaagctctctgtggctaccctgtaactagcttgttgcccgaaaatatatagttccttcacagcaactccaatcatatgaccactgacattactcaatcatttgccttccaggtacagcccaagaacgcctccagctgattgtctgagtgcgggaaagcagagagccagcattaaaacgcaccagccactttctctcctgtcttggccaagttgcggggttgcgtcagcatctcctcaccttgacctcaagtccatgagcaactcctacgaaacgccaactgcttagctcaaaatgaaggttgatgcaaaagatattcccttgcgtattctcacgcacaatatccggtatgcaactacttctccgttcagaggcgagcgattctgggaagaacgagcgccgcgcctcctcaacgagcttcgtt

SEQ ID NO: 11573 - DNA, 1305 bp, Emericella nidulans
acgatggcggacgccaggggcttagaagaggaagagagagttgtggctttgcagcgagaaggcaaaaggttggagcgggccaaacgccgttacaagcggattccaagtagtgaagcagagagcagcttgggaacggctggaggagagcaggcggccgggaaaacagttcccaagcacccggtcagaagtaaaatcctaaatcattctgaaaccatccaaacatttccttactttcgtctccttcatcaaatggtgacttgcttgtaccgacaatacctgtaatggctgtcatacacgtgatagccagtcatgtcatgtgactataactatactgaattcagtatggcgctaacctcggcacctgggcgcgctgggcactgtccgttctactacgtatcagcacaatactcgaatttacgttgtcaagtgcttgcgacaactgagtggatctacgaccacaggtttcaactcttgttgagctacccgttgcactaaatcgttgattcaggtctaagatcgactacgtaagttcgcatccaccaccaccgcccgatgatctgagttgaataccccgtcatcaaaccgatttggtaaaaccgcatacccttcgatattccagggaagtccacgaccaggaccgtcacctcggacagccggccccagcaagatataatcaatgcgtttggggtcctctccctcgtatccgaagcccgtccaagtcgtctggttaccgtagtagtcggccgtgtccaccaaggtcgccgaatcaaccattggggactctagtgccgttaacacggcgtacgcttcttgagtatcttcgctattcaggtcacctgcgaggaagatgccggatatgatgtttccgaagcgtccgtttcgatactcgtcaatcttatgcaatattatatgggccgcttcaaatcgagaacgcgatccttggtcatccagatgcgtgttcatggccagaactgtatggcggctgacatgatgggtgaatagtccaatagtcacgatgcgaattgacgcagcatcccagctcttggaggggacatccggtgtttcggagagccagacagtctcccagtgtcgaagctcccagacggacgggcggtatagtatgggcgagtactcgcctgctttgtagccatcatctcgaccaacgccaatgtaggcccaggtatggtcggagctctctgctgcagctcccgaatcgacatggtcattcgagttcaacccagataagatgtctattaattggttatctaggacctcctgtaggcatatgaatgcatcttgattgcg

SEQ ID NO: 11574 - DNA, 424 bp, Emericella nidulans
cctatgtagctggaccgcgctcctccgcggtgggtggataatgctaacaccgagcatgggctacagaggcccatcaccgcgctggactatctgttccgctcaccgatccggtctcatattgttcgccctatgtataagatgcctgaccacgaggcatcggtgtaactacccattatgcagaccgttcatgttggtggtgcttgcatgcgccagtgcagaccagaaatgggagacagtgcgattgccgatcgacgcggcatgaagcttagcacatgcacagcggtagcatagatcctgtagcacataccactactctagcagtcgtggactaggtattgtgcgataaggtagtgcgcagtgacacggagcctgagcgacttgtgcgctagcatcgacgtatgatagcgcaggatgagcgcatggg

SEQ ID NO: 11575 - DNA, 4334 bp, Emericella nidulans
tttacttcctacgccggtcgatacggattcagtcctcgcctggaacgcagctcacttatctctaatagggtctaaatcacgctacagaacgacatggattcgaaggtgaagggttctcatacctgaaaagcccaacgtggtgggttggagtcagtacctgtacggaacagccgcatttgaagaatcgcgaaggagaagctgacaacttcgcagtggctattggggaggccgccaactttgcgctatatgcatttgcaccagccatcctagtgacaccccttggtgcgcttagtgttttgattgggtgagttctttcctcgtcctacgaaaaacttcgcatcaaccggcgcgttgctgacgcttaaaagcgctgtcctagggtcttatttcctcaaagaaaggcttggcgttttgggaaaactgggctgcgctatgtgcttgcttggatcagtggttatcgtcctacatgcgccgccggatcagccagttgatacgattgacgaaattttgcaatatgcgctccagcctggtacgcctcaacaccggacatatcgttcacgattgcctaacatttgacccttgctgttctaggatttctgatatactgccttgctgtcgcgatattcgcgactgtcatgatttaccgagtcgcccctatatacgggaagaggaatccgctgatctatatttcgatctgctccaccgttggttctgtttccgtcatgtctgttaaagctttcggcattgccctgaagcttaccctagggggccacaaccaattcacccatgcttcgacatacgtgttcctcatcgttaccgccttctgcattctcacgcagatgaactacttcaacaaggccttgaacgagttctccacctcgatgtaagtaaccctacttgcaagtattgacatatctgacgggcccagcgtcaatcccttgtactatgtcacattcaccaccgccacactctgcgcctcattcatcttgttcaaaggattcaatacaacggatgccgtcaataccatttcgctactctgcggttttctgattatattctccggggtctatctcctgaacatctcaagaaacgatccagacggacattcgatgaatgcgaaatatgacgatgaaggtgttcccacagacggaattgcagggtttcaaactcgtcggtcgatgcaggcgcgcaggagcggcgaaccgcatcgccgaagttcttcgagcattgccttcctgagcggacgtggtgaccgggaaggtcttatccgctcttacgacgtcgagaaccaaaattttgggctctctgagttgaccgaagaaagtgatggagaacccggccccacgttcaaaaggagcgaggaggtagatcgcacatcccaatcacggaagaagaacgacgatctatagtacgacccatgatttcactgctgtcttgctggctgtgctagctttattgacgacaggttattacgccatttctttgcgtccgtttccgcactcgatttcaattctctcgatctgccatcacacctttacttagccggccgacatccataagattcggtaccttgtatttttacattctcccgatggcagaagaaattcatgatcagaatccggaacagcgtccaactaacgccgtttgaccggagttgcaatggtttgtttttcggtatgaatttatcattgattgggcaaaaacgcaggcgttagtgcttgcaataaggatttggattgtatatacctatgcattgaaggcagttttgagatagagattccaagcgttttgtctctattatctggctacgtcataagttatcgcgtaaagtaaccagcgctcccatatgctgaaattttgtgaaaaaaatgactagctcacgaaaggtcgcgatattactcgatgatgttgatgatatacttggtaatagaatgatgccctggccttgcgcaatgactagattatggtttataccttgttcctacgaagatcagcagctgggtgggggcatgacacaagacgacctcatgtgaaccgcaaacagcctattacgaacattcaagttccctcggttttcccacatccctaccttcgagataatgtatacgagcatacaggagactatatactggtatctttgctgtactggctaggttttttacaacctggcgcttccagaggtttatttgtcgtccaaaaaattccacacagcgaatttcatagtgaggcagcacacctgaagagcaacagggaatgtgaccaatatgcctagcttgctacggaggatagtcatcttcgcagccgtcgatggactgattcttcagtctccggggcatggatctcggtacaatggcaacggtgattatacgtcaatccgcattgattacaaaacgaatcgcatcgcatcattatcgggccccgcatcagacctaagtgtgaggaaagatttcgctagcctcgagacttacggccttgtcggtaaatactgcattcataatataaccattgggaaaaagagtttttctgatgcgttaccataatcgcaggcctcctatccgttgcgtcgtactcgttcctcattgcaatcacgcagcgtcagcaggttgcccagatccaagggaagccaatatatagcatcgcacacgtggcagttatccctacttcatctcaggaagatgccagccgtgcgatactccaggcaaaggagagcatcctccagggggaagagagtgattacaatgacacagcttcggaagaagcagatgtatccgaggcagagacagatgggagtgatgcagaagaaatcagcaccgcccctgcttcccccattcgggagacacgccacccgaggaacgacagcatcagtagcaatatcaccgaaaatatgataggcaagaaggttcgatttgggcgcttcgccgcaaactggttgtcgcggaaggctatgggcttaccaggactcggcactgcggagttgaacacgcaggaggacacagagtctgtggggataccaatggtagaattcaaggagaatgatcctgtggtagcacgctcggcgtacgctgcgaatactgaggaacctattgcatctgcgagttattcctcatcgccgaaaaacagcgaactactgccgcctacggaaacgaaaccaatagagttgttgccgaagttgctgcggtattcgaagctgatattttcctcaagcaacttctttttttcgtatgaattatgatctcaccaggcctattagttctaagccgtcggtgggaagtgggcacttaccaatccacaaggttgcagatgagttggtgcgtatgaagtcccatgtaccgtatttctgaactaagctgtgtgactagtacttctggaaccaaaacctcatgcttccattcactacagcaggcatgcatccatttgtcctaccacttgtacagggctttgttggtcaaagcgagtttaccgttgctgcaaagaccgacccatcctcagaggcagaaccgtctgaggcacgcattctaggtgagaagcaggaagtggaagaagtcaaaatagccgccgaaaaaagaaattatcttcttaccttaatctcacgacgatctgtgaagcgtccaggcctacggtatcttcgtcgtggagtggatgacgacgggaataccgccaacacggtagaaacggagcaaattctctcagtaccggattgggacccttcccataatgtttactcgtaccttcagctacggggttccattccgctatacttctcgcagtctccatactccttcaaaccggtccctgtactccatcattcgccagaaacaaataaattggcgttcgaacggcacttccgtactataagccgacgttacgggaggatacaagctgtttctctggttgataagcgcgtcccggaactgaagcttggggagcaatacgagaagtatgctcagggatttaatcagtctggcggtattgacggcgtcccacttgggtttgaatggttcgattttcataatgaatgccgagggatgaaatttgagaatgtgagccggctcgtcgacaaacttgcagataccttggaagaattcaaaagcattgtagtgaacaatggcaccataatccaagatcagacgggaattgtccgtaccaactgcatggactgccttgaccgcacaggtgtcgcacagtgcgccttcgggcaatgggctctggagcgcgcattgaaacaggaaggtatcgatattgacttgggaggggactctctacaaggtggtttaacatattgtgggcagcaatggtgatccattccaagcagtattctcaacagcagctttgaa

SEQ ID NO: 11576 - DNA, 121 bp, Emericella nidulans
ttgtggagttcaccggtgttccaactagctacgcgaaggctagaggtcacatgcacggtggtgcgaagacggttgtgatttctgggggatctggtgatgctagtatgttcctgatgggtgt

SEQ ID NO: 11577 - DNA, 118 bp, Emericella nidulans
gggtgtgacagatctggaaggaggtgggctattatggtgtgcagtgccaagcctatatatgtataaactgctgttgcaatgtccaagggagagaagatactagaaatgtggtgtaggt

SEQ ID NO: 11578 - DNA, 340 bp, Emericella nidulans
  unsure (1)..(340): unsure at all n locations
taagaccatgagtagggatgatatagagaatgtgaagaatcgcttgggcagtcgcagttaagggggatgcgcggctgcgggagatttcattgagacagacaatgcagatggtcaagttccgatgtgtttcttgccgcgtgaagtcactacgagaantgatgagtanggcggtagctgtgcgaataggatccgcatcaggatggagactgagacgtcagtcagagaagcggtgagtgatgaattgttggtgctcttgcgggtgtccgatactgcttgggtgcaggagtctcgtaatgatatgtgaaggtggagcttagaggatatcgtgacatttgcgaaa

SEQ ID NO: 11579 - DNA, 2292 bp, Emericella nidulans
ggaagagctattgaacggaaaccccctagaagtagacctaaagagaaagaaaagaaattggatagaggagaagagaactattaaagagaagaaagaaaataaaggagagggggatatatgataaaagataattattctccccccattatcagagggaaaaatagtgagttaaaacacaccttttccccaaaagccggggggcaaaaaaaacaccagggaaaataatccgcctgtctcttccaggaaaaggcccccactattgaaaggttttaaggggatggctggccaaaacccttttgcccatggggagaccccccccaatatcccagggatctaaccctttggggggtggccccggaacccagttctcttaaaaaagggggtccctgttgtcaaatcaccgatcgcggaagtacatgcaggcgggagccccgcgttcaacgctttgacaaattgttgcgaaaagtccctacccattgtagctggaacgtctgccggtgaagcgaacgcgccatacgaacgggctaacggagctcttggggggtgcggcaacatggcaaccggtgcatatgggctctggtgaaccgggtatggctggccagcaggggagtgcgtgttgctagcataatgcgacgctgcagggtgaggcgctggaggagcggaaggtacagaaggtacaggaggtacggaaggtacagcgggctggtagccgttcaggacgcgcataggcggtggaggtggtccaccccgatatgcggcgttcggtaaaccatttccataatctcgttcgtaacccgggaaccgctcggggctgttgctagcgggcggaccaacgggtcgggaaatccccgctggctgcgttggatgaccatgagaactaccgtacgggtggccgtggtaatctagtcgaggcgtgggcaagacaggtcgctgggcggaataaggcgacgggcgcggctccggcgatggtggttgagcttttggtttcttgatatggcacttgtggcattcatagagcacttgcgagccttccatatgagcagtcgcgtcgggtgagccatattcaccattgagcgcaggaagcgaagactgagagtgtggatagtggtatggcgggctcgtcgacggtgctactccattcaacgacggcgtcctgtggatagtaggagcaactcgacgagtgtcaagagcccaccacttgggactgaagacggttgaacatgtgacgcattttctcgtcgcatccgccccgactttctgtgaaggacgaaggtcagagtcaatctccatctcatcggggttggcttcaggcttttctcttgtcatcacaggtaaagtagcggtaccgttgacatgagacgatcgtcggtttccagatgcgcttgtaccctgcacagcactagcatgctgaagataggccgccctccgaacagttcccgttatgctgagatccgcctgtttataggtacgagcatacagctgaatcgcgttgaggccgccttcagctgcctggcccgcttcgtgaatgactcccgaaacggaatgatggggacaccatattgctgcagttgctgtaccaacttcgtccccaagccgaatgcttgccacgctatctctcctggaattctttaccggcgtaacgtcaaagccagttttatacttcgcctggaacgcgcacgcaatgtgaaagcgagcgttgcaaccgctgaaatggcaggggatacatgctcccttgttcgacttgcagagcttgcaggtgtcacggtaccgatcagcaggaattagcccaaatccctcagcagcctcgagttcctttgcattgctgaacttgatttcaggcgtccaaacggcgcaggtaacgtggatccagttattgccagcggttcgcttgagtggttcccgagggctgacaggcttgccaaccgcctcctgcttttcccggtaaagcttgattgcgtcagcaccaagcctcgttcgagtttctccttctcacggtccctgtccgtcttcttcttgtgcgtcgtctttggtgcttctattaactcatgctcggtataagtcactggacagaggacacattcgtaagaggtggaaatcattgggtttcggtcgttggaacatgtatcgcacagccatttaacggtattccgagactggctgattccatagcaatttcggtggacggtcatgcggcaatcccggcacgacaggtactggtcccctgtaggctctattttggcgcagattgcgaaggaagtgtcttgggaacagggggttcggctcaattggcgc

SEQ ID NO: 11580 - DNA, 720 bp, Emericella nidulans
agcaacgccatccgtggaatgatgacactgcccagctaagccttgactctcggctgatcttaacatcctgaaccttttcagaccagattgtacactaaaggaccttgctagacaccatctcccttacacctattttcgttcacaaggtgtcactgcccccctgtattgtcggaccgaatattgaatcactgaacccacagaactggactgcattcaaccacaaccttaagccaaagatcgagcttgtgtccctctccgtgcaacgctagctcgcacacgccattagacgcggagagcctcctcgattatccacgccaaagacctggtctgggctatagtgccgaaaccatacacagggatgcgaacctatctatggggagccaaagagcatagcactgagacctcaagtgacactatggcatttacctggagcggaaattggctagaggcatggggtcacaatggagcagagaacaaccgctggagctatccaaagcttgtgctagataggtttctcgatataaccgggccgaacacggactggcataccccactaccataactggggcttgatctggtggagatctactggaaccgccatggcaaaacaagggtataccttgccagggtgcctggctcatacatgcacgccggtgcacaatgaaacacgcactgggtgcattggcggggactggtttcaagatgcacccctataccaaa

SEQ ID NO: 11581 - DNA, 659 bp, Emericella nidulans
gagaaaaagactagagctcagtgcccgtgctctagaatcctgccatcagcaggtaggctggcagggagctagatagagcattcatctgggcgtaagtggtccttcgtactattttcataatccatacatcctgcgcttacgacagtctaccggtactgttacccattgaatgacggaaatcctcctacatgaccggtttactgaagccactgggcctgcagctaaaccaatgcctgcgctgacctggcagaccttctcaacccgccgattgggctcgatcctcaccttcagtacatgcacatgagataccactatacctgatctttcgcgctgagacatacttatgaggccctattccagaccacgagagcttctaaggctcctaagctatacacccgctggcccctaagggactagtggacagtttgaatgtcgcctacaacaatgctgtgcaagtgcatgggtctcaagctgaccgcccctacacatatgaccgcaggcagtgtgacccaaacaatctggggctttttacccagaccgttgaatttactgcatgactgatcgaccctgtggttctgagactactgcgcccaaactgaccggcttgcgggctaagaccgttgctgacacggtacttggacactatgatcaatacgatc

SEQ ID NO: 11582 - DNA, 110 bp, Emericella nidulans
tgtagtgataccgacgaccagctagatgaaggtcccgatgaatatgagcctgtgaagtgacgtgtagtaggtaatattcggattgtactacttgttgtggttggtaacgg

SEQ ID NO: 11583 - DNA, 524 bp, Emericella nidulans
gtgactctgaagatcgaacggtgccttcctactgatctgcctatgggaagcctttttcatccatgaggatctcccaacatcttgatggcctctctctcacggaaccctgtgccagagagtggaccggtttgcccgcactgcgactttactgttcctcctttggacacaggggtggcgctgggcctctctgggcgagagtcatgcatccccgcgaatacactggcatgcacccaatctggggcgggatgttctgatatggccgtgtgctttcggagtgctgagacgtctgaactgaaagcgaatcccgccttgggcaaccctgcgcatggacgcgtgtaggactgtgctctaatagagcttcgaagtccatccttccgatttgcactatgatatatgccatactctattgatgacgttagctcggagactatcacgcagaccctacagatgtcgccatagattcaccgggtaacaatgataacttgagcttgcatcttattgcgccgtactaatgctccatgcta

SEQ ID NO: 11584 - DNA, 295 bp, Emericella nidulans
aaggtccctccataccagaagccgagagacatgcagagaaactggagtgatcgtgatgccgcgtaaagaacggatgacttgaggacaggccacaccagtgtgtagccttgcgagaggagctgcttgtggtagtggttgcaaatgtccgcctcgcgggtcaagtaagctacggttcggatagctgaggtggcatcgcaggcatagcttgcaggtttctcgtaggctttctttatctcttctcgagctggaccagcatggccaaaacggaagtacccacaggctaaagaagggggat

SEQ ID NO: 11585 - DNA, 3520 bp, Emericella nidulans
aacaaggcagggccgttgaaatagtatttgcaaaaaagggtacgaaaagaatacggaaaagaaaataggagaagagataggtagaagatatacaggaaaatgacggaattcaaatcatagccacaatcttggtagtcgaaccactcattcagtagtaaagcataggccacaagttgagctgagggaggggatgataaaacggtcatatgagaatccgcctagagaaataaggaaaacaataataaataaaatagagtcaaggaggggcagcgagacaaggaactaattgaggcggaagagcatgcgattgctgggaggaatggaagaaagcgagggggaggaacatggcattggtgacggagagcacaaccgcaaagcgaagagagagtggcgcagagtgtttgttctaacggggcaacgaaggaggaatgcagagagcgaacaacacgggcagagacaggagccacgtcggtcctctgtttaggcattactgatctactcagagtacccaaggccctggatggaaccaataagggccaaaaagcaacgcatagcgaaacataagcttatcaccgcaagtatactatgggtaagtcagtataatcatctaccactttctcactgactggtgttgagtagcagtggttgtaatactgcgagcagactgactgccaggtagtgactacgcattccccgcaacacagggacgagagtccgcccaccatcctccatcattccatcatggttctctccatcaccccacaacccggggtttcatactacaggatacaaatcgctcagccttcaaggcgccgtctggcccagaactcgcctgaaaattccgcctcacccgtctgaccgtccgagacattcgtcatcctttccagccaaaatcgcggggcatttcggagagcgagggttgcctgatgcacgcctctccttctagtccaacccgacccgaacaaaacagtcgctgcagggagcgatcttgtgcctgtaattcgcataatccagccgttccagacgtttcacatgcagcgacgtcccccagatcggaggcagactaaaagcgggcaggcttatgagaggcgctcgcatttcagaggccgcgccgagcgaagcgccggaggagaggtatatactcgggccagtcgtcttgagcattggggacggcttcgtttgatcgatgcctgattgcctagcgtcgatattcccaagcccaatttctccgaaatcaccatgaatcgccattgaccggtccgacttcagccaaacgcttacggagtacgaagcacggttactcagatatctattcccaagactctcttctttaatgcaacggtgtttaccacggctcacagtcccgcgaaccactgggcgctccgcactcacaaggtacagccagcagtggttcagcaagtgcggaaccggtcgatccaccaaagagatcagccctcgctgtctagcaccggcacccgccaccgatcttcgatcagatatacttgtttaccctcctagtcgctcagtaaatccttgatgccccatgggctagactaagtggttgaccggtgtccagctgctagcgagcggtatcacggtgcctcatgattcaatgatgcctcatgattcaacgatgccctcactctgctctctgcgttcaatcaggccaggcttgagggcatccgtgcatcccgggtagaagcttattagtcaggctatctatttcgtctgcacatcgctgcatcttaacccacgagtgacgagtggtcgggagaagggacaaatcgagtcgtgagcttgacgactcgctcaagagtcaacaggttgccccccacagaacacgggagtagtacagtgtcggttcgagatatgtcgtaccgtgactacaagaatgcactcgacttacctgatcactcgatatggacagatagaccggtactcggcgctcggaaaagaggtaatacgcatgtttcgctatggaccctgtctccttgccaactgtcgaaccagtcaaacccagtaatggggcccttggtgacgtcgagaatgcgaaccgctttggcctcctggaggtctacaagggggcagaaggaaacgaagaagaatcactggagcccctgatcttggaatagattgaccgatcgggcttggcctgacggaaccattgggtacgtcggcgtctaagaagaattaatgatctagggagatcttctgtaggtaccaacgacatcctagtagcgatattgaataatgcaggtaaggcgcttgatgatgtcaatcgacattcgtatcccttgcatttgctacttacctgctccgatgccgagggatctctgtggcagggaacattgagtccgagatttacttggttcggtttactttctcgctgagaaccgagtttgtttgattgaggtattaatgaccttatatctctgattcaagccttgaggctggagttctaaattggccagatccaaaccgtcttaagtatataacaagctacatgtatgtactagccagtttaatgtgcccctcacggcggatcacacctgcgaccacaagggccgagggagtttctcgcctggctgaatcaggactctgtcacggcaccttgacggtggctgagttaacaagcctgcgcgcgaccctgaagacggtgggtaaaagccaacataggcttcccgtcgagcggggcttccgacggtaacggaccatgtgtggagaccgtaataagaagcaattgaatggacgagccagcgactgactatagttagtatggccttttgtgcttttacaactatgcagcgacctacccaaacccagcagcacggtcatcaacaagactctcaaacaccatcttctccccgtcgcgctcattatgggaactcatcgtctcgcgcatactctgcagcttcttcctacgatcaggagagtcgtgcatttgtccattccggccgacgaagacgacttcatcttcagagtcttcctctgacgatgacggcgcgttcgcaagaccgtccttctgacgcaccagttgtctttcggtccaccgttcaatgaactgccgaatgtccttttctagatcctggagcataccacgtgcagaacgagcatgctttaagttcaaaccgaagttcttttcgaatggggtggtttttgggcctttgaatggcttgaggaccgggttaatgtgccgctaaggttaatccaaaagggcccaagaaagaccgaataggttaagcgggttggggggctgggcatcaattttagggatgagttcctccgggttgcgcaagacgttttgacaagatttgtaatatcacccagattgggggatcaggtagataagaggatgctaacgcctctaccaaaaaactttcaggtttcgggttgttttccttaaaattttttttttattggggggttactgtgataaccctttttctctttttgtacggtatattctcttttccatgtttatattattaggtttccgttggtttttctgaaaatgtaaatt

SEQ ID NO: 11586 - DNA, 2386 bp, Emericella nidulans
aagaggcgaagagcgaattgacttttgatgagagggaggcgctcgctgcagaggtgaggggtgagaatactgtcgaggagagggtttgacattgtgatcttcccggctcctttatgactgtctgtacatagaaatctttcttgcttgactagagatatacccgcggcccactttagattgagaagttcattacattagagtgatttgtgtacttctaggtagtacagtacatacagaaatctcttgttaatccataatattacatcgtatctaactttatatgaccgagaagctctcagactggcagtattttatactcagcataaatatgtcaacataagccaaattgatagcttagcaactgaaaatgctgcaacgaagatattatcttacttatgtccgatataccacatgccatcatatattatcattacatttatatccgatggttgtccgctcagagcgcctcacctgcatccagtatacaacccaactcgagcgaagaacagttgattcggaagccagtcactagtaaggaagggaatcctccacaagcgtccttaacaaccagtcaaacaacgcttcaagacgctatacccagatacctacaacgtccacaaattgacgaggtcatccccgttcaacgaatcagcaccagtgtccccttgtagataacatcaagcatgatcaccatatcctgtaagtatctgccggccctagaaatctgaataatgaggtggtagttggaactcttttcttgcaactggggcggaatcattcctaatgccaacgaatacactccaatgaacaaggaagtctgaatgactcgggtaaagacgagcactgaaaatcacatatgattgacaagactattttgaaaataattgcgaagtgcagtgcggaagatcattggcagccggcgctcggagacgagaaatagaccatttgcccccttagtagttgagtagagagcctttgcgacggcgtcagaatcggcaagtgcgtaaactcatcggataccgtgacgccctgcaggaagggatcatttatggaactgcgccatagtgtattttgagacgcctagcgcatggttcatgctgtcgatccaaggctccgtggatttagggttgggaagtgagtgactgatcaggcaattctcgcgtattcgtgcttatggacgcttgatttgccggtaaacgtttaactccacaccataaagcttggctccgtctataaataatgaaataatggatgacatttaccgacctatgtgggtgaactccctagacagctcttacatactttttcaattacaccagcttcatcacactgcaacagtcgcattgacgttaaaaccctcaagactgttcaaaatgccactcacaatccaccttgacaactacaaaccttgctactttggcaacgagactatctacgggcgggttacctttgaatcctcaagcacaacgaacctccaagacatccgactgtcatttactggtcgctccaaggcacggattcaaaaagtcaagggatctggagctcccgctgcaaactatcgcagcaaatgcatcttgttcgagaaggagaagattctggtacatttaaatggagaagccctgccaccaggcagacacgagtggccattccagttctcatttccaacaaccgcgctatcttcggtggaatggccggaaatgcagcctttccggggcgacgttaatcacccccttccgccggtatttgctatcgaagctagtgatagggcaaggaaggtttcctgtacgatcgaatatcgtattgaagcacaggctatgaagccgcagcgagggcttttttcgagcacaaggccactgttctctgaaaaagtgaggctgaatttcataccctgattttgcagtcgcggatgaccgcgaaagcgaccgggcaacggttatctaccgacagtggaaagaccaagcctttagtatcccgaagaatgcttagttttcatagaccatgggccgtgtcctatctccggtcggaagatccagggctttcttcacctgtgaagctacccaaattcagtttaagtgctctttcttataaacaacctgaggatttgtttctccctatcactgttctttatatacatccaaactgtacccctttacgtctatactcccatcgtaaccttttccctctctctccttatccctccactcctgttcttccaccttcttcattcccttgccccgcaaattcctttctctccttcaatcccttcccaataccctcaccctttctcctttttactttcttttcttttctcttctatctatttactcccttactctattttcaatcttccttttctcatttcccctcctttttcattttaacttct

SEQ ID NO: 11587 - DNA, 1841 bp, Emericella nidulans
agaattcctcaaagtcgaggtctccatctccgtccaggtcagcaaatcccacactttctccagctggtcatcgcgtagacggctgttcctgagcactgaggcggcctgggagttgttgagatggggttggccgccggccaaggaagagaagatctcccaataccgctcgacttcccactgctctatctttttattcgacatggtgtgtatttacagtgatggtttctggaaaaggagagtggctgctgtgagagaacaggcaaggagcggctgcggagacgatgacctccgtgttgatagtgagctcctttagactcgggcttcccgcacctaatgtccaacgggacgcccggattaagatagatccgtttttgactatatatgcattcagcagcccgcccaataggtgactacaaagcaattaatgagattattatagcgagtcatgattgtctatgttattgttggctagtttacattgctgaaattccatcgtgcaccggtatataaatcttagagaatcatccatgttctcgatagttaagcaattcgtcattgttgcttcttttcagtcgtcttctcgctatctttccctggttgagtcgagtgtggctgcttgagctgctcggagacttgtgcgatggctcgttcagcttccaatgcaagtccgggtgcatcaaggattgtcgcaagcttctttgcatctttcatgcgaagcaatatcttgtcatcacttttctcaacatcctccaccatttcctcgactgggtcttcgcgatccgactcctctagcgtgcgcgagacgcgcttcgcgtatagttccacgagtccagagtatgatattggctttaataaatccttctcgacaaggaactgcagatgtctagagccgttcagagcttgccaatagtgagtatatattgccggtacgaagagggtaggaaatgccaacctcgccagtgcgaccagcctctgtaaacgagatagaagaacgggatattaggtattctgcatgcgtttgtgattagcagttcaaccatcagagcaagagcacagttcgaccatgcaaaacatacaaggggatgagcccaattggcgctgtaaagggcgctgcaatcaagctccaccacatccttcgtttatgtaactcctgtcgctcctttgagagcttgtgtagcatgggaataagtttctcctccttaatcgcattgcctgggaacaagacttccactttattcgacccatgtgactcgtcaattcgacgttgaaagttaagcgacgggatgcttttcagtccccattcttcataaggtatgcgttgctggactcgatttccccacgataccacccacgttttccagcctttatcagcctcttcccatttcgcccaggtttccgcagccttgtccgtgactcggtctaggatagaccgctccttcgaaacatccttgcgcaagagtcgggcatagatcagggctcttcgagtggagattgggaccacaaataatcgcatggccatagcgcaattcccaaatccggtcccttgagagcacagttcgctgttacttgatcacgggcggaggggagcgataactagcgatggacgaccgggggtaagagataaaggcaagccttggagccactcatacctttgcctgtccctagatcgttgggaaaagagacgatgatatgacgatgattgaaatgttgtcgggcctcgaatgggagtacgtcatggaacccgagccacccaaaaacacccccagccggtttctgcgggttaatgtcagaacgagccggatcaaccaagaatgtcacgcgatataccccctccgggcatt

SEQ ID NO: 11588 - DNA, 594 bp, Emericella nidulans
aaaaagcttgagcttcgagccctagtgaccctgaaggtcctagacgccatgctggggcatgctttggatgctgcacccgtccaacgatctgtaagaagagggatcttctcagccaatgaaggccaatgcgactcacccttctggggtgggtgctgtgatccctgtattgaacgttgatcgtcctgtcacgtgccacagccttcaggatgggatgttctctggccgatagtccagctgccttcaagtctttgcacatcattgaaccacgtggccgctttattgatccaaacccaaatgcaagcgctatactacctacgattccttgtagactgcctacgtgtagaatgtgcagcttgactctaccctgttcactccttgcattgataccctactgtattgcttactgtataaacccgcttatgactgatccgaccgaagcctgtgactgtgtctgtatccaatgagatgaccacttatatccacactctaattagccctgccatacgtgatcttgagccaacaggtctaccgcccttatacaggtcactgaccactgaactcgacagttgctgagagccaatgggatgccttaca

SEQ ID NO: 11589 - DNA, 2079 bp, Emericella nidulans
atcgcggattttcaggccggtagaaattgtctgaattagaacagcgcctcagaaaagtcaaaatggggtcatctacagcgctcaccacaaaggtggaaaatgggactccttatcaacttgagaagagccaggtacacgccataatctgccaggaaaacgttcatacagtgcctaactcttaccctctaggtctcgagagcttcaactgcgcttctgaaacacatcaaatcgaaacagagcgagcgggaagcgactgcggccaagaagactttgattggcgacaatgactccgatgccgaagatacgcctatccataacgaagccgtctggctcgtgctcacaacgaagaagcacgttgtcgacaagaacagattgaagcctggcaaaatcagtattccacattcgctgaatgcgtcgccggcgctcagcatttgcttaatcaccgcggaccctcaacgctctgtgaagaacattgtttccgacccatcgtttcccgagcatctctcgtcgcgcattgagaaggtgattggttattcgaagttgaaggaccgatacaagagctttgagagccggaggcaactactctccgagcatgatgtctttctggctgatgatcggattgtcatgcgtctggtcaatacgctgggcaaagtgttctacaaatctagcaagcggccaatccccgtgaagcttgcgcagattgaaaaggtggatgggaagagggtgaagaaagatccgaagcagcagcagaatcagaaggacgatgagaataaggtcagtttgttcgcgagcacggcaattgtcgcgaaggagatcgagaaggccctaaactctgcgcccgtacatcttgctccggctacgaccgcggctatccgggttgggtcgtcgaacttcacacctgagcagctgtctgagaacattgaggctgtggtgaaggggttgacggacaagtttgttacaaaggggtggcggaatatcaaggcgcttcacatcaagggtgccaacactatggctctgccgatctggttggcgagcgagctgtgggtggaggagaccgatgtcgtggagaccattgaagatggagaggccgacggcaagaacaagaagcggaagcagatcgagggtgagggcgagcagaaactcctagaagggagcaacaagaagtctcggaagcagaagacagccgacgatgacgaggaggcctcatcgctggcggcgcgcaaggagaagctcgagaagcagaaagctcaagcgttgaaagacggagaggcggcggctctgaaagtatcgactggccccgcgaaaaagaagaaaaagtccctttcataggttctacaattacggagttcacttgaggtttcgcttgtattgttcttactataatcctatggtgactggtttcggaaaatgcattgatagagtatcgttggaccatcactggtagtattccgcagacatctctagacttatgatcctcggcatcttcaatcctaatgtgattcgtgtatagagagtaagccgagtcgcccttagaagatccgcctaataaccgaggccatccgccgatctgcgggcacttggcgctccgacgatagccaccgtcccgctaccggacctccaaactttcatcactgttgcaactctcctcccctcacccaccagacagcgtactctttcttgcttgcacacagcccgcaaaaaggcaagcaaactattcgaaatggtctttgcagcccgcacctccgtgcttccggccgcgcgcgcccaattcgccccttcccggtccttcgtcttcaaccagtctgcgctcgcccgcctcctctccaccctcgcggtcctcgaacagcgcgatggcaagctccagagctcatccgtcgatctatcgccgcggccctgaaattgggcgggcccgttacggcgtttgtggcaggtgctggtgtgaaggctacctcggcggctgaggcggctaagtacaagggtgtcgagaaggttgttgcggttgagaacgaggcgtatgagaaggtataaactttctgactcagtatgaacagaaggtagatgcttatttgttatagggtc

SEQ ID NO: 11590 - DNA, 1399 bp, Emericella nidulans
gcgagctcgagtatagatgccctcaatgtcatcagtcggccgccaaatcctcggaacgccggcttcatcgtagcggaatttgtcttcaaagttctcccgcagtttgagtaacaagtttccctcagtcatttcctcttcaatcttggcgcgcaggacaccccaagacttccttcgcagcctccatagcccaacatccacttcctccaagctggcatcaaagctgcttgcgcggtctgtaaatcttctctcggcgtcaaggactgtctcaacaaagaggttccacacacgatcccagaacttcttttcagacggcttctcgcccgattcgggcgcagcgccaccggcacgtccagaacccagagcgttaaactccaagccaacagattcacctaagcgagattgaacccatcgctcaacacgggtcgctaaccgtctcatctcatcccttctcaggcgggcgctgacctctgaaagctctttttcgtacaatgccaattcttgctgataattactccagggtgcgccctctaccacagtggcacgggcgacttcttcatatttctgaagagctttcttcacctcatcgttgactatctcggcaaagtcatagcctgtgccctttttctgtcccgctttcacttcagcagtgactgcgtcactgaaatcattgatgccggacttgtgcgcggcgttaagttgaccctggaaaagggccttcaaacgggtatcaacctttccctcaagctccgcccgcttccgctgatagacacctttgtggtaccggctcgcttcagtctcaaagttcttcgtcgccttagcacgtgccgatcgcatggctgcgcccaaccctccaagcacctcgggctctccaagacgagatgcctgagactgtttgtcctcaaagggaaaaatggcctcgtcaaaggcgaccatcacctctctcagaatctcatcacacctgaactgagcaagtaattcttgctgagtcggcaagtccagatctttattgttgacaatttgatcccagatgccttccgcatacactgagaatccgtcggcgggaatacggcgatgatactccggaaggaaaacaccgccttctgaaaactcaccgttttgcgcattgagtgtcgcattcttttgcccttcgcggaaacggagactgagctttttggtttcctcgacaaacttttcaggctggtagctcttgtgaggtagtccgtagaactggaagtcaaagtaatcatgcacagtcgagcgctctaatcccggaggtttggagatggagtcccagaggcgagacatatcttccatcagtgtcttctgcaaagccttgagcggtgtagtgccaacaaaatcacggattacgaacaaaagaagggaacgataagtggtgctg

SEQ ID NO: 11591 - DNA, 231 bp, Emericella nidulans
atcgccgccacaggcactgcgtccacaaaagtcagtacctgagacatcaacctgtgcccaacgagaccaaacaggctcctagggagttctacacgacagacaccaccgcgcatcgtacgcgcaacatcagcagatcgaatcgccccttgcgtaagacccgtgacaaatgaacagccactttgcagcacgtatgcagtacagtcgtgcaaccgaggacagagtcgactcgac

SEQ ID NO: 11592 - DNA, 3191 bp, Emericella nidulans
taaaatttgtttccgtgtatctgccatacgtttcagtgctcatttcatatgaaaaactgtggcctatatggtttggacacagaatgtgaagtcatgctattaacctgggtgcatggaggtatactctcctaatataacgatttgttcactggacgaagatcattatcttcaatggtaaactgctcgtgttagattatagatatcttaatcgagtggttctgattcagtggtcagggtgaatcgtcgcatgcacttcgcgtaagtctattgtactttgcccagttgacgctccatgtaacacgatgaaactccgcgaagaacaagcgcttttgatactttaccaggaagagaagtgtcgaaaagcactgcgaaacgcatggagtcggcgcaatgaaagctgaaagctcaggtcagtagaggaacaaataaatccttcaggtttgagacgaactaagctccactagttgtagaaaggtcagggagtcccagttcagaccacgggtttacccatattgcagcacagcgaatcttggctaatgttcagcacataatgtggttgaaactgcaattagatccctgctattaaatagatgcaaaccccacttctgtatagataagtgatcaagaaaataagccataatcgagacggaagcatcactaaccagggcagcagctaccgagtagagctgcaaacttaaccaaagtattgtatgtgttatatagtatgcgtgcacattatgaaagccccccacttgccttttacctgaatgacagtccagaggcaggtgaatctattttcgtcatgattgtcccctcggtgcaggcagcaggatcaaacgccctataagagcatggggagatatcgtggacagtggtgatgactatacggcgcattggaaagctatttcgagagtagctacaacagcgaaattatcaggtcttactttacagactccatatgacttggcccaaatagactgctattaagaatattctaattatcattaaaaacaagatgatcagtggcttatgtaacaataccgacaaacagaagtcaagcgagaccagctcgctaccagctcccgaaggaaggcggtcattcaatactcatgttcatgaacccatcattcgcttcattcatgccctgcatgcccaccctcttcaaggtcccagtgtgaggtgtggtgggtatcgtccgagccccggtctcgggtcgatcgttgaacagaggcccaatgtttgattttgggggaccccatatgttgggcccattgtccgtaacggccggagaatttggcatgattggactgctttgtgcgctcatgctcggagaaacagcccttcgcttgaataagttaggatcgaagtcatcctcccgccgtcgctttctgcgtaactcggatataacaccagcctgtgctggaagtggggtcgaagcacgagacgcaggtctttcgccgggttttgcaaagtcgttagagtttgacccaaacgtggtggacggcgtcatatccattgctatatcatcttcagacaccgacgacgttgcatgttggcgaaggggcggcggcggagtacgatagcgttcgtcaaacgaattccaaaactcctgccctccagagttgcgattggcctggtcgctgaagctgggttcatcaggtaaagaagctgtgtgcttctccggctcgtgatgctcccccattccaggcggtgcgaacatattcggcgatgagaatacggtcagcactggggatgtgtgtggcagcggatctggttcggtttcgcgaacctggcggatgacttccgcctcacgcttcgcatcgctgtcgatgggagcagcttcttccatcaaagccgccctaatccgtgcgaatgtttttgttttaggctagaactagttagtggcagtattggcaactattacagaaaacccttaccaagaggcttccccgtcgtgtaacagcgcgtctaatcacgcccaatgggccactgtcagacctgattccggttgggctgtggccacgagcacccctgttttctccctcgtcactcatatctgatagtcgtagatcacgggtccccatgcttaagctctcccgccgcgaggccgcaccgttcttatatccgaagtagccatttccattttctatgcttttcatcactggtggcgataaaggtgccgggctctgtttcgaactattcccacttgcgctgctggaactgtgtctgctgctacgtcctctgcgaaagcgcgcccgctgaaagctcaataagcttgccgctgcttgagaataattgcccatccagtccatcccggggcttggtacatttccaccagcaaagccgttaaagcctggggccagttttcgtgcctgaggagtattcataatcacgtcatctcggtccatcggctcatcatcgttttcgctgctgctggtgtctgactccatcatgttaacgctcgacatagaacttgagatggttgttcgatcagcggggtttgaagttgagaaaggcggcaccgacgatccgggcgatccacggcgtgccgggatcgctacacatcggccgcccaccgtctgggacgagtcgggagaccactctctctattttgcatgacgtacatcggtgcatgccgcgtgatatgtcgtgccctcttgatctcctaggtaggaccgactccgctgaagtcgctgtcttcgtgtgaaccctctctgttttcaacactacggggcctgtgctctcctcttcttggtgtctccgcttgtgccctcccatttgctttcttatggtgctttacttgccctcctcttttcctttcttatgcgtctcttgctgcctttctttttagactgccctcctcttcatctctcctaactcttctccgttttttttctatgtattttgccacccgcttttatcctcatctctttctggcccccaaattttctcacttacccctcctttgaaacttttcattttcatctgctaacatatccatcttttcctctcttactattttttcctcttgctcccataagatctctcttccttctcctcttcctaacacccgttctctctggtttcatctcctctatctactttatttttcctcttctcctcctttcctcctccttatcttttatatcttcttttcattcgtcttcccctccctatttttgcctccccac

SEQ ID NO: 11593 - DNA, 2741 bp, Emericella nidulans
ctctaacgactaaatctcgcaagagcggtctgtgtgaccttcaccgcagcatgccggtgatgagatcggtgacgagaaaaggaaaatactccagctgatgaaagacggagagatgatgttgtcaagtccgagaacgcctgaggaaggaacaatgcgcttccagtttggactggaaagaaaagtttcctttctgcacacaaaattcatacacaaacactacacagcagattattccttccttgatttctacccagtgaccgctctttcttgctaggttataacgccttcactcgctagttttcagcaacgttcgaattttatgcagaaaaaaaataaaaataaaataaactaaaatagataatcaaatatcatctttaacacttcctatgtgcctaatgaaataactttcattacgaacgcgctagaaaaatgtataccttacaggagagctgtgggaatactacacttacccactaagcggcatctgcagtgatagaaataatattataactacatatgattcaaacactttagcaatttcggtgctctggtggtcgccagggcactcccaggattttgaagatacggcgctcatctcgactttcaagaagtcgaccggggtttaccttcgtccgttgagaagcacgcggcacgtctgcatacagtcctctttggttgagacgcatgagcttcttgctagcaagcagtcttatgctgcggttaaagatatcgttaccagtaaagtatatcaaggctgcaccgagttctgcaccaggcacgaataacagatcgatccgccgccacaattgaccatctggcagtttggatgcgccatgccattttgacccttccccccgacatgtagcagccaagcttgcttgaaggaacccttgttgaaatagttttggcacgacattatctagcatcagtgtccgaatctcctcgatcgtggcatcaggccttgtgatgatcaagtcaatatcaccggaagtggccgcgccacgacggtaggaaccgccaatgatgacttgcatatcagggctctccattcgtacgactcgtcggacgaaatttccatgagcctggacttcggttctcggtatttgttgggaaaagtcaaagtagtggtcgagaccaatgcgctgtgcctgtgttagggaggcttttgtgcgtaggtcttccagcgatctatagccttgagctatccacctagaagccactgtaattccggccccgtagacacccaagtatgtctgaagtaggcggtcctcgactgtattgcttgtattatccaagcggcgaagtcggttcgtaaggacaatctcttcaatcttgtccgctagacgctccccaattccaggaattcggatggcttcagagcggctgagcaccttctttgactgactgcgaagggcactgattgcctttcggtatgccaaagtgcgccagtggtctgcggtccgggtatagtaatccagcatctgctgtagcacttcaatcgtcctcgcattgggattctgggcgctcgaggtagagtcgtgcttctgcatgcaaacgaacttttgctgccagcatctagctactccattttggccatcagatagtttcctactcttcgtttttgctggcggggattgtgactcgtcagaggtttcgtaaccagatttctcagcagcagagtcatcgtctgaggtatctaaggggtcgaggggctatttacagcgtgagacatgtcattttcgatattttgcatgtagtcttaccagatgttcagtagctttagcttcctctatcacatcattcagcgcatcatgttcgcggacaggggaactgccacgaactatcttcccactcgcctcacaataaatgtcaagttgcggagcctgctctagtgaaggatcctcttgtacagaaagctgggacgacctctgagtctgacctagctgtcttccatctggctttaacggcggggaccattgagtgagcacagattgactctcgggctgcaaagtgtctagtcttggaagctctgccgaaggcgcacctttgacttggaaacgtacttgcgcggccctcaaaatacatcggaatttgatgcactcggcagggtacgcttcatcaactacggcaacatcggactgcagaggtcagtagtgagagacaaataaggcgtgtgcattcacgaaccggaatcgtctctagctccaagtgctttaggatttcttcgaagctcaaccctttatcaactatgatgtgtgtaacatgacttccccacgtttttgcccatagagcgccatattcctgtgctctctggattcgcaatctgcgaaggggagaaacatcgctgttcggaaagaagactgtggcagagaaggttactgagagtattcgcatcaaccgcatttagatgacctacaaaatacaagacctttgaatatttgcagttgttcgggaatcatccttgcaacaaagcctcccctcttgcgctttccaggggcgtccgttgttgggcgtttggttgacaccgtcttcttctccagagtctgcttaatgctgggaatctcaacaaccgagatgctcgaagaaacagaagacatgctgcctgcaacggcaggaacagtatctgaagaagaccggaggtttatagcgacgctgggttgaggcacatgagagagattccggtctggcaagcgccggaagatgcgatcgttcatcgtttcttctggaagatgcaataatac

SEQ ID NO: 11594 - DNA, 114 bp, Emericella nidulans
agatctgcagattagcctggagatcacgttttgcgtcaactagacagagaatgtcagtagcagcagtacttgggcttcgttgtagtagctgctccgattatgtgtcggacaatc

SEQ ID NO: 11595 - DNA, 2987 bp, Emericella nidulans
tctccttccttcgtcacaacaagaacctcgctattaaaggtttcatattcgaccatcagtcgtgaggcgagtcgatcaagcgccgctttgacggtttgtgaggggacggaggggaaggcttcattggataaaatcggcccttcagacgcggacagggcgtccagaacgggatttgtcatatcggccgccatgattgcgcttgtggacaacggcaaattgaccggcggcgagtgggaaaataaaagtgtttatagagagttgactagggcttgatgtacgattgactcaaagcatcccgcccacctctttttcggccctcaaaattacggcggggcagccgtgccaagtgcgtcatcccgtgactaccccgctaatattacctgtctcttgctgtttctttactttccacttgtgagacatctcaaacaatatatgtaacagccctagtagtttcgattgcatatcttttcctgattagggtgctgctatcaaaatataatatctgtcattcctttgatctcaacggattatccaatgtcgagctattcgaatggtttttttctgcaccctaaaggctgcgtcactctagtagttgtcattcagtccagattttatcaatcgtctctcttacctatgcatttctctataattgaccgtggaactccagtcgagactgaaatggacaattgcaaaaaactaatggaaaaaattgcctttctgtttatgcttataggacgtgcgacgtacctgagcccgcgattgtgaatcagccaatgtgcgctgcaatcactgactgttactataacatggctgagatatacacagtacatgaagctctgaaattttgtgcgatgcagttcatgaggaattgaaagctgaccctctcttctttcatctcttcctctcaatagcgcttaacatattcacaaactgcctcactgcgggctcgaactgcttgaccatgtctctctgacactccttcaagttctacgggacacagcatccctgctgttggcctaggtacctgggtatgcggaccagccagctataccttgaacaagtactgttaacatagctctctcagccccatggaattgaaaaaggggttgaggctgctctgcgcgctgaataccgtcacattgacgatgccacctgctatctgaatgagaacagagttctgaatagatggaggacgccccgtgtaccttgagacaagagttcgttggtggtcaccttggttacctttcaaacagcagtcaggagctgagcctgcctgaaatcacaaggttctggaattcgcagcatcaccctgaccacatcggagaggcgcttgacaaaacactgcagggcttgcagagggaatatcttgactaatgtctggtacgcttgacactcaggactccctgaccgctcgctgatgggcttcgagatttactgggccgcgctttcgagcgtatgtgaactcttaagctgatggagtctattataaagtggtcttgtttggccaatatctcgatgatgacatctggatagcgctagagagagtcgtctactcgagcaaagtcaacagcattggcgtcacgaatcatacaatcgaggaacccgagaagctactgagtatgcggagatacctatcgcagtgaacaaaattccaagcttttccatagctccagcaacaaacttacgcagtggttagagggcaagaagattttacggttgcctatagaccgctagatataacatctagcatgtacctcggtaactctctttttcgttgggggacttcgacaggtttagatagctatcgccgctattgatcatatgacggagagttcgctgatcctatcgtgcaggtaatcgctgctgggctcaataaagacccaggaattgcccgatcccgtgggcaatgcagcatattacagacgttattgccaaagggtgtcacatcatcccgcattgagggcaactttcaatgtacatatcgtttttcagtgccgtattgaaacagtgaactaatgtcgccagacttcatcatccctgatcccaaatttgaagccctcaacaagctggccaggaaccagcgctacagctatgccttctgattgggagttaatgtatctgagaagttggcgctggaggatcgaagcccatgggcgaaaggaaatgctgcaatatagcgagccgtgtgaagcttcagtatctcgctgccgtgatattgatattgttagtcagctgcacatgtggcctctggggttataggatgcgactgcttcatatagcgcaaactcagagtttttacatattcttggcagtttaacataagctctagagtcggcttggacagttcgtaggtactatagacagtaataagtctcatgattcgctcccgcttgagctatcttttgaaacctgtatgaaaccctactctagcggatatatatgcgccttgatttcgatagcctcgaaactcgaatcgccaaaagacacgatctgcacatattcgtaaatttaaggcgtgagctcttcctactcgcaaatgggggctttgcacataactcttcctaccagaacaaattcggtattccgagttcaacgccaattcccgacgcgaacgcgaagcatccgtcatcatccacctgcctacaaaaagaccacattaaatacataccatgcaatataaggggttatgaattggaattagtcaacatcgaacaatttgactatatttcacgacggcccctgccgatactcgcaaactactccgcaaaaattcggtttatcaatgtcagctatgccagcatttcgccgtgcgacgcgacaaatgaggactgagataaagaaaaagcctaagaattctggtattagtaagtactatctcatttatttaatctgtaatgcacttgtcgttgtttctttcttaagtgaaggtctcaggatatgtggcttgtagggaagtcggatccctttagtagtaggttaattcccga

SEQ ID NO: 11596 - DNA, 121 bp, Emericella nidulans
atttatggcgcgagtggtggacggtggctattgcgtacatgtgcatgactggtctgttttacagaggaggatgagctgctgcctgcgggcttgaagaagaacgaggttgttgaatgggata

SEQ ID NO: 11597 - DNA, 1733 bp, Emericella nidulans
ctgctcaggccataacactagcttacactgtgacttccagtttgttttttatctcccagttcttcgctgcacgctcactcgcacgagtgtggaaaagggagattcgagtgggggaccaggaaatcagggctgtgtatcagtattagccaggcaatcagagaatgagactggcagctgttgtctgatctcgtcaatacttagttcttactggcctttattacccgtttgccgtacgcaactggattcagatagtccgctgaaccagtttcgattgcttcagttcctcagaggctcccatgcctcagatgcttccatccgatgcttccaactacagaagcgtctacataatgagcttcagtgaatatattatttcgtgcagcgaggcaaatagttgatatgatagaaagtgttcgtaaacagagacccagaaaagtcgaaagaagctacaagcgtgcatacggaaagtacctacttaggatccaacataggcgcagcgctattgaaggggacttagtggtcatcaatactttccatccgctaaacggaatatggtatgcaatgcttgtcgtcttgaacgcatgctctcttagtaatcagaagagcccatgtagttagtcttttcatagtacaccgcgatccggcttctgcccaaatgtacggagatagtagctggctgtttcaacctcagtagcatcaaccagaaccagctagctgttaagggtgaatgactcacgtctgcgaccgacgcgaatacccagactgcaagactgtgatggaccgtgagcggggagaactgcagacgggattcctaagtcgtccttttgtgctactctttcttggattcttcttggactatcagttacgacgttccgtttgttatagacaacacattctgtttggatactttctcggggcttttcattgctgcgttttgaaggacgatgtcagaggtaggctaggtcggaattcaaggaactgtgtttaacaaccttactgtgcacatatcttacataactcactgcctgacggtcaaaattcggctaaaatcacaagcaagacatgttctataggtcagtgaggagtcttgatcggcaccctgtagctttgcagatgttgttgtgctccggctggaattgggacggaatagcgccagcctgttgggcttgctcttgtgcccgatcctcatggccttcgactaatactttagtatctgtgccttcagaagtaggccgagaataatcgtggtcttttggcaatccaacattgacgacccgttttttcagctgggtagctcctatcgggctgttagcatacagctggtatactcaagcgcggtgtgcaaaacagggcgtctcgtctactcagctgtagctaaaccatggggataacgcgttagaggtgaagagccccgtcgttggtgttcaagcgagcacagtgaagaaaagctgagttccaggtaagtgtgggtgagaatgccacctacctggtaaagcagggatgaccacaaaaaactgtcggacctaggccgcagcttcaatgcttcaaggtagaattcggtatgtattctggacaggggtgcgcagtcgatattctcgatgagcgtatctgccagcgagctaacctcgcgtcgagagccgattgtggaacagccgccaaataagatcctccccgtattagcaacataaaacattcgtcttccaaatgagcctggatatttctctggcgtcgtcctt

SEQ ID NO: 11598 - DNA, 105 bp, Emericella nidulans
cgaagagcgctcgaatgtcagcggtgcagcggcggtgacaacatgggtacgcagcgcagaactgtaattgcggaatcgatcatcctcgaccagcatgactgcggt

SEQ ID NO: 11599 - DNA, 1374 bp, Emericella nidulans
aagtccgggttaattgagggttccttccatacgcgtgttataaaaatttcctcgttccgaaagggtcccgttctgggttaacgcgggggcctagcaatcttcccggccctttaggttcacacccaattttttcccgccaaacgggctttggtaacctgtaagggctttttgggcccattgggatatcaagaacccacccagggctaactgatttgtgaaaagggcgaaagggaaaataagtgggctttccattttcttcctaaaataaacgaggccatacgatgtcggcacttttcagttaaagaaaagagtggttcctcggctcggaatatccgccgggccggtccttgaggctaaaattaagcttgtttggaagccaaacgtccgagcatagaggaacagcggcacggtgggtatgaaaccgagccgcagtatatcgtggcatagggtgcgtgagacagcaagtgttctataaatacggccttattgacggcgccaaacgccctaatcgtccgcgcataatgactcattccattaggtcttctatcaaaaaactcgctcttttcgcactgctcttggcctagtgctagcacgacccttcaatccgcctccgcaacagcaatgccaatgctactactccaatggtctcaaccgagtacagcaccgtcttcgaggtagaggccactatcggcagctagaaatttcagcttctggtcggctgcggcagcagcgacttctttgtaatgaggacgggcttcagctgtctcgacaaggagactgggctgcagctagcagacgaaatggtgcggctaccacctcactaggacgtacaacatctcagacatgtatgaaaaccctctcaccagatgttcggcattgagtactgctccggcgtgatgagcggggccatggagttcgaggaggccaccgttgcaggcgtcagcctccagggagcgcactgcagtcaccaataagtcgacgctcttgggaaggggcgtcagttcagggctctcggggttgaggttctggtctttacagctgataatcagataagaccggcgggagacctgccatattttacctacatgggaacgagcaccttgcttgtatattcttattttggtgaacatctcaatgcttgtcggtggacttccggtatgtatgctctcttgctcaatgccttaacgttgaactcttcataaccgggagcagagagatgcgtgaatctacgtcgtcttctatcagcccaaagaagcagctacgagccagtgggtttatcgtgcagtggtaaataagttcgtcttggtgtcgagagttactttgttacactttccctggtgggaaaaaaaaagactgtgatatttgataccttac

SEQ ID NO: 11600 - DNA, 2875 bp, Emericella nidulans
gtacctcaacatgatatttcccgcactcgtctgcttgggaatgttcaccctttgccccgagtctccgcgttactacatcatgcgaggacagcgtgataaagcccggcacgtcattgccaggtatcacacgacgagcggcgatgtcaaccagcccatcgtcaatattgtcatctctcagatggaagcctccattgagaacgaccgtgccggccaccagaagttctgggacttctccgttttccttcggcgcaccgtgctctatcgccttatggtccttttcctctactccatattccagcagtggaacggcggcggcatcattacctactacgtgagctgcatcctttttgactcttatcatagtcgctccagactgacctcgcttaaccttagatggtgccagctttgaacacaattggcatcacagactcgatcaaaattctagggattcaactcggcacaaccggcgtatattttgtcttcacagcagttggagccatgattatcgacaaatttcgccgacgaacaatgatattcgccgggctagcgacgatgattctcttccagacaacaacaactatcacgtcctggcagtacgctgttaatgccacgaaagctgccgccggactgacgatattctggatctacatgtaccaaactttctcggccctcttcgtcgccacaatgcacaacctctaccccatcgaaatcctctctttaccccttcgtgcaaagggtatgagcttgtattctttaatacaaggaggtgcaggagcttgtcaggtgcggaaacccccctttctgtatcccaaagctcgtactaatgcaatcaattacagacatatggcatcagcgttggtatcgataagcttggatacaagatctgggttgtctatattgtttataatacggtgcaactggtgttgtcttactttgtgttcccagagacgagcggtttgacgctggaggaaatcgatgcggtctttgagacaccgggcgttcggccggtcaagatgtcgctggatatctataatgcaaaaaggcaggtgcagagggagggggaaccttgatgtttccctaacaatatagggttggtagtcattggctcatctcatcccagctgttcttaggtctaggatcaaatttgagcggcatcttacttactgactacagtaatctaaacccatctaatcccgcatttacagattgagtgaatgtcttcgcgtttagattttaacttgaaaagttcagtcaatgtacaagcggattctactggattcggcagtagtgggcaggatgtcgacttgactacagaagaaactgtggttgagcagaagaatccattctgataccctttttatttctttgcagagagatctctctttccaaagacccggaacctcttcacacctccgtccggcacaagagtaagcttagcatgagtgaaaattcccgagtcggccgcaagatctgcgccctcaaagacatgttctgtatccgcctggcagggcttatcacctttgacaatctccgtccatcccgcatggtcatgcgcaggaacctcatcactgccaacggagccggcgggcagtccatgaacacgcacggcgcgagggaagttgccgcggaaatccttagtgtcgacaacgacctttgacacagagccagggagtccaagcttgataacagcccagtcgacgtggcccttggcgcgggaccgggctgtctcccagccgtcgcccatgtcctttcctcgaccaggaagaagtaggttgctgcagggtgtatagtgctggtctgaggcaccgagggcaagacctcccaagagcgcagaagacagttcttccgtcggcaactcgttctgatccttcgaagtcgactcaagagtcggcgggatagcatgcccatacagccgtagccggccgaacccgccgtctggatacatcagcagccggacatgcgtgtacggagtcggattcgccgcgtcgtagctattcaacttccacgcgcgccgctgtgacgggccgcattcctgtggggggagaattgtcgtccacccgctgtagctggggtctgcgacttcggcgtcgctgatgcccggtgcatatgtagcctgtaattcggccttttcgccgtagttgccgacgaagaagcccgtatagaaatcgacgccctgaatcgcgccgctggcgacgccgagcttgatgactacccagtcataggggtctgggttgtgccggcgggtttcccagccgtcgtaccaagcaccggtgtggatgaagacgccggggcggttgatgggcggtgttggagtcagcaggttagaggcagcagcaaaatagtcgtttgagcaggcgagcactttgctgttgagggcggctgaggcgaggttggtggtgtgggcgaagaccttatcgatgtcctcagaggggacgaaggtgatgtctgccatattctatagttccttggactgtgtccgtacacgaatcagtatgagaaccaggagagagaaagatcgataccgactctgattgtgccaatgtccttctttaaatgatggagaagtagtggtatttggcggggcatgcgatgatgttatccaccgctgataaggaggagctcttgattactcgatcccatcccctcattctacccttctcttcttccctctccatcttccatctcctcttgagtcttcttaactcttcctcctagaacatccgggttaccagtcgatcgtcgcttccgattcgtctcttggatattcaattaccaatctcaatcatactctgcgcaatggcgtcgaatcgtcttcgccccactactccaatccagcctttgtcggagctctccgataaccgcatcgcccattgac

SEQ ID NO: 11601 - DNA, 121 bp, Emericella nidulans
attcgagtcggagtagaagatgtggcttcaatgtgcccttgccccgcgtttcactttgtcttctgcgacgtgtctgaatttatttatgttccgggcttgtcattgccttcttgcgctaact

SEQ ID NO: 11602 - DNA, 1129 bp, Emericella nidulans
ctgtaatccagcttgctggacgatgaagcaaactgtttaggaggttgctgctggtagagctgggcgcagaagtagacgtggaagttcagcgtatcgatgacttcggtgatacagtcgccctctgcctgtccacaagtcttgccctgtccgatcattgccgctgccatgagcttccaccggtacttgggagtctcgactagcagggctgcgcgtttgtagattgcagcccggtcccggaaaggcatgttggcccagaccttccttgcctctagagcgcctgggatcgccttctctgtgacagtgttgctatccacctcgtagtattcggccaacggctggccatggttgttccacggatttgcctgtttgcccttgcggccggtgtagatgcgctcgccgttgatgatactgggaatatcggtgactacactttccatctcagccaaagctgactttaagagatctctttcggcggagcccggcccgtaagacagctgcaggatgagaccatgttagttattagtcctctacctcgcatgcgcagagggaacatacaccgtcggcattacctggttctgggtggcgatgaagctccatggtggtctgattaatagactcgtatggaactgagaactctttcctaaggacaataggctctatctatgcccttacttataagctgacaggagggtgatatatctcgggccgggtcgctcgactgtcttatctctctcggcccgatgatgcatccctgctccagactatgggttctcctttgcaggtgaaggaatcaattacacttctcaagttatcaagaagaaataaatggcaacaaacgtctacggatttcacggcccagtcgcactctttccgccgcagcccccccacgtccttccagcaccgtcttgttctcagtcgcccgccgcgctaggaagggtagacattccttcagttcgccatagctcattgactgcggcagggagtcagctgggacatatactttcgaagaacagatattttaccttaactacaagcgggaaccggtggctgtggtaacagagccggtgattttgtttgtcagttcgtccttcattctgcggtgagttagagagagcattccagggtcaga

SEQ ID NO: 11603 - DNA, 2404 bp, Emericella nidulans
  unsure (1)..(2404): unsure at all n locations
cggtaggccgttcctaccgaccggtgaggtaacgcgacagcgcaaagcgggcaccctggtctctgagtgggatggagacctgatgctgtaagcaaggattggacgggctcgatatttgttgccgtggaggcaattgcgagctgtgagaggaagaagtgagtgcagacgcagtcgacggagatgaagacgacgaaaaggaaggcgagttcttcctcttcacctcctcagtctggtcgaagaatctcctggaggagatgtcgcggtagcccgaacattctctcttagcccggatacactgggagcaggatggtcttttgtggtcgcactatctagagtcagtacgaactcacctaactcacaattgtggccgattggtagcgccacccaccttaagtcgacgacttcggcacggaccgcaggcagcactgagcttgccgcgatgcaccatggaagctgggatgcaaaggagatatcctaatcgagcaatgggcaatggaggatggaagatggtggaatggtccgctattgatgaataatggaaagtgagagattgggaagagagctgaataaggcggcttaggtgaggctgtgcaggtagctggtgaagggtggctgcgtgcctgctttgccctaggcgggtctaccctttctgctgactactccaagtaggcaccagtatcttccctagtccatagtacatgtaagaggttaagaagctttgtcattgaccagtggagtgtagattcccagccgttataccagtggtgtcagccactaaatactgaaggcaggagccactaggcaggctcctgcaccttcttagaaggagacacctggggtacctgcagccaaatgcaaccgttaactgaggcagaggtaggactgctctgcgagaagagctcgcttgaatttcacaaactgcttgatgaaaccatcgcgaagcatctttaggtgtagatacatcttcgaacccccttgtttcacggcctatagaatggtccaaagcccttcccaaccagttctcctggagaatgtccgttccaccgacgtattcaagtcggtacgttaaaattgccacccgatagttcgtgagggcttcgtggtctcaaccaagcaggacaattaaagcttcgtagtatcggacagcgcttgtgattcgtacggcagaaaagtatgaacggaagcgcccttgaaaatccacttgacagtggccgagatatactgggaaagttgagtgcagnaggccgacatgacatccgcactgtcgacatcagtctcaaagtctaggaatcccagagtatcccagactttctttgcagcgacatcacaagctcatcattattatgtaggtgtgagcagttgttcaatattgggccgcgttcaggcatgcgcatttggaccttgtttgtacgagagaaacccagtatgtgcgaaagtaggggccggctaataagtgcatcagatatgacagaagaaacgctctgacatagtcgaagtcgctcaattgatagcatatcagggaagcaaaactcacgccgacaatgggcgggactctgagaacggttactagatagaaccccagagtaaatcagagacgtcagcaacattcagaagagaggatattgattcaacgtggttattgtcaagatttcagccattgaagctgaaagcagagattctatcttcaagctttaggtcatcaagctttagctgttcagcagcccaacaaaggcaggacacgagtaccttgcagtttggttgagtgtcggtgttgacgacgcgagtgagtcgcttaggacggttattacctcgaatgtgtgagtgatctcctgggggtgagcatcctgactcaccctaaagcggcaatgaacgaaaggagaagtggtgccctcgtagactctgaacgatattatcccttacctaggcactctgcatatactgaggtcatctgcagtacctcaacttccaccattccggctcttcaacccaaccttcactccatagtaactactgagcactaaccccatttgctcccgccatggcctttaatacctgggctggaggtgcaaaaagtttggaccattcttacaaccacatacacaagagttcgttagggccttttggtgggctaagaagaacctcgggccaccgctgtaaggggggaatccccaacctctacggatggggaccctgccgcttctcctctcatgttagtacaaccccctcttttgactaaactgcccggttcttcccctataattcctgttactctagaacttatggcaaaaaattctcctttctaccttcctcaccaatttattatccttttcactcacttactttcttccttcgatgttcatatctctactttcatatctatcattccatctctctccttatatcc

SEQ ID NO: 11604 - DNA, 385 bp, Emericella nidulans
agtgctctggagcgccagcgagccctaccatggaggcattctgaacactgtgtcatgccaagccatgatatagatggaaccttatgtgtgtaccgggccaaggctcgatcctacgagaacaccctgttaatgcccgttttattcacagtcatggctgagccaactgttgatgcgatacgggccggctattggatgacctgtgtgcgctcgcggtcgccccgacccttgaccgcctagaagcctgtaaagccctgtaatgctgtgcgacttggactactgtctgcctatgctgaatttacgtgacgagcttggcgattatatctgaggactgctctttggattgcggagccatctgtgccacaggatacatcaaggtgcggaccct

SEQ ID NO: 11605 - DNA, 1726 bp, Emericella nidulans
cgtcttcctcctcatcatcatctctgcgcgacttgcgggagcgacgggcaggctttgcattgcctttgcgacccatggttgacgttggttccggagatcgtggtgaggccgactgagcaggagatgcggaagtatgcttgcgaggagggggagaagtctcctcatctgaagaagcgtcgtcacccgctaaagcgagcaactctgcgtcgagatcatcggccatagtgaatgaatttgctgacagccgacgggcctgctggatggttttaaagtaatggtgttatcaaacaggtttggaaggacacgcaacctcagcgagtgatttcaccgattcagagcgaaaatatcgactaaatgaaaatgaacgagaggcccctgagcggctgtcgcaaagagcgtcgtcggtggcaatactcggacaagagggggaaatgagggctcaagtatggaaaagcacagaaatttaaagcataaaacaagaatatagcagaatataacaaagtttatactgctaagggagcggactgtcgaacgctaatggaagatgaaagagtgaagtctcgaggaacagccagaaatcacctggggaacaattcttggggcccagaatgacgtccagccacagtaccgcgtgccggcccgagctaaggctggatacttaggcgcgcggctgtttttcgatcggaccacttcggcctcggtcacttcattattatcatccttataagtactcagtacctctcacggcctgtcaaaatgaaggccttcgcggcgctgcagagataccacagaccgacagctccactgctcctggattttctcgcaccgtccgccctccacatccgccaataccacgccacgccagctcgacttgcggaatcacagtctaattcgaagccgaaatatgtcctcagtaaagagcaaagagaattcctcgatagcgcgttgcgagtcaatcaagctggcgaattagctgccacgctaatctataccgcgcagacaccgcaagttgtccgctcccacccgcacctacgaccgttgatgaagcacatgtacgaccaggaagccggccatctcaggacgttcaaccagatgattgctaaacatcgagtgcggccaacagcgatgtatccgatatgggaggctgcggcgacgttcctcggttggtcaacgggtgtcatgggacgggaggcagcaatggcatgtaccgaggctgtggaaacagagattggaacgcattataacgagcagattcgggaaattctggcgtgggaggcggatgcgcatagtcgtggagaagagctggacgacgagttgaaggatatgcttgcgacttttcgcaggatccgcgacgaggaactggaacatctagatcatgctgttgagaatgattccaaggaggcacagccgtacgacccgctggtcaatgttatccggcttggttgcagggccgccattaaaatcagcgagagggtataataaacccggaggggctagcagggttgtatattatctttaactgtatcatattgagaatatttggttaagctgatttgattactgtttgcaatggaggggatctattttggcctagtaactgtgggtatcaacgtaatccagcatctctaattctgattcttcttctccaagtactgcaggaaattagtcgagaaccgcaccacctgctggtagacctcctcgaagccatttgccccgccataatatg

SEQ ID NO: 11606 - DNA, 112 bp, Emericella nidulans
agagagtgaacagctcagcacgagtgaaatcaacgctgcaggtgacccaatatggacaggagatattggccgaaaccaggcatactggatggggaacagagacaacttcagg

SEQ ID NO: 11607 - DNA, 1662 bp, Emericella nidulans
cagttgttgtcgaagttggttcttcctctaggccaaggctggatgagctgaatgggctcataggagtgactgtggctgagaccgtacttgtcggcgagggttccgagtcaaggggtagtgtggacgtttgcacgatcgtggatattactgtgactgtggtggttgacgttggttcttcgccgagattggagctggaaaatgtaggtgccgttgctggcgccggctctgacgctgaaacagctggcaatgtggatgtttgcacaatggttgagatttccgtaactgttgttgtggaagtgggttcctcagagattgagttgggagtcagagttgtagatgtgggcgagagcatgagagtggttgttgattcctcttcttgattgcctggtaatgtggatgtttctaaacttgtggaaattgccgtaactgtacttgcagaggtaggggtccaagcccaggtccagaccggcgtgggtgtaggcgcgtgtgcggatgtagaagtagtagggtttaaaggtgatgaagattcccaggtcacagcgctcgagctagatcctcggccaggccagaagattgtttggcttgtgggatgctccggatctgcgccctgcgttactatgaccatgaccggagttgtctgagtggttgttgtacgatcactcgtcgaagcactaattccccctttagatgcagtttcgtcaactggcgtggtagcagcgttactggcgggagggctgcctatgtgggcttgtgcctgggtcgatggcgtctccttcgaggttggagtcccgccgctgacgaaaggctgggtactcgaatcctgagtctgggtagatactgcgctcgtttcgacagggatgaccggtcttgaagttgtggctgaaaccgaagttagggttgtagctgaagttgggccgtgatgggttgacgctggcgtatgcgaggtggatggaacaccacttccagtctcatcttgctctagatctgtcggcataggtgaagatgcgctttgagttgcagcgttagtagggctgggcgtctcagattcagtcattgggagatcttcaacaattccagtcgtcattggcgtggaggtagtatgactaacaatagtctcagacccctttgggaggttcccaatgactccagttggcatagaggtagaacggctggcactagtctcagacggaaggtcctccacaactccggctgtcaccgaagtggctgattcaggggagaacgcggttgattctgtcgtaggagtagctggtgtcatgctcgttactggggtgtcctcatcagttgggataggagtcggagaattggttgcagactcgattcccgcctctgtgtaggtgggctgctgtgtagcaggagtatagttgggcgctggggtaactgggatgacaaccagtggcatgtcatcatcgccgtcatctctggccatgaggaagtgcattgaagcgcgccaagcggtagaggccgcatccagtgcgtcatgctcagcaattagagtaggagtgaagaaaatcgggccagccgagcaaacagacaaaagcagatagaaaaggacaatcatcgcaaggaggtcggaaaaggagcgtaggcggctaacggactgagcgagcgtgagcatcgcagtagtagtgcggcggtcccttt

SEQ ID NO: 11608 - DNA, 3828 bp, Emericella nidulans
agctggcttgaggcttatactagcgtcgaaaagatacattgtttccttgagttttcggactgctcggcgggtgcgtattcccatgttcaccatgtccaggtcaaggatgctcatttctagatagccacctgggcggaggacgcgtttgcactccgagatgatgttgttctgggcgcgctcggaacaagcggctggaaagcgcaagacagtggcagcaaagaagcccttgggaaatggcactgggtcctcgagactggcgtgatgaattgtatggtggtttgacgggggttgccaggctgctgggtgcgttgacgcggttggggtaggtccttcgtgaagacagtagacgtcggcatttgggtaagtcaaagcacagtagaacgaccagtcatcgtttgcaagcccatcaaccacaagaatcctaacatgctccccttctttaacgtggttgtgtgcggggctaaagagaactctcccaaaagacaaccagcgactagtcattagagatcctgaccgaatgttagtctgggctgtggggccttcgcgatcacgttcggcaatgtcaaacaggatagtgttccgctggcgacagttctcgaagctcggtgatggctctagaaccggagagctatgaaggctgggctggggttgctcagcagtgaatgcaggcgtgtgcacatccgagttgaagttatcattgcgcacttggtggtcgccccgaaaacgagccatcatatcactcaccgatggttgggaagtcgggcttagagacgagtgaagtgcattagcgattttggagcggcgtaggtgtatcgaattgacgcttccttcaggcgatgctggcgtcagagaaactgttggctgttggggtgacgttaaaggcacagagaggttactgttgagcccaacttggagagcacgactcgcccttgcagctgactcaatcttctcccctctttcttgatcccgagaggagggcatactgggagtctccggcgagagaacgtggtcaatgaattcgtcatattcaccccatatctcatcttccataagatctgactcgggtccagggactacagcagtgatggcagcgaggctttcagactcacttgaagtcgagaatatggagtctttccgaggaggtgagaacgttaagaactcattgttggagtaagggccggcaagaaagtccaaggcactacctttcataaggccgctgaatggtgaagtcaggtcgaatcccactcctgctttcatgtgcaatccaggatctgggactaagacatttcgttcggggctcgagaaaccccgtgactggccaggggccgaaacagtcattgaatgagactcagccacactaaacggcctggagaaagactgcaaggccggtttatgctgcctgtctcgcctggaaacaacacgcgggattcgtcctacaggcgctaatcgactagagcgcctttctggagtcatttgctgcttgagtacggcggcttcttccggagaggctttggatctatcaacagtgggtggggctggtcgtttcagggcgaattcatcatgtagctttggcggagacggaagtaggacggacggcttcctgattctcaggtgttccgaaacttccactggcagtgtgttctcgtcttccgtttctcctgtgggtggagaatcttcaagattatggaaaatctcctccaatggatcagaatcagtgtcgaccaacgcataatgggcaggtgggcggcgacttttgagggtagcaacttgagctggcaacttggatgcaggagccctatgctggggatcagaagcttctggctcccagtctttctgaaaaaacggccatttcatattgagtcccagcttagagggcttcgtcatctcaccaggtgagggggcatgccgcgtagacgcttcagagtccttcttcagtgacggagtccgagtagggcgggtatcaggtcggcttctagctctctcaggatcagctagggttggaactttggtgcggttgctgaacacggcgttgactgccggactagaaaggtccttgcgcgattctttaagctcagttgtacttttcgcagctgcggaaaacttgtaatcaaaaccagtagacaagacctgatcatgaacaggagcaggcgcagactttgtactgaaagcgcttgtgctttgctcactttgagtccgtaacaaacgtgcgccgtccataccgccaccgttaagatatactggttccaggcgcgcgaggaggaaatcgtcgagttcggtgtccgttcggcttcggctactagccttactagaaacagacttggttgtacttgttgaccttgctctcgagccactggggctgctgatactggccttgcgaccccgttgcgcatactttccatagccctcatggcccgtcccagcagcgggacccttccgcgcaggtctattttcgtttaaacgagcatccaagtccggttttgatttcttagggaaaattccaaatctcctagttctttcggggcttgggtccgcagacggggctttaggcaacttggatagcgttttggttgacttccatgccgattccggtgaagctgggctgcgaattcgggatgaagtcacagaattgagagaatcaacagacgtggctgctgactggttgctgaccagcccgtgggagctttccgtggatatgcgccgtttatgaccctttatcgcccgagcagggatgtttgttttcaccactggagagggttccacctctagttgatcagtcccttctctgctcggcctaactggaattctaactgatggcctggggatagtccggttttcgagagcaatacctgaggtggaaattggccccgcatgtattttctccgccgtggagggatctgaattttttttcgtttgccttgggattccggattgcattgacgtcctcctagctagttgactaggcaccaaaggtggcgcactcgcattatcagatgtttgcgcggcatcctcgcgacggtggttaagtagtgaagtagtcgattcctcgccttgggtcagttgaggagactttccaactgctgggctacatgggagtcctggcttctgcgtctggggtgaaaatatcggtaatctggtatgtgagggactgggctgtcttaatcgagtacccaccttcataggttgagtaattccaggagaacatgatgacaaggaagtgggggtggacgcagacgtcctactccagacaccgggcgacccagaatatcttgtcgatggcgtgcttgccgaagggaatataggggtggaaggggcaaggtcccgagtatttatagtggtccgaagactcgccagctccttagggccgttatgtaccttctgctccgccgacacagtcgtgactttgtcaggagaaagcatcggcgaccgagattccctggccaattctgtccgactggaagactgcgatgaactgtattggtggcgatccgaagcagtgatactcggaataatcacattcaaaccactgggccgcatcgagtccgcctgaagcttgctattggcgttttgctgacctattgtaggcgcctttctccgtaaaacatttcgtggtcgagtttgaactggcgggcggttgtcgataggggtctgaggtacgacaggagtatgcagggttcggtgcacgtgctgattcaacgtggagtaggattccggtgggtgcgtgggtgctcgggggggcatgtacggacgaggatccgaggagaggacgaagtttgattgtgcaacgattgggcggttctcttctgcttccgacatcgacgccggccttcc

SEQ ID NO: 11609 - DNA, 575 bp, Emericella nidulans
cctgcgtgtctgcatacacacacagactcccaccacatgaggcagtgcgtatgatgccaggactatggccagtgatgccccgtggacactacgtatatagaatacatgctgccttcggacatggaccttgactggtacgagcctaccccagaggcgtgttgtgatgtccaatgcctatggtgcaagccctacctacaggagaccctgactattgcgctaggagccgcgttggctacacgtttcttgcctcggactggacccattttcggtctctaaggcatagggaaccacaccgcgagccccttctatgattcccttgcacctggcgatgctggcctactggccggaaggacggcccgaccgatcgccatgcctgaagacttttcccatctttagaccctatccttgatcactgcgactgatatctatttatgcctacttcctaccgattgtgctaccttaggaacctctcatagttccttattgaaatctccgttgatccatcagcagacctattcatatcctcttccagcccagggctgaggctacccacacccggacccaggtgccgttgc

SEQ ID NO: 11610 - DNA, 169 bp, Emericella nidulans
aggagtacccctctgcgcatgggttacgatcctggggtcgatcgtcgacagcgcgacattgataacaagcgtcctgtttcctacgggtacgagcacgagacgaactacgatgagagccacaaggtctaccggatcgcggcgtcttactgcggaaccggctgtgcgccag

SEQ ID NO: 11611 - DNA, 545 bp, Emericella nidulans
agtgaccctaatgatccatttttaacgaggagactggctcaggctgccaggctacactactgaatcgcaatggccaatgctttggatgctctgcgagccggccgcaccgataacactgacgagattagcgaccatgagcgaggtacctgcattgagacctctggtcgtacagagtcgaggaagccctaataccttgcacataactgccttgacgagtggatgtacagccacacgcatcttattatcttcggagggatatccagagacatggttgcatagcaccgtaccacagcttgactcaatgggcgaaagggggcctgggatacgagactgtctatatcatggggaacactcagtcaacgcctgcactggtgcctggcctaagtggatgttaggctgatcttgacatgcgagattattgccagatgagtgattgccccagacaaactcttgcttgctaaccgcacgagactcttctgcaccgggtgaggtgagtgccttatcatgcacggtcctgggattaggtcccatgcacacaggaacgg

SEQ ID NO: 11612 - DNA, 190 bp, Emericella nidulans
  unsure (1)..(190): unsure at all n locations
ggtagtgcgctaacatggcatcgatctgtcggttggctcgccacaagactgcagaacgtattcacatagggcctgtgggctacggcctacttggcacctggcagccgaatagcgatngtcctcccaactcttgttatccatgatccgttcagacggatctgctgggtctcctcacgcatcacgtcaagct

SEQ ID NO: 11613 - DNA, 943 bp, Emericella nidulans
gggcggtatttgctattgtatggtccaggcggtacagaacggcggcccctatggagtatgggggacggccagggcagaatcaggatgatgctgatagtcgactgccccttgaggtccttgaccaagaggacaaaataataataatttgggtattattatcgttttcagaatattataatagtagagatgcagccataacagtacagtagcagtagtggcagtagtgtgcaagtgtatgaatggcttctttcagtcccatcatcattggcagagaccgcgggtccacccaccttcctttctcacttgcactgtctggacctgtgaagtgtgaactcgcgaacactggctctatcgaggcttggagccgtctggattctggatcaacagagacactactcagagtactactgtggataaagcttccagctccagtccaacactggctgtctttgaacagagtttaccttgcatgataggcgaagtctcgggagactccaggaatcccagttggcagtcaggtaccgtccactagtgtttcattgacacgaggcttttttatccagaagattccggtctccgaggaaagacaacgacagcaagagcggcgctgatcagcagcaggattgatcccctccatcgcagccagtcagagacgacggtctctgtacggaggcctctggcggccgccgctggccggctggcgagaccccccagagaggtcggcgtaattagtggtgagtggtgaccgtcttcttacgaaagaccagacccgcatcaggtattttcttttttatttctttttttccctgctctccgacactccgagatcttctctggcttctttccgcagttagtctaaagtcaatcagcaaaaaatgacgatttacgcacaatctggaaaggaagcaaccgatctgacttgctgccgtcagccttgttccca

SEQ ID NO: 11614 - DNA, 518 bp, Emericella nidulans
tgtatcgaatgcatagttcgccatgaggctgtgacacgaagcttgggcacaccatcctgttggccccatgcccggggcttcagactattgttcattgcctgattccgccctaatgtatgactgcctctactatctatgcaagactctatgattctgacactagcgtgttactgtcacgctccaccgcacgaccaacacacacctatgtggcgcctcaatggcggtcctcctcttgttgtgcataccgtgaatctatgcgtgtgtatccattcgacataacggccacgttgctgaatactggtgtgcacttatctcacgtaaaacactaacccactcgactagtgccttctctgatgactactattgctacctctggaaggcgatgctgcctgctggtttgtgatccgacccgcattgatccctgtactgcagatcacccatgtcaatgccctacggctataccgatcgtgaccttgagataccactgtaagaagacttaccgggatcgacgacctacc

SEQ ID NO: 11615 - DNA, 2053 bp, Emericella nidulans
tagttcttatagtgccaaagatgagatacataccaggaacatcacactgcactcctgggtatgtattaacaagccatgtcccgccaacgtcgctgcgcatctcaaagatcttgtgcgtaacaaattcctgaagctctgaaaacctgtgctgcagtttatgggccatcaggaggccggaaaagcctgcgccgatagtaatgacgcgcagtttgcgtggcgtatacccatactgggggttcaagggtacggaacaggggtgaggtgtcggcgtcgcttcagcggagagaccgagtgtacctctggcgtagttgggagcatctgctgtaccgccgttcgtttgtccattgcttatggtctctgcgtggccgttggtcgcttgttgcgctgtaggaatggccatcttgtaccttattgacggagtatgtgagttcggtggaaaagaggaggataactcgcctggtcgacttcttataaacgagacataataatatacgagccacgtctgcatgcccggatcaagacggcattgccagcatatcaccccgcggtgggccagacgggtaactagggcttccaagtttccgctttgggatggccgaaggaaaagggtcccttggttattgataccggctgtttgatggtatctttcggtcataaatcttggcaagcttgttagatcggccttaccggctttactgggctccaattatgggtattgaccggctgtcagcgcgctctcagttccacctgccgaggtctctagccctcattctccaatccccattctccaaccccattccccgcaccccagatcggcattcccccagaaatctgacagccgaagctctcgtgcagccgagaggggaatctttctcgtcctggtctccagctctgagatgccatggccgccagcatggttctctctgccggagccccctggctccaatacacaggccagcagcagaagcgcaagcgggccgagctggcctgcaccatctgccacagtaagaaggtatccacgcctcgtctcgttctgaactttgccggaatagactgtggctaagctagtcgcaccatcgagacagatccgatgcgatctccaggtccgcaccggtcagggacacgccaactgctccaattgcgacaccgccggcaaagaatgtcgtatgcggccatcgaagcgtttcctgaggcgggcgaggactcctttgacgccgccggacagcagtgacagtgcgaggagatcacagcgcctgcagcggccggccgcgcaagagactggcagtgagaatcgtcatgaccgtgcagggacggggctctcgttgccgcagccagactggctatgggattttgataacccccctccgttgctagaagagacgcctgctgttcaagcatctagtgcgccgcctccggctgtcgatcccaccaacctcgatcaagagaactgttccccggtgacatctcgtacggaggatacagagacacgcggtctgtcgtcgcggtactatgagctcgagatcgaggccgatgcccgcagccaggaacagcgcctgctcgccgagaggcccctgatggtccgcctcctccccagcgctgacctacaacagagcttcgtcgagacgtacctggagtattgtaacccttggtgcccggtgctgaaccgtgaccagctgaacatcgacgaactgtcgcagtcgccgctacttgtcaacgccttagccgtggtcggcagccaccttaggccccctgtgatgccgcacgacgggccggctgcatattacgagcgtgcccgccagctcttctacaacgatgcggagccggacgttgtacgctctttacaagccgtctccctcttttactggtggagtccacggccaccgacagtgcttcaccgtcattcttcttggtggtggacctcggtcgtcataaggcactgcagcaactcggcgtgcatcagcagccctcattcgggcctggcccagcgggctcgcagcataaccatccgaccagccgccggtcacacctcattcgccgccgcatctggtggact

SEQ ID NO: 11616 - DNA, 2214 bp, Emericella nidulans
gttttcgcggttgttgacttggtctggggcggtattatatagtatatcgggaactcgaaatcaccgaatcggggttttaccgatttatttattcgcggcgcaaacggcgaccgcagagagtgcttgttagtcgccggtcaggccatgtccagcgtctgctctgcgaagatcagatgctcctcagtcccgacgggtacggtagctaagtcccgtctagaccggtggtgacgtaggcagctagcggccaagtaccagacgccaagtctagtgcaggaagaaaggggaatcaaaagatgctaggagtgtgaggggagacgagatgatgagtgtgagaagagatgaagaaaagtcgaggagtcggtgtaggagacaagagggaaaagtgaaggttaaagctgaggaaagtgaaggtgtaacgggagctagctgaaccttgtccagcccctagtatacgaataacaatggcaggtacggtgcgcggaatggggagaatggggaggcgaggggcactgcaccttaaaccttgcctcctcgtcgtcctgctgctgctgcatatgtagctcgaccacgcaggaagatcaggcctcgtgaacgggtgtgcctaacatcagagcacaccatgctacggtgcggttggacaggccatgcgatgcgatttgacaggagcgttccccgcgttggccgatcattagcgatcggaacgggagacgttggcgggatcatgtgaaggccaacggaatgtgatcggtatcgccaattttgtctagaggcggcagtcttaatcgcttaaatggttcgaagggatcatatattggtcttatgtatagctactgttaaaaggctacgagatttgtttttttcacttgaagacttgttgatgtgatgttttcaaaagtgacaaaggagcgaccccacctggataggccccacataagcttatcacgagatgcgagctgggattgattacgtgatgttgctgggcagaagcatagtccatctcagttcatagtgtgagtccgattctatccggtgcctggagcagatacaagagcggatacaagttgttcgagaaagtagccatagtttaggtcattaattgcaagctagatggtgcctgatgagagatggggcccgtcctcagagttgccaagactaggtgaggaggtggtagaggcgctgcgcatgcagagccgatcctcaccttgcctcacatcccctcccgcgattaaccttacatggctccagctaggtctgtgtcacgggaccgggatcccggtccagtgcacgtcaactacggtacccgaagagtacggcaaagtatattcgcagaattgtaacctgcgcaagtgggcttggagcaaataattgcgcagacctccccagccgctctgccgtcagacctccctcttatcgtggtgctctgtcgtagccacgacctcgttgtccttgtccgcgatatcctccggcagggttcccagcgcacgccctccgaacagaatatcgatctcttcaagagatttttgtttcgtctcgatgaagaaaaagtatactacaggtagtgtgacacatatatctggttttgagttagtattcttggatcagaggggatggggttgaagggcggacgtactccagcctgcgaagatgaaatagaacttccacccgatcttgccgagagcgatgggagacacttgcgaccagagcgtgctgacagtccaattgccgacgccggtagcgaaggcgtttccgcggccgcggatctgcatgggcatgacttccgccatgtagaccctgttcctgtcagttctgcgaatgtaatggaagctacagaaacgtaccaactgcaaggcccaaaggaccaggagaagatgatggtgacgcagaaaatgaagaagacaccgccgatactgtagcctctacggtgcccgtcttcgttctgagagttcaaggccgcctcgcagaacagcgcgattgtaataccgattgctccaaagagcatgggtcggcggcgtccgactttgtcgagaacgaaaaggataaagaggagattggcgagagggcctaggcagttgtagataccggcgacaagaatgttggtgctgccggtgatccctaaattctcttacatgatagtctggtagtagttgataacctagatacccgggattgtgggtgaataacctggactggaacaccgtgcctgaacccgtcaaa

SEQ ID NO: 11617 - DNA, 575 bp, Emericella nidulans
  unsure (1)..(575): unsure at all n locations
ccagtcggcgattgaccgtctgcatgtatcattcaagattcgcgcgtatggcatcaagctgaaactgagcttatttagacaaaataagccctggtaattcgcaacgcgacccggtggacttgccattggcttctgagatctncgcactgcactctaatgttggtggagcaggagtccatagcccctaactttaagagctcaggcgcatggtattctaaagtatccctaagacgggatatactgattgcatgtgaatccaaacgtttgatccctttccttcagtacattagcctttcttgaggctctatatagcaaacgataaattctgaacctacctgcccattgattgatttggatcatgatattttgtatagtcatgccctattactactctggacgtgagaccacgtaggcctagagcgcagtgacactacgataccataggcacatctacaacaagctagcaacatgatcgttacgaatcctcaagcatctatctgtgcgctaaaacactacctcgaatattgcatctttgacatcgatcgtaacactgtagaacctactatgctaacgcg

SEQ ID NO: 11618 - DNA, 138 bp, Emericella nidulans
tagtctagggttaagttagatagtgctatgagtcagagtcagacgtgatggttaatgatgtgctgtagtatatgaatacagcctgattctgctacctgtaagatgtggatgacaagtgagctgagaagcactgaatgc

SEQ ID NO: 11619 - DNA, 334 bp, Emericella nidulans
gatcagtgcggtcttcctcactgatgccagatggagacacgtactcagcagccatggaatcgtcagacacatagaattcctcccgtgtctagacgtaacactcaggatcatagatgacctggttccaagtggtcttcagtcgcttttcccatgattgtgtgaggatagttgccgcatctgatgaccgccaacctttgtatttggaccaaccaccggtgtctgcttgagagcatgaagcctctctcgaatgatattggcagctgcacgatgcaggaagacctagctagatgtacacaatagctgtcatacgattgctttcatgaagatatcgtgc

SEQ ID NO: 11620 - DNA, 288 bp, Emericella nidulans
ccactgcggattgtcctcccaggagcgtcaggcacccaaccgccacgcctatctcacccgtctgcaatggacccgatactgatgcctgtggaggagccgtttcgaccgtgtcttgagcgcctggcactggtatcctcagcagtttctagactcgtactccttgcgacagctataactccgcggcgggtgacgctggagcacgtctctgtgcaccaagtgccagagtgtctcactgcagataccgcctcatcccgtcactgcccctgttcgggtatagccgtacgatgt

SEQ ID NO: 11621 - DNA, 125 bp, Emericella nidulans
cagttcgtaggggagatctcgcaaggccgggaataggagtcatagtatatcgtggccttactatcataggtgagttccagtcagatgctgctattgtaattgtagcgggttgcaatttaccctcc

SEQ ID NO: 11622 - DNA, 152 bp, Emericella nidulans
cgttcgtgttgacttgcgtcgacgcgtaccgcgataactccttgagagtggaagagattattttatgcgtcggactgtaagccgctgccgccaaggttctggtccggtcgttgatcatgtcgtgcacgtccagatggctaccagcccgctcc

SEQ ID NO: 11623 - DNA, 639 bp, Emericella nidulans
agtgaccctatagaccggctttctgtgtgatactaccctgcctgactcccactccctgcatccctctctcctgcgtatagataagttcaagccgacaacccgcccccacactgtcaaggctgaaccggctattcggagaccctcctttatcctgagcatgcaagacccttctcacccctcactcttgcgccctatcactacagattctgctgatctgcaggtacccccctctccagcggtcccctgctccgtccattaagctcccacatggctccattgcaacaacatacaattgccccggaatgcaactacacgccctcttccgtcccaggcgcattgttctccaccatttgcacagcgtcagcatgcgcactctctaacaccttactctacgacaccgaaagctgaccgcctgatcacctctagcttatacggctatgctcccaaaatctcaaaatccgaacctggcctactctgactgctcgcccccccatttggcacagcagagtggatccgaatctgcccacacgcacgccaaagcgaacgagacaaccacagcacaggcgtcttgggaccgggacccccgttctccaggagaaaagctggctaggcgaatctacaggcattccttgctatctg

SEQ ID NO: 11624 - DNA, 595 bp, Emericella nidulans
aagccctagtgacatagagatcccactacctttcattgacagcagcttgtacacttcatggaaagaacagacaatgctccaccagtctggggtcggctgtccttgggatcacccgaagcatagcctatgaccagagctgagagcatagctgtgcaacaccctctgccacactgtaactggagccagccccctgaggtcctggacactaactagcgataaagcggaaactttcctgtaccttccttatatagacagagttagcctgcactcttccccaagtgcttggaatagaggcactcgcgaggacatatccagacgttcaggacttgtagccaacactaccaagcccatattaagggacgctcaggctgggacatgtctcgcgttacggcacaacccacgagccttgctctacaccgattgcgcacgcctgcatagcacttggatacgttcacctactgtgcatgagttaacatggctcaggtctaagcaatacgccaagaactccatgagctccgtatagactgacgcaatatttcaagccgagacgaacgtcccttttcacaattgccttcgagcacatattccacattgt

SEQ ID NO: 11625 - DNA, 675 bp, Emericella nidulans
aaaagacttcgagcttccagataccctatgaagcatacgccgcatctcgctgctgacggacctgatgtcctgtttattcacgagcactgctgtctgctgggccgtatggccccttgtcctcagccagtaatccacgcacatcgcaatgactctgatcgccaggcacctggctggttatggatgctccagcctcgtacatatatttgcacataccgccggggggcagatccttacctatgacatcatagccctgcaatacatttatgatctcgttggacctatccctacgcttattcacaggaccatcatcatcaatcataactgatgctgtgtccacggtattcacctggcagccaatgcctctaccatatctggcacgttgattcagaccaacaggaccctgaatctggatctccacccccatgactctgactctaggctgaactgacgcatgcgcctagatccccctcgccgccgctaacaccagaatgcggctgtgatccttacagcacatgcgcatgtgctaagcgtacctacccattggagagccgtcatcctggtcaaaagcgcactctttactacaggccatataactacaatagcgctattccgtatacatagacaactttcaaattacttcgatcttgggtggctacattcgcactggcttcaccg

SEQ ID NO: 11626 - DNA, 3269 bp, Emericella nidulans
tgtttgtcttttgacacggaagacttcaagaataatgcagacaactttgcttattatgcttcttctgtctttctccaatgtgacgccaacgaagaaccaggcgagattggatcggaacttgacgtcgatgtcggttcaagcggaagtggctccacacaaacacccacagcaacagctgaacctacatatcccccaggacccacatccactggaacaacaggaaccggtactggtactggcattggtacagatacaggaactggtacaggctggacctggccgtggggccaaggctggggaatgaacgatgacagcggcagtggcgacagtggctcattgactggcacaacgtcagatacaaacactggctctaatactggttatggtactggctatggtactgacttcggtactggtccaagcggtgtttacggcggctgggatgcagacaaaagctcagactcttccgctgctgcagttacatcggccccgactgcggcacccgtcactaccacggatggccaggagctctggaatctgaatgatctggtcaactggttggtgagcatgtatgcgggagacggacagatgcagggacaaacacagggacagactcagaccaagacggcaagttccaacttggactccggatctggcgggtataacgcggaggccggacagagtgcgaccggtactcaggctactcaggcggaaaatgataaggattgcgatgagtagaaggctatagtatgatattggtggagctcctgtacggagcagcgaagcaggctggccgagcgcgtgaattaccccgcattaggtgacatagcgtactatagctctagatcgttcaacaagctttgtgacaacgaatctcaatatatctaaagaaatcaactagattcaactttaattctcagatagacgatgtgagctgcattcatacagcgtatttcaaaaagtcggccgaactcgggctagccctaatccattctgccaacggttacacctggagacaagcctcaaagttagcacttagaggtttggaacaacaaaccactcccaggcctagtctagctagagaagaaactcaatttagaagcgaaagtcacctctctcctgaacggcgtggggggtagactggctgttttgctttttcttgaccggagtatctcagtcttcagccttgcaataagccatacagtcccgatggtactgacgatctcgaccttatcctgctcgtatgtaggcagtgaggtgagttctctgtacgtccaagaatcaggtcgccttgctgatcatcattcatgctaccccaaaccccatcgactcacctgcgatctttcggcattggtgacgcagccgctacccctaacagatgctacagagtctcacaatgcgatcaaatcgtcaaaacgaaaaaggacgataaaggctatagaccgaagtcaccgcttgcatcattcttgttggcctcttcccttttcccctacagcacgaagcgcccattacttgcccaacatgccctcgcggctcctccggctaaccatcgcctttgccctctcgttggggtcatgcagttccctcacttcacctgttgaaagaggcagtaatgccctttttgactacatcgtcgtcggcggcggcaacgcaggtcttaccctcgcatcccggctgtctgaaaactcaattgttcgagtcgccgtcattgaggcagggacattctacgagcggggtaccggcaatgagagcatcataccagggaatagagggctgtatgaaagggaaagcgcccagtatcacgaattccgttggtagagtggggatttatgattacgcctcaggctgtacgtctcgttcgttgcacctaaatgctagaaagttgtccctgtatagtatttaagtaggaatggctaataaggtgagcaggggtggaacaaccaatctatacattatccctgtggaaaacggaaagctgttgataccttcacgcagacgagagtcgtatttacatgaagctcagcggttgtacggccctcaacgcgatgaactatgaacgacctaatgcagggtcaatggatctctgggccgcaatggtcatcgactcctcctacgcttgggacaattcactccattactttcagaaaagcattgattttacgccgccagacatgtcaacgcggttcgcaaactccacacccagctatgatccgacagtcttagcaagcggcggtcctctttccctcacgcacccaaactacgctcagcctttcagtagctggcttgctgaggccatgcctgaggtcgatattgggcatattccggggtttcggagcggaaggcttgtgggctcgggatggttggtgcacactatcgaccaagcaaccggaaaacgagcctcgtctgagaccgcgttctgaggccattcttaggaagggaagaacttggtcgtgttttatcagacaatggcagagaggatatcgttccaggaaattgcggctagaggtgtgattgtcagtgatatggtcagcaaccgaacctttgacctgctcgctcgacgagaagtcattatttctgcgggggccttccagtcacctcagatgctgatggtctctggtgtcggccctgctggcttactcgcagagcacgagattcctcttgtagcagacagacccggtgttggacagaatatgcacgatcatgtcttgtttggggtttcatatggggtggatgtcgacaccgcgtatgcactgggagaacccgaggccgccgctgaggctgcaacactctaccacgaagatcaagcaggaccgctgtcaaaccgctggagattatgctgccttcgaaagactcccgccggactttcgtggtggcttgtcggccgaagcagagcaaggtataggcctccacaaacacaaccatctatcctgctaaacagagtgttcctgcaacaattgcatctctaccaagcgactggcccgggatacagggtctcttcccggcctacgccggaaatttctacaatccctacgtcggcggcccaagggaaggaaactacgtgaccctcctcgcaattcttatgagccctcagtcccgcgggaacgctcactctcctcgcccagtatgctggatcccccactcattaatccagcctgactcgcccatcccgtcgacgtggagctcgctgttgcggcgttcaagcggctgcggagtatcttccgtgcgccggtattggaaggcgcattgactggggatgagtattccctggg

SEQ ID NO: 11627 - DNA, 4742 bp, Emericella nidulans
tactttccgagtgaccataaataatcttcttctccttcatctcttcccgaacctcccttgccctgtcctggtcgatccagtctggataggaccaatgctccttcggaatctcgccataacgcgtagtgccggacaccagtgatgtcgtgatacgtttaaagttgtcatcgaatggttggtcgtttaggaagatccagtcatagtggaagttgcggttgaaacgatcctccacctggcgaatggcctgcgcaatctcccaaacatctgaatttcgcgccagagtcacaaaggtcgcattagcacgaccgccaggatgacttgcagcgaacctcactacctcgctacttgattgtggattaagtgagtatccgaatgcgttcacgggtcggtcagagggcgggggcggaggcgttgaaattgagcttgaactgtctggaacggggatcgagcgcctggagaggaggaagagtgctagcccctacgcgattctggcagtcagcaacactgtagtcaacgagggaagtaaaccaaccagcagagtgaatatcagatatcgtagatacttcccctgtatcggcggcattcctgcagcagcgtgctataacgcggagtcgccgctcgcgttaactggagaatgtttggtaatgaatgtggctgctatagcctcaccaaaagagctcaattcacgcctagagcccaatccgaactctaggcgagtccgctatgcgttcaatctttcggaaagggcacgatgaatttgctgcggaaatcagagggcacaccagcggacgttgacggcgaacgtttaggggctctgagagttgaatctcttgataaaatttgcaagaaagcactcctaggggaacggctatgcatagagcaattaacggtcaactaagttcattaaagaggtagtgatgttatagaggacctctgcctacggctctgcgaacgacttccgattaccctattggcgggcggcatagcatacgtacacccatcgtgataatgtcagccacaggatccagaatacaagctgatcgcgtcgggccagtaagtgagcgctttctttcttattccttggacagactgttctgctatagaaccgttgtccagaagccgtctgcaccgcagatcggagtatcatactaggagtaggttgctgtcgaggcagtaagaacctctcaatccaggcaagcgccttttggccttttggcacttacaccatgcccaatgtcatcgggctcctatttgtgacctagatcagtttttggcttctgctaccaagcgtattccgctctaaaggtcttttcaatgctggggtgaatgagcgacaaatggtgccttaggctgtaaggcagaaaacgtgacccgtcatgatcccgcaccacaattatgatgagtgctaaatctcccgagtctcccactacctccccacccccatccaacccccctccagtcgaatatgtcgttcttcggcttcgacacaacccttcctagggaccgagctccccagggcggacagaggggtattttcgacactcccgatcccttcgctgaggtcgctcgcgccagagcagcggcgcaacatgaggacgatgacgacgtgtaagctatctccattcattggctgggcgctcgcggtcaatgagtatgctagcacgaaattgtactgattgtgccctccgtcaaatgcagcctcaatttcgaagatacctacgacggtttaggtgaccggctagacgatgatcaggatgcctttaacgtatacaccttcggcgatgtgggcatcggccctgtcggcagggacttcgacttctttggaaagacggtccaagtatgaaatgtcatcggagaagagcatgtccgctataacctcaagaatcctgaagcttccgttgctcctcgcgccaccgtagccgagaagaccgcaactaccacggcacagcagcctatgcgaacaggatatgaaaagtattcggaccccgactatatccctgatctacaggcaaagtccagcgtttggggcttgccgagtaagccggaatctgcgccccaggctacgacccagacaaagaagatgatgagcctcgaggaggttgaagcgcaaattcggaaccagggggcggcggcgccaggcttcgggccacaagtatcactaccgcagtacgttcccgaacctcccctccctcttcaaagacctcctggtcttccggagggtttcccgcaattgccgcctgaatatttggaagcccagttcggaaggggtgtaccaccgcaatttttgcatccacggaccattgctccagagccgtttcctcatccggcccaggctcctaatattccactgcatctcctccagaatccaattcagaaccccaacgctccgccatcccatatggggccccttcaacaccaagcaattccttctcgcgatcagccgccacagcgtcttccccagcagcatctcccacagcacggccggggactcagtgcggggttgccgcttatcaccaacccacagcagttgatgaatctcacagaagaacagcgcgtggcgtacttgatggaggacgccaagcgcgcaaaaaggaatcacaagatcttccttctatccaagggtaatggtctgatgactccccaagataagaatttcattacacgtatccagctacaacagttggtggcacaggccggtaatatggccgataccgattccgatgctgtcttggcggaagacttctattatcaggtgtacagccaaattcgcggtgcacctcggcaacacccccatcagcctcttggtcactttgcgcagacttatctgctccagactggtaatcgcattggaggtcattcccggaagcacggtcagagcgcggataatcacatgcagcgcatgcagcagcaggtgcaacgtgcggtcgaggctgccaaagcgaaacccaagaacaagcagctcatcattgagggtagtttaggaaagatctcattcggaaatgcgaaggctccgaagccctcgcttaacatcaaacgtcccgagagctccgagggcggcaaggccacgaaaaagttgccaacggatctgagtccaagtgaccgcaagtccattttggcgaacctggagggcgtttacaacacgttgatggaactggaggacatggcacgcacgatgccgcctccacctgatgagaacgactccgaggcgatccagacacacatggagtggcgccagaaactcaatgcgctgaaccaaaagctgtggaaccagatgaaagttatggaggccattgtaccaaactccaacaccccccatccctttattgcgttgctctcttatccaaagggcaagaaagccatcccgcgcatcttccgtcatatcgaccaggaacagcggattaccatcctcaccatgattgttgtcaatcttgataacctggacgttgtccgccgagcgcttcctgctccaggtgaagctcagcctcccttggcggccagggaagccattgatctattctctcaggccgtgatgccatgtcttctaggctatgttaacgaggccccattcaatatcatcattgggctccttggactggtgcttacccatacgcacgcgcagtttgttgctcggacacgaatcgggctaggtatcttgactatgcttctgagcagggcagaaattgtcaaggaggccggacaggccagcgagcaagactggaaacagtgggttgagaaattcaacatacttttcgacaccctcgagcctacttttgccgatatattcccgaactccattaacgcgggtgatgatatgtatgtttggcagttcttagcagctatcggaatcggagcaagcccggagcagcaacagcgcttggttatcgccgttaagtatgtgactcaatgccaatgtatcctttgatgatttactgactgccggctagggaccgtgttatggaaaccgtcacgcacagcaaaacccttccagctgacatggccagtcagcgacttggaaatgtcaatctcttcatgcgagctatcgggttggatgtcgagcttctcggttaaaattcgccacgagaggaagattgattccacattcactcagttcttgcttcacatgaggcgcgatgcatatagcagtgtacagtggtgtcaaattacgctcacaatgcgccccaaacacgaccagagttgcaggcataagcctgtcattctttctacacgatgcgcctctgtggatcttggatccttggtgccttctactcttccctgcgtcggggaggaacgcgggaaagtggccagatgaaatggctgaaacgccatctgactacttttggcgaactacaatctgtactgtaccaagaatcgaatcggcaacgctgcagggatacttcttataatgtacttttctcccgtcagtcccagctggacggcccagtgcctgagcagtacggtacagtacaactgtagctagcattattatctagttctctttcttcgatcatgaacattatgcctttttaaactgttatcaaccattgtaggcatctcacctactagttaacattgcccgtggtatataaactaatccactactctgtctccatgcttattcaagatatgtcgcaccaaaatatttaatggtcttgagtgcacccgtacttgtataattggaatatggaaccgttgacaagcctgtgactagtagctagacccgactagcaatcgcccactagatc

SEQ ID NO: 11628 - DNA, 525 bp, Emericella nidulans
aaaagcttctgagcctctaggtgccctattgatccatataccgacccatggttactggtccttgggtgtacaggtcgcggcctgacgcggaatgtcttatttgtaccatctacccagatggtccgtgacacgttaccaatacattcacacctactagagccggtcacgtgggtaatgcctataaggcgtccggcctatggtacaccgtgggccggcgggcgctcactaactgtattgctggcatggccacttaaccgggcccccatgatgaccgggttagctgtgctatgcgagcccccgacgatggacttgttgactacgagattttagctggactaataaccttggcggtgactgtgctaatatacctatacccgactgcaggcatcagatccaagcacttcacactcctggtcaggcacagcagacgctcaacttctgggtctggcccagcacatggtgaactttagctcaaataaagccaactcgtaacctcaagagcgggtcctctcttcagtgactctg

SEQ ID NO: 11629 - DNA, 151 bp, Emericella nidulans
  unsure (1)..(151): unsure at all n locations
gcgtcaggtgacagagacgagaccgagtgagcagagaggatgcggaccagtttaacgtatgcgtcggaggtgcgccatagggacacggtggtactcaattnagtgcntaatccttcaagagcgtcagataccgtctaatggcgaagcgaga

SEQ ID NO: 11630 - DNA, 109 bp, Emericella nidulans
cgacacttggtgctccccattggacgcacttcccgcttagtgggccgccaggttgggatcctaaagttggcgcgtttattcttcatgcctggtggaccgagttgcttga

SEQ ID NO: 11631 - DNA, 954 bp, Emericella nidulans
ttatcttatcgacatttcggtgcagcgagtcgtcgggaaggttcaatagttcgtcaacaccatcccaatcatcatgctgcttggctctctcaagaccccatgtgttcgtgcgaaagtcctcaactgtaaggataccagtgcccgacgtatgaatcaaccacaatggcttctcaggcgtgtggtgactggcacctttggcaatagcagtagcagatgcaacgtggtcgcaatcagcgcaatctaagcctattagtaactcatgatcttattgagtagtataggaatgtgtatatacttacggaacacaatatttgcgttcttggtctcctcctctattatggcagctgagtctaggtcaccctggacgactctgacgtttggatactcgctggcaagcttctctcccttctccttgttgcgaaccaggacagagatctcccagtcaggatgggcctgggttacagcatagaaaacatccccgccaatatatccagtcgcaccagtgctgttgatgtagtcagtataacgacggcttgattacaaaggagctcacctacagaaagacctttacgggtgccattgttatagatccaacgtcgcaaaactgggatgagttaagagctggaagatgtatgcgtgtagcaggaggaaaagtgggcgtgggacgatgaggttttataagaagctttgcttcgtttaacttattgcatcattgggattggatgctttgaaatcaaagagtgggagtattgaagagtggggtgtggggttaagttggatgaaactggacgaagctgctggaatcaaggggcgctgttggaaatacaaaaacaatccacacacatgggaggagctttgcacaaaagctcaagccagcctgtaactttacaataacccactacgaccgagatagcagatatggggtgttctaggactagtcagatcttagcacgg

SEQ ID NO: 11632 - DNA, 661 bp, Emericella nidulans
agaagaaaaagacttcgagctctagtgaccctaatgatcacgaagtgcgcgagtgtgcacagctctctatcgcgacacgaccctcgcttgatctagcatgagtcatgaatgttgctatccttgatacaccagcctgcaccacaatcatgcctgtaggctctaatgctatgcgcgggctctctacatgggtcctatctgcccctaagcacgccatgggttgactgctgacacagagcactagctgccttgtgatggtcacagcctgaccatagctctccgccataagtgatgtttcaaccatactaccctcgcttgagatgagtagcccgaggcccttgttctctctcgcatcagctgccttacatagccgctttcataacgcctccgatcaagtgtgcgtcaaccttggacgcattcttgactgtggcccgagttgaccagacatgaaccggccactttgccatgccaccatgtgcacatgacttgagctcctgatactgcaaagagcatgcgctaatagaacaaaataggcaatcatcgtagtgataatgcaaggcaccgagacagttgcttacgaccgacccgtgagggcacctgattgcttctgggctttcccacatggtcacacgtgatatttgaaactggctccgtacaccaggct

SEQ ID NO: 11633 - DNA, 213 bp, Emericella nidulans
  unsure (1)..(213): unsure at all n locations
ttctccacgccgatttctccgtcagcgtaattcatgtggctgtgtgtatgtctccggtgggactcctcaagctaatgatgcgccgncttattccttccgntcggccccctcttcngtgcacttcgttacaggtccgactcatcacgctatgaccgatcactgtcgncatcagctccccctcattactgngccgtacggccgtagtggaccttg

SEQ ID NO: 11634 - DNA, 122 bp, Emericella nidulans
caaaaacaaaaagaaaagaaaacagtacgcgctttagagccggatacagagtacagcaccgtgcaagaagaagacaaacggtttgatacagatcttcctacctcacatcctgaggtgcttct

SEQ ID NO: 11635 - DNA, 2276 bp, Emericella nidulans
  unsure (1)..(2276): unsure at all n locations
atctcatttaaaaaattctctactcaatctggcgatgcaaacgaacaatttgggggcaatacttaagatatcatgggaccaggggagtccagttttgacgacttgttcatggagagtgagaacatgggcggaaacgacaacaacgaccaggatttgttaggaggcgatgggttgatgcaactgaacgagcttgacgataactggttcacatgaactggagtggtatagtaggcgagttctgttggcatgcccgtgtatctgaggctctgagcggagccagacgatgtccggcacgcgagcctcaatatgctccacgcgttcgagagccacgctgaatgacttgtgcgatactcatgcctctagctcagactaatgccagctatatattccgtactcccaaaggtctgccttccgctttacacatgtgaagccgcttggctgcaagtatcagcggcgctaggccgattcttcataattaatccctggttcccccgaattcccgtatccggtaagcatgggacgaacggtgaccgttcagagtacaatgctcctgcatacgggtagatagttccgatagccatgccggtgagcggtgctgagtcactgacggactcggtcagaccgaagaaaccccgaatctcgggtgtttgctgcagacaatggcgttcttcctcgttcttcctccgacgtctccagctagtctcgagtaggtaatttgagccattttaggagccgagccgcgttctataacaagggcaggcggtttgccttaggtactctaagtgaggcaactaaccccggaattgtgcccaaaggagcccagtggtgctaacggatgacagatgcgctaaaggctaaggtagcccgcttgaggcccagctcgtggactttcgagtcaggtgtcgactctcgactcgggaactcatgatgtcactcagttgcttgacgtgaaaaggcccgtcaatgatcccccgcattgagtattttggcgagtgctcttggcttgcttgaacccaagggcttggctgcgccctgaacatcggcgatgctgatcatggtgggtggctatttctgaacaggaggacggtgtcgactccagcgttttttgagcttcttggagtgcaaattcaagaggatcttgaagatgccgaggcacccgtcttggatcatttttagaacactccatgttctcagcgaacaattcgatgtgtccaaggtaatccgacgtcatcccgaggagttctccgtaggccgggccaggccttttcaggtaatcttcaagacggatcagtcctgcggcatcctatccatcacatggccggctctggagaagtcaaagcggcggtagatacaggctgtacttggaggtaaagtcaatctctcaagtgcgagcgctcaaactactgttccctacggagtatagacgcctactccattgttgccactggtagatccggatcccattaccagacccagtcgtcatgctgtggtaaagagagtttgtaatatccagaaccacagctctttcctccattaccggatcaccggagtagccagtcaagcaatttgaaggaccaattctgcctccgcgtcatcgcccatgaactgttttcctgtctgatgatcttcaaataataataataataataatctgcaggcccaaacagaaaaaaagtcttcttcccgcaccgcctcacttctgtcattcttgtgtctgggccatccgcatccgcgttcacccataccacaccgtacaaacatcgaccatcacggactctctatctctggtctctcaactcctcttcaccttttctcgattccgtcttgacccaatattttttcaagacgggctgcgcgttctctcgttacatccttaccggcttttcgaccaaaaccgccctgcagcgtgaccgagctttgcagctccttgcgtgtcgatcatcatccccagaaaggaaggacgagcaatccaaaagcaaagacacacaagaccctgctcaacccaactggtcgcacgactcaggttcgcttggggttgtgcgtaagattcgtaccaacaatagagcgttccaatcaataatacangagactagagccctgttaggtattgaattgaagccttgaagctgctcctgctagctgcactgcaaatccctcaatttcgggcgcaaagcctgaccctgagactgctccatacctccagaaccaaaatcgatcccaaagtccagacgccgtaagttgaaacctgaagagggtcgtcgccttactttaatttt

SEQ ID NO: 11636 - DNA, 195 bp, Emericella nidulans
cctgacgcagccgatcccgtgaacgcgtattccagtgggtacggttgcgaccaaccgctctgcttgccgcaatctgctgccttcaggcttaccttggtgttaatagaatagagaaggcaagcctgcatacgtacttgtcattacctttgccgagggtttcaaccattattggcccgctagccgatcccgcttgcg

SEQ ID NO: 11637 - DNA, 2483 bp, Emericella nidulans
aggcttgaggggccccgcttaataaattatttgggaacccccgggggaaaatggggtaacctccgtgtcaccttacaattgttagctaaagtaaagaaaatggtctctctttaagccccccgggctagggttcaaacagggccttttatgagttaccatgcgacctccccccagtgtctcgcctttgagctttggcacatatctccttgtaaagaagtatttgggcatcttgcttttcgtgcctggcagctatgagtctgtcatccgcacgggcgcgtcctgaaagttatgtcaatgtctaccagtccctttcaatcggcactattaggcctatgtctgaagccaccaacagtgtcaccatataaggtctaccttggcggccatcactcagtcacactagtcaacgcgtagagagtcatgccacttgacctggaaggacgagttcggcagctcagcgtggtagcagatgctctcgcttttggcattggcaagtcgaacatcgggttggccgtcattcgtgctccagaggcagcatctatgacagacgagcaagtcattgacgccatctggccggctgtcgaagacgcgcaccaaacgctgccagcatacggcctgctgcctaagaacatggtccgggtccttcctgccgatgcaccctatgcccgcaccgacaaaggcaccgtcatccggcaggcattctaccgcgattttgccgacctgatagaggcgtcgtacgaggccggagatgatatgacgggcactatgctcttgtcggaggaagagctgaaggcgttcctacacaaggagctctctgctatcgttccggccagaacgacgaatggttttactgacgaagaggatttcttttctctcggcatggactcgttacaggcttctcaattgcggtcagtgctggtcaagtcactcgacaccaagggatacaagttagggctgaacgttgtattcgagcacccgtctattgcctctctagcgcggtaccttttctccctcacttctaagacgctggaaactatggcttcgatcgaggagcaaatggaggcattaatttcaaaatacagtgatttcgagcatcatgtccctcgtcctaatgaattaagcggaagatacattgtgagccttcgttcttgacctaatgatatttaagctaagaatcttcaggtcgttactggagccaccggctcccttggctgccacgtcgtcgccaaactatcaactctcccagacgtacaaaagatctactgcttcgtccgcgccaactccaccctcgatgcttacggccgcctcttgggctccctccgcaccagacgcgtctatgatactctatccacctccgcaaagaacaagttaatagccctcccttcgaacctcgccctcgcaactctaggcctcgacacaatgacctacaataccctcacctccaccatcacggacataatccactgcgcctggtcagtaaatttcaccctgcacctctccagcttcgaaaaggacaatatcgccggcatccaacaccttgcaaacctctgtctaagagctcaacggcccgcaccagcaactctaaacttctgctcctctatcagcgccgttgtccgctcgcccgaaccctccatacctgaatccttacctttaagcctcgcacacgcccaagccatgggatacgcccagtcaaagcttgtggccgaacatctctgcgtcaaagcatatcagcaaacgggcctctgcactcgcgtgctccgcatcggacaggtcgttgccgatacagagaacggtatctggaataccaccgaggcaatcccgctcatgatccagtcagcgacgacaatcggcgccctgcctaaactagacgagtttcatcgctggcttcccgtgaatactgtagccggcgttgttgtcgatatcgccctctcagagtccgatgtagacggaccaaaggacgcgcaagccatttacaacattatctccccgtaccccttccactggacaaacgaactgcttccctgtctgcgggatgcgggcctggttttcgaagagctcgacacccgcacctggctcaagaggctgcgcgaatcaaatccggatccccaggctaatccgccgattaagctggttgatttctggacggggaaatatgatcacgacttcccaccgcgggttgtaggctgggagacggggaagacgaaggctgtctcgaggacgtttggccaggcaaagaagttgcagcgtgatattgtgcagaagatgatgagttacttttttggtgttgatgggtgggggaaggggaaggtgaagctgacttgaaatacaaggtatagagcggccacctgagagtcctttgttgatttgatttgatgtgataggcattgtatttagttatgatgagttaaattagaacagaaagaacccatctatacaacattgacattagaattatgtatcgtgtaaacaacctgaaaatatcaacg

SEQ ID NO: 11638 - DNA, 156 bp, Emericella nidulans
gcgtgtacactacgaagtgatggccgcccacattcttgtttcttcaacattaggcatgtagcggctcgtaagagcctagccaggaccgtgtggagctcgctcttcgtggactatggcccctggctactggaacttgccctggcaaccgtgcgggct

SEQ ID NO: 11639 - DNA, 221 bp, Emericella nidulans
caccgcaaggcgacgcaccacaacttcagcttagaggacgagggcgacccgggaacgaagagcggacccgccaccacagtcggcacgcagacacagcggcagcgcgagccgcaccggacccgaccagccaaagcgcaggagacgcgcagaagggcgacggaccggagaccgccagagccacccggacccaccgagaagcgcccaccagggcacaagggcga

SEQ ID NO: 11640 - DNA, 253 bp, Emericella nidulans
agggccaacgccagccacgcgaacagcaataggaggacccgagcgagcgaggggagcgcgaagagagaagcacgcggcaaccggagttaagattctcgcgaaagcaaagtgacgggccccgacaccggggtcctcaggacgccgagccgagcagagaaggatacagcccagcacgcacaggggccggcagatcacggcaccagtgacgcagggacagaagccggcagccacagcagcccatgaagcaggagga

SEQ ID NO: 11641 - DNA, 2343 bp, Emericella nidulans
gcgcttcttgccggttctcattgtcgagatcctcatcggaggcggctgatttgaaatatagcacaagcaggcggtcgaggtgggaggctgagaccatgtaggggagatggacgaagagggcagaaaagagagtgaagactgcatcatggagtctggcattgaccttgttggtttccaaactcaactcgagcaaagcgagagaccggttgagaacctctggaagggcagggatcattgcttggccaagaaccttaaccatcgaagcaaggcacagcacgccgttgatgcggatgcgatcgtcctcttggccgatgcaagaggcgctggcgacaacctgcgcggcagaagtgaccatggacggctccttcttgccgtacttctccgtgatgcggtcgatgcaagtaaccgcggcatgtttgagcagaatgtcaggggacgattgcacgatgtcaacaaggactgtcaggaagtcgagcatgcgcgtttgcgaagcaccgtcgcgctcagggctctgttgcaggcgagtggcaagcaagctgagaaccttccggcggagcgcgtcatcgggacgtttcaagagtgcctcgatagtatcgaggaagtcgattgtagtgagggtactgaatagaccactgagaacatcaccagcggcctggtggaccggcttgacgctctgcatggactctccgatggctaggacttgctcaaggatgttggagaaaagagcgcggatccgctcagagtcatcggtttccgtggtgagcgctcgagcaatcttcaccttcaaagatgaatgcttaaagagataggccagtgcgcgcaataggtccgcagcaaccttgtgaggctcgcggccatcgtcgcttccaatgccaaggagaacctgcgagatgcccggcttggacttgagggagtcgcccaccaaattgaggaatttactgtaggttgacagttcgaccgtagcgtcagcatcagagacaagcccagtcattaggactagaaccgctttgtccatagagtatcgattggcgagcattgccaggaccgcaaacaagaactcttccgttccgagcttcgtgattaaggcatggaataggcgtagacggcgatgagacgggatgtgctcaaaggcggcagtaaagcttagcaagagctctgatgttccagaaacaacatcacgcttctgatgacgcagggattggatgagagcaggaactacctggtcgatagtctggtcgataacggaaacagagtaatcgtcgtcctttcttagcacgctagaacccatgaaggtgaaaattggcatcacactgtggagaaccagctcgggcgcgatgacagacaggccagcaaccagaaggagagcggtgttctgaacctgagggctttccgttgtgcgaacacagtcaacgaccaggtcagcgcgaacaactgatgtatcgaactgaggcttgctactcgctctggaacggttgacaatggccaggagactgccaagtgtcaagctgaggaggtagctcatgccggactggatctgagacttgaaatggtgcagagcggccagagtctggaacaaccattccgtgagctctggatgggcttccgggctggagccgtccacaagttccaaaatgaaggtcatcttgtccatcaacttgctgagtttcgcctcatctttggtggtcattgcaaccatgttgttctgactcgtccttctgcgcttcggcgcaggacccagagaatcaatgtcagtgatagaagcgggaatctgctggaggtaattgagaaggacgggaccaggaagctccacgcgacgaagaagatcccgggcgttatcgacgagaggagactccgaggcttgggtcgagagctcaaagagcttctcagcagcagtaatctgtcgatcctcaggcaccttgccccatatttcactgatgcgattgaagacagaggagacaaaggacgccctcaatgatggtgaataaggtgtgacggtggaaaggagcagattgatcgaatccttttccttcggcgtaactgtcttcaacacttgggcctcgaagtcggatacagagatttgctccttttcgtggacctcagccacctcctgttcactcatgtctcgccatttcttcaataacggctctagttccttagtgcgggtcgtgccaccagccttgtcaacccggttgagcaggttcagtaggcccgccctaggcgcaaagagcggaaggtgaacggcatgtgagcaaagatatgtgaagaaggccaatcgcagaggctttttaatcgccgaagcagaatctgatgctgcccctcgcaaggcattttcaagagctcggc

SEQ ID NO: 11642 - DNA, 2166 bp, Emericella nidulans
  unsure (1)..(2166): unsure at all n locations
agatgatgaacattatacatctcggcgaccctactccagagaggcatcaggattctaactggaccgacagtgcgaatatgtccgcaagtaaccagcttgggctgcaccctctccttatctcgcgcaacaggtactgaacacctttgaccctgaagttccaagttggtccctttcgccgtcaacaatcaccatacaaggccggtggactgtgaagcataagaataccagtatccttagataccgcttcggcccagacgtcgcggattgtagaatattgaagagcccagcgacctaatccggtgtcaacggagacccgtagactttcactcggcgcagcactgcgcttgctctcctgcaccatgattgggcaatgactgtttaagctccaaagtgactgcctcgttgtgcaggtaccgaaacgtgctttaccacaatgtaggttttgttgacgcctcacgctctccccactgatagctatcttattgacaggtcttatcctctacacaactcgatatactctatatagtaatgattccagctcccagcagctgtacattggagaatagaatacctctatagctttaatctgacgcctaacgtagtatacgttgtgccggctagcagggcaccgttttggcgcccattgcaccatcggcctgccgcgcgccatagctcgccgtcgccagttatgtcattgccttgatggaatgtgcaggatgtttatggaattacatttaatgcatctactgcatccatataagccctcttcccttctttcacaaccacatacgtactctttcccatttgccctttcccccttacagctgtgcaccttcgtcgcaagcccaattatttcccagacattgttttatctagaagtttatctatttctagcatggtactggctaccggatacggcgagccgaacggaatatcagcaggacctttggcactgcttcacttttacttgtatgttcgcgctgttaccttgacatacaccctgagcaacaatccagcaagagcagcatgactgcccttgccagatttgttaggtttgttcgtggaaaaatgtagatgattgcactgttctttactacacgttcggaaaagttttttgcgcaatcaacatccaggggattttaggatccctttctcaacgaaccattgccatgcggggacgccttccacctggactgcacaccgggctccttcacttgatattaagcgagccacatcaatttttccttttgacagcacggcaatgagtggtgtcttcccataatagtcctcaacatttacgaattttgcttgaacttacttgcctgtagtaattttgctactacagttgagctgtttctctttgcagcccaatggagaggtgattggccttaattgtctgtagtatcgcacgccactctcacatccttggttaaaaactcaacctctgaactgtttccactggcggcggcgtaagaaagaggcgtccgatgtgccttatcttccttgctcggaaaggagcctgcattgactagcacttgaacacttgctgggacaaatttgttgacaatattgtgagtgcgacctctccttgcttgttattcctgggttagggcatctctgtcgaggctttcaaagctcacgccttcagaaatcaaagtgacccaaggagcagctttaaaataatctaagagaattttagtcagattcgccgagacgccagaggttctgagcgctcataagccatgccattagctagtcttgtcttgttcttgcttgaaaggtcttactggcgatttgctcatttgagatatgactagttctggtggctactatcgtgtttgtctcagcctcacctccttctattataatgggccaaatgcggctggcgccaataatctcgaatacgaccaacctttaaaagccagcaacctcagcttgggtcatcaatcccttggatatacgctggaagtgtgatacaacttgcaggattcgcgctgactcctgcgaccagcggttagcatcttctcaattaaatcgagacgatccagtagaatgtcgagggcccaatgcaaaaagacaaaaattgacagcctcagcagtatcaaatggtacaggccgcctccaccgctccacgtaaggcaatgtnttaatggactacagggccta

SEQ ID NO: 11643 - DNA, 496 bp, Emericella nidulans
gctcagtcccagtgctcatatataactgcggccctctgcacaacaacatgatgctgcattcttggtacatacctagctgattgcatctatacatgcacacagatcctacacaagaagctaactctgctgatgctataaattcttaagaactgtgactacacttgatacgaacacggccttccagaatctgaccaattggcttggatgacactgcgcgagcacggcgccctgggacatatgaccccattctatatggaagaaggtcggctaacactgctgcatactgacatttgctaatatctgaccatgccaaacacttcttgcttacctggtggccgtagggcacttgtacgccagcaacctcttctgtataatctgtatgctaagacgaccaggcttcggactcggcacaaaactagcccaccactctgattcgataatctactcagctttacatcatagctacagcattgctaacctccattcccgagtgcca

SEQ ID NO: 11644 - DNA, 2867 bp, Emericella nidulans
gactccggttccatctcgtactatcgtaggttgttaaccaaagggccatgcgcgattggcggacacgtcctttctgaatgcacgcgatctcttttgctcgagcttggccagcgatccaagcagttgtggacaaactgttttggcgagaattcccgtccaagtgcccgttaaaggattggccttagggccgctagcggccgcgatataaacaaataacacatagccaaccaaagcgccgtttggaatttttcgtctcaaagtgaccgagccgagccagtccagatgctgaacactctatgctgtgtcttataactattgatcttggcgtcagccttcattctgtcgtcctattactcgccgacactcgggtactcaaactttggcgacgcatgctcaagtgacactaccggtaaaaagccttccccgcttttcatcttgccctgatggcttgcatgtcacggtcctcggccccttttagcgaaaagggtagaagacactaggcggggtggcaccgatatattggctagggcctcgcttttgatgaatgcgggtaattgctgggatgctttcggcagcccaacatatcttaaagttgcggggcagatggttccctcataacggtgtgaacgagtgtttgatcaatatcctacgccaatatgaaaattcgccttcttgtggtagctgtctttattgtcaatgtgtgtggattagggctgtctcgtgggttctctgggcctgtatattcaacctcgacggaggaaccccaaactccgctcagacagatcccacatagataccggcgatttggttatagacgcgtggtcaacgagaagtcgtcacttacttttctctatcagaataatctgaactccaccgaccatcagaatcatgctggggcgattttgcttggtcctatgggacagcatgaacttcgcgatgcatgcgaagagttcggggagaccatgatctccctttccacagtcatggagtacaaagaggactttcaacgcttgttctcgtattatttctacactaacaaccagaccgaaacggccgaacacaaatctgggcgattctacgtccgagatggggtgctatctgttgaggatggtgagaatcaacttgatcactatcctttcccttctcgaaatattccgcttcctgtcttgtgcacacagaccagtaatgacgacaaacaaagacgagggaggaccgtgcagcagcaactgattcgagtcaactcggagaacaacatgtacgtaggataccggaaccaaaaatcatttcgtttcttagggatcccatacgcggatgctccaactcggttttcttatgcgacgcatactctgaaaagttccgcacaatcaaggctacggagtatgggtccagttgtgcccaggttgccggtggcagcgaggactgcctgtacctcaacatccaaacgccatatatcccgaagaagaactctacagctggcctacggccagttcttttctggatccacggtggtaatttcgttgctggcgctggttctgaccctgcgacggacggtggcaatttagcctcacgagaagacgtggttgtcgtgacattcaattatcgactctcgacgttgggctttttagcggtgccagggacagacatccaaggaaaccaagggatcgctgatcagatccttgctcttgaggtagttctatacaggaactggaacgtggattcaggcagtgctgatgtgtgcagtggacaataaaaaatattgctcaatttggtggcgaccctcgacgcatcaccatagctggtgaaggagcaggtgctaggtctgtaaaggctcttctaggctcacctcttgcatatggaaagtttcaaggcgccattgcgatgtcggacgtgagaaatggcgctggcattaagtacgaacatcgtgaagcgtcatatagctcatacctgagcgtctcagaatcatatcaaacagccggccagaaaatattattcgaagctggctgtaatcaggacacgactgagcagcagatatcatgcttgagggaccttcctgcgtctactcttgtcaatttgccaacgattgcacaccacatcgttcaggacgggaaatatatcaatacaacagacctaaacctcagtgagagacatgcaggcaccgctcacgtcccggttatattcggaaatgtcgccgacgaaggtgcatcattcatccctttctccaataacatcgagtctgagctcgagggtatccaagaatttttgaatatcagcaccacccaggccctcaaaatcatcgattcaaacctgttccccagtcccaacacaggtaatataaccttggattctttcgctgttgcccaacgcatagcgacagacattaaaatccggtgtataaaccaagccgccctatatgcaggtgtatccaccggcgttttcaaaccatcatactactatcaggtgcagcgaacaattggcggcaccgacccaaataacctcggcggaccaccatcatcgtctgagtatccactcggagatccagaccttttctatttccgtcttcacggttcagacctaccttttgtctttggcaatctcgatgctgctcgagatcctctagacctcttcgctgcacagctcatatcatcctatttcgctgagttcgtacgctccggacagcccaatcctgacgcaaactacctggctgcccgcggctatgaaagaacactagaagctgttcaagcctttggcccatgggagccggtgcgcaactccagcggccctatccacatgcttgacttccctagtgagaagacgccatttcaaagcttgaaacagtgcgagttcgtagggcttccgattcatctatc

SEQ ID NO: 11645 - DNA, 3008 bp, Emericella nidulans
  unsure (1)..(3008): unsure at all n locations
gggcatagctattcacctacaagggcaaacaatcaagcatgttctgtactgcggttaggctgaatctgctggtccgggcaccactgctaattcccgacaagtaccctgagtctccatccactcttgtttcggtgtgccaggggttccggagtctctaggtgaaacagaggcgtgggactggggactttttccattctcatttttgttcccactcacactgtcgccgccaatttcactgacaacactactactattgcttggactaccagcattcggagtaaaggcagtctgcagaggctctccttccaactctttctccccaaaataaacccagaaatagtcttctgtccacttagggctcgtcggatctacagccacgccgtcaacagagtaaatcgtgcttgagcatcccggtgaattgacagcagtggcgcccgtggtagaggtaacagcaggccgagtagacgatatggagcatattgaactatgcgagtatgtccttgcgtgcgcatgcgcttgttgtcgttgcaattgaacatgagtctcgatagctggagctggagctagagcaggcgacggggcttgatatatagcattctccccgggcatactcctcaacgacataaattcatccacgtactggagcaggcggatataatctgtgagtttgagctggaagaggtccgggtagtagaatagagcattttctggtataagctgtcgctggccatgcaaaattagttcgttgctgtcactgttgccgctagtaccattttcactagataccacagtagtaccgatactgatatcgctggtatcggatgaaggctgatgttgcaaaagtgtctgggtctgggtctgcgtccgcggctgacacaattccaaagccttccatgaaactgccagaataagtcgtgtgtagtattggctgcggaagaagcggaagacctctgtaaagaagacaagcataagttcgtggagctctttgtcttcaggggttggggagagctgcgtttggatgctgagtaggatctgtgggaaaagtgtatacgccacactgcaccctcaaagtaatcagtacacacaccaagtgaacagtggcttgaagatggtaatgcatacgcgcttataggcaatttatcggcgaccccattcaaaattagctgttttacgttgtgggctgttgaacaaatggccgaagcaaggtcggctcgacaggattcgatacgggataggtcggtttcgtctgttaggtaggcattatggccgattaggaggcagatacggttgcagagggcaatgcgggcggatctatatactttagttgtagtcctgagataaaatacctgggcaaacgtactggaagtatatagcacagagattcgtatgaagtgttagcgatgggtggatatagtactccttcccatctggattcgctacccagttgagctcccaatctagcaacgcaaactttgtctcttcaagtctgttcagttgtgcccgccgatccgccaggctgaacggcatgttctgcgttgtcgggtagacaagcatgatcacatctgtgactgccgccacaagatggcataggctggcaaggacgccgcagagggcgatctttatttcagaagtatagacttccgagttcaggcactcctcttctaggtctcgaagagacagcccctcctgcagctgcagatcgaattcatccggggtgatctggatcggacgacgcatgccgagcgagatgatccggtctcggatcatgcagcaccaccagaggcgcttgaggtccgatactttcctctttgaacctaattgtggcatcttatggtatagatgtgcttgctctttcttcgcgtatcggattgcgatgcgtaaccagcgggaattggtggagcgctcggcatcggtggtgtaccaggtcaggaggaggcaggcttgggcgattaccagacggtctttctcgataccgctctcatagaggcgctgtcgggtcagcttgaagctatctggtaaaactagtgacgtaccttggctcgtcggtagagatcgtcccgcgcagatatcagggaatcgtacccgcattctttggcggcttcaatcggaatgaactgcataattagatctgcccatcctcaagcattctagggtctagggcttaccggactagcagcgaagagcattgtctgaaagagcaatgtcgagatcttgcccgcactcgaatccaatccccgatactttgcccagaatacggcctcatcaactaccggtaggaacggatgcacatatataaagtagtgcttcacgaacacatccaaaatctcctggataggaactttgagcgtcatctgtgacttgaaaaaggtcaaactgacccggtctggggctggtgtagggtagccattgctgcgctccttcgcaacggccttgaacagctgcctctccttatcccgcttccctgagtgcagtatacacggtcgagcgtctagacgacaatttgtacagggaaagccggtgatggagccgtcgcagcggactttgcgggagtggcagcgggtgcaagcacgagcggcgcgtctggagcgggcgttctctttcctgggcagagacgacatgtcaatgatgttcggcgaggaaggaggggnntaaagcaaaaaaagggtgagattggagttaagtcaaattggacattgctcccgaatgtattgaacttgaccacatggatactgggtacctcgtgacagctcaccactatccaccatttttatctttgttttaaagaatcaccctcttgtgggtgaggccgaatcttgaacggcaaaagttacttatctcttcttagttgcaatttgttcctgagtctacattgttattaacggtgacaaaactgctggaactatatatggagagtatgttatggtttttaaattctctgaaatattttttaaaccttttttagattttatttatgctattcgtcttcaaacttgctgagggttcacatt

SEQ ID NO: 11646 - DNA, 192 bp, Emericella nidulans
aaaaaaaaaaaaacgacaccaccataacaagcaaggaggaagaagcaaaggaagaaacaaagggaaaaaaaaaacccacaaaccacaaaaaaaccgtttcgcatggacaaacatcagaggaacgaaaaagcgagcatccggcacaacaacacgaacggtaccgaagtaagcatacacggagaagaaacggcc

SEQ ID NO: 11647 - DNA, 2351 bp, Emericella nidulans
agatcgcccacagcaatggagatcccccgccgccgccgcaatcgctccctccgaatcaatatccaaccactgttccgccgccgatgactcacacgccagctcctaattacgaccccaattacaatttccagaataggaaccgtaagccgactcgggcgcagagggtatgattccatgttctatgagcaaagcagctggtcaggctgactctccttttaatccaggcctgcgaccagtgtcgaacaagaaaagcaaagtgtgatgaggggcgaccagcgtgcagccattgtaaagagaacaactatgtttgcgtctataaagaagtgcccccgcacaagtcagtggtcgcctactttttcttcaagtgattgtgctaacctgatggccctttaggcaggacaagtccacgcaacttttgttggaccggatacagcagttggatgatcagttaaatgttaggctcgaggctgcggagcggcttcacctcggtcacgacaagactcttgatcagatgttcaaggtcgtcgagtggattcgcgatcaagtgcctcgagtttggtcgcagtacccagtaattaaggcggacggctttgatgctccccagaaacctgaaacaaaggagctagtgactacggaagttgcgaaacctaacgagtttgaccctttcaccaaatcactcatccagactggagaggatggcgaactctccatccccgtggagcatacaacagcagcgcataaattgctcacttggccgacaatcaaggaactgcttcatggctatgacgagaattatgtgatgaggcttgaacagtctcgcggactggttcgatttgagggccggggcgagacgcagggaatggacgatggactaggctatgaggttccttcacagcaaacgagcctcagcaccagcttcgatgataatttttctcagtacactacccccacaggtgcgccctggagtacagctcctaagtataacgaggctcctcctgaagtcaggggtatcgatgagtttggcgtgatgtcgatagatgctgatactgtccgccgttatgtcaagagctacttggaacacatacacagactccatcccttcctgaatccggtcgatctagaaaggagaattgatgaattcatcgccatgcattgtccgacgagctccatgtcagcacatggacttagcgcgaggaatccgatcgatacatccaacaggggtgctaaacggaaacgatctggtgaaaccttacaggcaatgggttatgatggacggtcgcccacgtcagggaattctgacggtatcccgccgcggagagtggagaaaacaatgcgaaacgcaatcatcctgcttgtactggcgctcggccgcatctgcgaagttcgtgacgagccaattcgtgggccatgtatcgaccacgttatcgactaccgcactgaacaaatccctggagcaccacgacgcggcccgagacctggaccgagaactccagctgggacagatgcattgccccttcatcagggcagctttcattcaccatatgacgaccgcttagcacctactcctactgcaacggatgagaggttcatcactctcccagacccccctcacctgaaaaatgtggacaccgttccgggttttgtgtactacgcctatgccgctgggattctagctgcaagtcaaggggcaacatcacttccttatgcccaggctgctttattggcgggcttgtatattggccagctggcacatccttttcagagtcattcctggatcgcacaggcagcaagagcatgtcagaatcttaccctagcgtgagtctaagttatggggaacactttctggcaaatcactgatcaacggttttaggatgaactatgggagcctggaaggcgatgagaaggaccttgtctgttttgcttactggacttgtctgcagcttgaaaggtacttgcgccttctgaacgccagtataaagcttaaagctcacagtatgtagtgatattttggccgagctggatcttcctgctagcggaatttcccgctccgagtcacgtatcgacctccccctaggctcaatgctcaaattatccaacactatctcggagcccgatacgatgatgatgttcttctactccacgcaaatacacctccggaaagtactaaaccgtgtgcatacagatttatacaaagttatcagtgagtctcctcgatacatctttgaaaatcacgcgttctaagtcttttgccacagagaaaggagaaaacaagtggaacgggactacacaggaaatccttagcatgaatcttgaattatggaggagtagtctccccccagaaatgaggtgga

SEQ ID NO: 11648 - DNA, 2748 bp, Emericella nidulans
ctcgctcgcctccagtctcgtaccgtctagcttggttagcgcaacagccagtgcaatacagtgcgacgatgtctcacatgcagcattctgacgttttatcgtcaggtccaatcaatgacaacctcttgaaccgatttttgacgcttctggctattgccgcccttaggaatgtccgaccattcaaaggtagtgttctttttttaacagatcggctttgcgtcaagtacggagaatatatagacctatcagaggcatcaactatgcgtttcatctcaaaaaatacttccatcccagttcccaagatacactgcgctttcacacataagggttattcctatatcgtgatggaaaggattaaaggggacatgattggcatgggctgggttcatcgaaacgaagaatcaaaagcgaagcttcttacacagttgaaggcgatggtccaggaaatgcgagcaatcccacctccgggggggacgggggtctcttctgttgacggcggagctttatatgattgccgcttaccgagccctaccctacgcttcgggccctttccaagcgtccaagcctttcaccggcatttacgacgaggcatggagtttgacccaggacttgacttcgaagtaaaagagttgattcgacagcacgagcgtgattggcctatcgtgttcactcatggcgacctcagcagcttgaatatcctcgtccgtggcgatgatgttgttggaatcattgattgggaaattgccggttggtatccgtcttattgggaatatactacagcttgccaggtcaatccacagaatcccttttggctcaacgagatcgacaagtttatcgcccccatgccagacgaactaaagatggaaaaatcacgtcaaaaatattttggggctttctgaatatcgatacagcactaacacttcatatagtggtttccttgcgctcgagcaaagcatacgttggggttttgcccatatcaaacttaacttgcccatcaaagcgatgctagtctttcttcctttggcagtaactcatcgactcattgcggaccgcttcccagtcaacaacactcgtacccaaagccttgccatctgccttgagcctctctaaagcttctcgaacccaagccacgcagttctatcccactttgttttgcctaatcggcgttgtgctcaggatttgtgcgagactatttcagtcctccacttttccaatcataactcgaacaagcaacatgctggtcggagttagttggcatttgctcccgccaaaataccattcactaccccctcccgctttcgggagttccttcgcgtggtaacgcatacctattttgcctggtgtctcaatctttgggccaacgattagagcccagtggtaactaggcacaacaattagacatattcgcatgggccaaactccggcgcttgaactcacgtgtcttccttcccaggcatggttggggttccgccacgtgcgtaaagggcaacatatagccggtctttattgggcggcattttgcgtacgctggaatgaaggaaaagggactcgctttgtgttgtagccctcacgcttcacaaagagaattttcaagtgacctgaatccgacgagcactttatattacaatcaatattttatgtccttggcctcctccactgaggcgctctgagtaaccgccctgcttaatatggtgaggtgataagaagcgcctgataaaactccgtctcaacaattagcgtaccatgtggccaatatctattgatataagactacaaagtcaattgtggagtggtccgttcagatctctcatccaatctttagtgctatattaatgatgctatgccaggcgtttatccatacatattggatcagtcaataccataaaagacatataacgcatggaatagattgccacctgaaatttcaaaggtttcaagcctccactatgcctaaaaatataggagtggcgtaatccccagtcagcccgccaacgcaggaattgttgcgctgcattgaattcattggctgacagcgttcgtccttctgacatgcatgttgtggagcgcttcaggcaatgcctggcatgcctagctgcaatccgctaacagaatggctatgagttttgcatttagagactagtgtgtcagacctcgcgagtcaagaccattgaagggctaggtgttgtgagcaatactaattacggcgcccacgccgttattcagaaatgttattcgaaccctttctctgccatctatattacagctcaaaggtcgcattgaataattagaaaaggtcatttcattctttgtagagcgtagtcctgattcctgggacattcagggtgaaacagcgtcactggcacccttcaggaagtatatgctctccatcacgatgagtggctctgctaccactttgtgaagccagtcatcagtaagccgaagacattcagccccgacatcttaccatgaatttggtgaattgggaccggcgtttcaagctctcttccattccatgctgctggaagccattagcacccaacgagaacactgtcaccttgtaatctcgacgatacgccaatagtcaaggctcctgcctattcgcgctcacccccggccaaaatctgtctccagaaacccgtagccttgatcttaataactacatgcccgctacccgtaacaagcagtcactttcaggcattgagccagaggtcgatgaaatccagggcttcgggacctgctgacaatcca

SEQ ID NO: 11649 - DNA, 347 bp, Emericella nidulans
  unsure (1)..(347): unsure at all n locations
aagaaaaaacaggagcagcaagccgggatgcagcagaacaagacgcgacagcccgaccgaggaaaaacggcccaaggcagcacaacacagcaagaatcccaacaaaaacacggccgccaggaaagcacgcccgcancacaacagggcagaaaacaagccagcgagaccggagacgggcccaggccagccagggaacgcaggcgacgaaccggcaccacgaaanaaggacccgcaacgccgggcgnacgncaaggccgcacaccccgggacaacagcancgaacanagaaaacggcgggacgccgagcacaaccacgggacagaccaaacaaaaaacagaaggcacag

SEQ ID NO: 11650 - DNA, 1271 bp, Emericella nidulans
tcaaacactgggaccacatgtgccagactcatctgtagcggtctcatgtgataatccgactagagctcaaaactgcggcgtaaatcgaggatcatgcatacgaaactgtcgcccccaaccgcaagctgtccacaagctgcctgtctggcgggatacagaaacaagatgatggtgctccctggcttcaatgcctcgacttcgttaaggggccgtttagttgaggcccgcggactttcaagacaatgttgctctcagaccagacggtggcttgatcgaccagtgtcgctccagctttctcatacgcttggtccagcagctgagcaccatccccagctccacgttcgaccaagacacgcacaaagcccttcttgagcagcaaggcaacattctgcggcgtaagagcaacacggcgttcattggggtatatctcgcgaggcactcccacagtcaaagacgaatatggaactacgggaacttgagacggtgcggaggcactggttgcgtatgttcggaccgactgcgagcggtatttccagacgtattcacgggaccggcgctgagaacagagaccgtgagtgccgacaactattaacactagtgtcagtcgatttcctgaggtttcctaggctgggatgaggaggtcaactcacacgactgcgtccacaagcgtccacaagaggatctgcctgggatggcactgagcgccgctcgacacgggctcagcgctgacggcaaggaaaagggcgcactcatggtgcacgaaagcttcagactgaagataaacagtcaccagcagctagaaaagactcatttcaaaggcgagagtgaagaaggtacgtcgacggggagtccgtctggtattccaaaagccacgacggccgtcaaaagcggggattgtgccgagaaggtataagagctcggcgagtggaggactgggggaaggctgtgtggactctgtggaggtatgagcgggggacggagtagcggggagatcgacgggccgcacgaccacaggagttcaataacgaacagcgcattcttccacgagtagccggctgagacgggcagtcgtcggcaaatcggacggagaccgcaccgcattcgagcctggatgaaacggtgtccaagagcgagcagaaagagactcaccaggggacaagtgaacctgagatgttccttgaggtcctcgagatgttgtgagcatgagtagtggtctagctgccagaacagctgggagaattgcatgtcaagagcattgtatgggagagatg

SEQ ID NO: 11651 - DNA, 1196 bp, Emericella nidulans
acttcacttacccagtcacagcaactgagtagccccccgcccgatcaggtgattcagaacacaagcatacgtagcatttctccgatcggtagtggcacgatatcacggttgtgttatcaattctctccgttttctagaaaacggcccagcagacaggctagtagtacagcaccgccataatcatgccacttgcatgttgactccaccaagaacgcttgtaagctctggaccctgtggctccggttcgcgtctccgacattcttggtgcctttgtgcctgaggttttatatttaggtcatgttttgataggtcacatgacttaatcttaccgcccgcttcgcattctctcgagtgcctgtcgaatgagacggtctcttagtggccgattccaggtggttaagtcgctcagctgcccccaaccgatttcgtgcttctcatcgactcacggcttccctcacgagtgcgcaactcgggccctgtgcgtaatgcccctcaaagttttcacagtgggtcgaggccttgcgtcttgaatcgtgatcctcgagacgagcccactcgagaccgcacctcgatttgcactgtttcctgactctggcgagatactgaaccgagtccagtctatgatatgcgatggagaatgctcatcgactatttttttcgagtcttcggtgatacactgcgcactctagtcccgttgaacggtcatattgtagtcgccaagcctgtcgagttgggggccattgtgtccctgctaagctcccggccgcgacccacggacgcaaagtccagccattggcatgttcctggtggattgcgtgcagcgaattctgcggaccagacatttccgatcaaccatctttgtccaccagcgtcggatccaggttcatctcgacttctggattctcgtggcggttctactgacagcgcaaaactctgcggcatgctttgacagtcatcactgaacaacgttatctttgtttattcggctcgtgactgggcttcggcggggtaggcgacggtatcgggcccattatcagaccacgaagaactttttctcgtctccctgaggctcccactgtccacaaaccgtgcagtctgtacagttttgcctacttttgcctacgttaatcatgtcgccaagtcaccagcatgagcagcttattgagcaaaaccccgtcggggaggaaacccgcagt

SEQ ID NO: 11652 - DNA, 394 bp, Emericella nidulans
  unsure (1)..(394): unsure at all n locations
aaagaaggacaaaaggcagggaagggcgtagaaaggaagcacggaaagcagaaccctaaccagaagacggacacccacacgccagagcagccgagattcggtctaacacgaacgncacacgaaccggccctacgcagcagcaaagcgacacagcagtacacacggagagcagcaagcgccccacgcaacgaagagaagagcgactgcacttcagtcaaagactagggcatgacgaagataagcataaataaggaacggaccacacacaggcctccgagaaaaggggaaccgagctcagccccaccaacggtgagaatatacgaaaacaaccggcaaaatacaggagcggagatgccggggaagcatagagccgcaacgaagcaaccaatcaaag

SEQ ID NO: 11653 - DNA, 642 bp, Emericella nidulans
agagcttggagcttcgatccctagtgactctaggtagcgagctattattcatgccaggatatactggcttttatacggacacaaactcggactgcacaccaatgacctacttatgccgctgtactatcatactgatctagggggatcagcccatcgataatgccgtaggtgtacagtcctatgaccttggcatgatggggacccgccttgtgtctgattcttgcccgcatgcctatgcatgtattgtgatcccccaaaaacagcatgctaagcgccatgagctactgtcttttcctttgatatcactgctaggatgccctacctgtcttcttatgcatgcgtattcgcacgtaccgtaacccttatgatgctggcctacccatacagcccatacccgacccgaccatatgaacctacgactatcatataaccccagtggccgccaacctactgcaactccgtcctgaaccctaccgccattcatacattcgaccagctagacaagtccagaccggtgcatgatctaatggatcttggccctgcactcccgatgatggagccactgacgcagactttgcttccgggttttaatcttgcaccacgcgtcgatcaaattcttcctcaatttacgcacattacggc

SEQ ID NO: 11654 - DNA, 713 bp, Emericella nidulans
aagaaaaaaaagcttctgagcctcagtgacccattgatccacgtggcactcttattgaaatgtcccctctgcggacaaggcaatatgactaccttgctccatatctgactgacaatctacctatacagacaccgactcatacaactgcttaatctcacagcactttggggatggtactcactgcaagttatcaatcaagcgagcgcccgagagctcaatatgctgaacataaccactgatgttggcagatctatcatcacactgcatgcgattcagtaactgactatcaggtctctaatcacggcactcgcgcgagactagatcctgccacagctcctgggcaccattgtaatggatagcaccccagcgggaaccttgcatactgcaacactgtgaccttgactgactgacctgcatataccaagatatacggacgacacactcccaaaccctggctgatagaagatacatgccctcacatcgataacttgatgactaagactcgagcattttacattacactgccaattctttgataccctgacactcggcctcactgaatatatactggacggacacggcctcaaactgaacaatcgtcgagctgctaaatgaacctatgtgccattggatggtactcagcggtcactccgagcatgatgctatcattgatactgaaagactgggcacattctgcggacaggctcataact

SEQ ID NO: 11655 - DNA, 367 bp, Emericella nidulans
actcagtgtcaggagttcctgtagatgcactacaaagcgcatgtaaggggcttatataaaggctgtagcaggccataagcgtcagatgcccaattgatataatggctatatgtgaccatcagtagactccagcacatggatcttgattatctacagattagatcctgactaccactccggttgaggagcgcctccaaccctgcaataactgactatacgctgcccaagcagccatgcttggcatgctagctgtccccgagcctaatgtcctgcaatgcggcatgcaggatggcatatcttacccgctgggtatgaccaaggctgtacagcccttctcgggcgtatggatgtttcttatgcacccatg

SEQ ID NO: 11656 - DNA, 1246 bp, Emericella nidulans
tcggacctagaagcgtcgttgcactagtcccgataagcttgaggaatgcaagtgggagctcgaggctgatacagagaggtttatcaagacgatagaggtttgtttatagcctttacctatagtgggccttgccattgatctgcctttaggaaatcatttatccttatgcatggggtgagtacaacgttttgatccttccacccagcttcccgtatggcggcatggagaacccggtctttactttcgcaacgcctagcataatctcaaaggtgcgctctacaaaagcagtacacaaatgcaatacatgacgtgtactttagctcaaaggctacatataattaacataatccttaggaccgagagaatgtcgatgttattgcgcatgagttggcgcatagttggagcggcaatcttgtcactagtgcctcgtgggaacatttctggcttaatgaaggttggacagtgtatctcgagagacgggtaagcagcagaacacttccccttatgcaatacatgagcactgttgaccattgcatagattttagcttcgctgtaagtgttgtaggtcttatatttgtcagttggcacttttattgacccatgttttcccacagacacggcgagaaataccgtcacttttcggccattataggctggaaagctctaagggattctgtagagcactacagccatgaccatgagttcacaaaattagtaccaaacctcaaaggcgaggaccctgatgacgccttttctaccataccatacgagaaaggattcaacttcctgttccatctggaaaaccttgtcgggaaggaaaaattcgaccgcttcatcccccatgtgagttatcatcatgctcattattcgtaatgctgtatcttgacctctcatagtactttactacatttaaagggaagtcgttggactcttacgacttcaaagctactcttttagatttcttcaaatctgatgctgaagcctcccgactgttgcaggagctggattgggattcctggttctacaagcctggcctgcctcctaaaccagaatttgacacctcgctggctgatgttgtgtatgagctggcgggcaagtggagatcccttcccgaatctccatttcagcctcagccgagcgacattcagggtttgacggcaaatcaaatagtggtctttcaggaacagatcctgctttttgagcggccacataccgccgaactctctgactgatcttcaataacggg

SEQ ID NO: 11657 - DNA, 432 bp, Emericella nidulans
gtgatctcgtcgtctcatgacatccttgcgatagcaggcatcgactactcagacagctgctttgccatctctatcatgaccctcacgatcgcatagccaaagaggcccttgcattccttgaaaggctttatcgctgctgggacaaggccgtacaacaatcctaccctttgatccgacccacatgggagagtacagctacccatatcgggtgatggccacctacatctgtatggctccaataccactcgacctagccctaccgtgcatacttaatgttgaggcttatggtcctggccgagacccactggcccgtctgggtctaccttccctgctagtaccctagggctggattgtatacctcttaccgatatcccgtgactgtcttgtctaactcgatattgaacagaccaagggtgaaaatactacgactac

SEQ ID NO: 11658 - DNA, 509 bp, Emericella nidulans
ctagtggatccccagggctgaagggggggggaaagccacgatgcgtctaaaagccatcgggactgtctttggacactacaacaatacttgcctcatgaagcaataaacctgtgtgctgacagtactcagtgcgtcaagggcgggcactagccacattttaccgggaacgtacatactcgacgccggctaatcaattgctgccgagatgctgatataaatgggtatcagtacagctcgcgcataccgctggaactcttttaccacaaaaatctggcttgtctgtgacgcacggatcacgagattcttcggtcaaacatggtcagcgccgcgacgatggggtgatcggcggaagacttggattcgcattcattcccatatcacgatcatttgctctggcaccctgccaaaaaaaattcggagcgcacaagctgcttggtggcaacccgaagccctagatttaagagccatttgccggcctgcggggaattaatctggccatctgatccccc

SEQ ID NO: 11659 - DNA, 2722 bp, Emericella nidulans
ttctacataaaacaaaaaaggacatcatgatgcataagtatcgtattgtgtcatgtaactccgtagtcctcagaatgctattaatactccttcagcctgtggatgtgtccatctggtcaacctgcccctgctgcgctgctcgtcgctctgcaatcttttgccgtttgaactcctcaatcttggccttaagatcggtatctatggacttattagcttattaatcctcaaagataaagggggcagaaatccataccaggtgcgacgtcttccatcttcaatgggactcggttaaacggatcgtgcggatcgctcagcaagtgagcacggagagttgagcgatcaatcgagatcttggatgcagggagaataacaggatcctccatcaacgtgtacataagggggtccaagaactcgtctgggatttctccaagatcctcctcagcttgatcatcagattctttagcttccttgaccttcagttgaagctgatcccaacgtttcagctcctctggagatttgagattccatttgcgcaggatctcggcagccttttcaaaattggcaggtttgtacgagcgaccatcacgggcgacggcaacaatgaagttctgtttgcccattaagttcagatagacatccacaatctcactcagcaacgcacgtggtctaaacccgtattcgtgcaaattctcgactcgcagattcgaactctttgggccaaccatagcatccaggttataatcaagcatatccgctaatctttgaacgatttcgggcatggtgaacgagtctgctagggcttctgtaaagagcttaagcatggccacggtctcgttggtcaactgcatgtacgacttggcgctacgttgggcctgcgcaacacgctcttccttctcctggcggacggcaggatccatgctagctccctcattgcgcaactccagctgagtgttgtagatggtcttgaaactgccaaacgactcgtcgagaacataggtgacatcgttgagaagcaagttgacgaactgaacaaagaaatccaggtggtgcttggcctggttgaggagcttcgctcggtagagcgtgttgggccatacacacttgataatctggaagatctcgtaccgaatgttaaatttgtcatagaactgagtatgggcacccgtgtgctcggcttgaatgtaaaagttcatgcaagcgtgcagcagatactcattagcaaagggcatcgagttcaataggtcgaccaggacacctgttgcgccaccagggcgaggccatgtccctcggtacaggatcgaaacgaggcctgctttaagatagggattcttgatatactctgagcactccaaaaaggcaatgcacatcataacgagctcgtcaccttgggttgccgtaatgatctgcggcatacaccacatgatgaacttgaagttgctgacaatatcatccacaaagtactcagggagacacttgaacacttcaggcggttgttctggaagaggcagaacaagctgttctttgggaaagtttttgcccgaagccaccctgagcagccagacaacaacataacgcatgaaagtcatagaccggaactgccattgatcgtcgaacaatacgccttggagactgtacttcagggccagccccatgtccagtttatctttgaacctcttcagttgtatctcgaacaacctaagctgagccgggtagttcgaccatttaggtcgctcagcctcaagtttaacaagagtagtttccatgtgcttcaggtctctctcaagcgtatccagtttagaggtcagcgattcactaccataatgatgggccgcagccgtcagaaagaaaatttcggtgataaagttggatgtgccttcagacttctttgcataaaaggcatcagaagcgtgctggtcagcattgattttggtctcgtctctcatgtcaacacgagggttccgatgcagatactcaatatcgatcctgtcgatctataaactgttaatatgaaaactcggtcacatgcgttggacttactttagtgaagttcgcatccataaacggttgacagagatgatcaagacaagtggtaagattgaacatgaacccgtcagaagaaacagtagccggatctacctgcatcgcccttcgcttgtggttgatgttcagagccgccgcaaaccagtccaaaatcctatttctcgcttctgctgaagctcgaaccatatgattgatgatatctaggatatcagagctgagcaattcttggaccatgcgaatcgaccgctgagcatttaggatgtagccttggtctctcgacttcggggcggagaagaaagacatcgtagcgtcaccctgcaaggtcgaaaggcgaaaccatggtccgaggagggtctctttttcgaatgaagcgggatcccgtgtgtggttgaagatggacgactctgtgatagcagaggcaatggcggaatggcgaacgaggtttcgcagagcctgcgcatgttgagaaaaggactggaggtgagggtagattaacatacagtcacgtatggcttgtaatcatcattgatccccatcgaggagagttcccgactcagttcctcaacagccgcaataaaagcaggcttaatggtctcatcctcctcgaacctcttgacagcctcgcttaagaactcgagatccacgcccttgtcatcttccgggtctaggaggagatatggct

SEQ ID NO: 11660 - DNA, 470 bp, Emericella nidulans
gaagtcgcgcatgtgctctagactctaactcgggtctgattgagcggcaagggcgtgctgactcctccagtatcgggtacacagaaactctttccctttggacatgttctgggccgattacccccttcggcttttttgcaaacacgggggagccgggttcggctcaaggtatccattccgaggcctttggacttcgtgtaagccccgcggatgaccgacctttagtccagctggccattcacgaaccaggtccttgattgtgggcccatatgttggctttttatcctgacgcgttcaaagctggggtgttccaccagccctatgacctttgaccatgcccaactcttttcctaggcacaggactcggaacctatcccataccggctttatctgccctaacacatggggcaagacagccaataacctttcgccttggcactagaacttgacgccggactttcaatggcttg

SEQ ID NO: 11661 - DNA, 1136 bp, Emericella nidulans
aaaaagactatcttacatcactagtagagtgtgctgcggctgagaccgaagactctggatatcagtctgaacgatgttgacatagggtagtgcttggagagcccagactctgcttcatgattcggattcacatagaatagcaagaatagaaacaaacgacagtagggatatgctgtaacagctataaaaaaaatccagataaccgcccgaaccgacccattgctcgtaaacgcgtcatacccagcaacgaaagacaaatgcccagaagccctccctatgaccggacacaaaagaaacaaaatggctcaacaatcagttttggtgcgtgtcgtgacatcgtagaaaacccacattaaaccgccgacatctttctaagagctgtgcatcgtccgggtattcatccatagagatatgcgaagtctatgcccaatctgccgcccttgaaaaaagactataggggaatcacgcggaatggcatagagaaagaaagagcaaaaagataggggggcataagcaaccggcaagaaaagagtcgcaaaagcagaagaccggggtgtatgcaaattaaggtattacatccggcggcggagcagccgccgcccaggtcgtgactgggtagttggcgtgagtcgcaggcactggtgcactgagatagtactgaggtcgatcggctccaggatagaattgtgccgagatttggtgcgaatcgcgccggggtatgcttgcatcaaagctcattccacgatgctccaggggtgaatgagccgatccatccagctggcttgccagactgaagctgcttccccgcgaatatgctggtgtcgatgggtccatcggggaagtcgcatcggttgcaacacttcgcgaagagatcgaggagtttcgataagcggcctgactctgatctgactgggacgtgcccgctcgtttatcgggttcgtcagaggtggaataccggcctgcaatgacgaagaaagcgcattgtgaccaagcggatcgaagccggtggcgatacggccctgggcccggaattgagtataatcttcttgtttctggggctgcgggatatgcgttggcgcggtgggcgtgggaaggtaggcctgctgggtaggactcggcccgccgagcgtgaacgt

SEQ ID NO: 11662 - DNA, 2137 bp, Emericella nidulans
gaagagaaagttaatggaataagtgaaaattaatagatttgaaagagagaattgtaggtgaaagattaatataaaaggagagtaagagagagtgatatgtatgggatagagaagtgttagaaagatatgtgcgaggtgatagaaatagagatgaggagtgatatttgataggtataagtgtggtaggatatagggaagaagtgaaataataatgtgtttagggggttaggtatataagaggtatatgagaataaatgaggttacgaggagagatacatgataatataaatatgtaagcaaagagagggtgaaatgtgagagatgatgtagagaaagggtatggaagagtagatgaatagtgagagaagagagataagagtgtaaaagttaaggattgtatagtagtggacggagatagagaatgtttatagaaaggggagagaaatgaagaattgaattggatagatgtagtgattaggatgaaagtaaagatgagagatagaagggatatataggatagtgtatgaagcagaagtaggacatgagaggtagagaattgttatatgtaggagaagaggcgagcatatgcaataataccagataaagagtgtaatagaaatgagtgaagaagtaaaaggtaaaataagtggagaggaagaggatgagaaaatggggggtagtagcgggaaaggatgaagtagggagaagtaagttagtcgaaataagtagggtggaagaggtacgtaatgtgtattgagcaagattgtggacgaataaatggaataggaggaatagggtagaaggagggaagtacatagagagaaaaagaatatatgagttaaggaatggaaagcgtagcatatgaatagtgggacagatcagagtggttatcacgatagcagtagcctgcagacaaagcctctgattgcgagaagggatcgaagtttaatctccagaacaggccagaattttcatggtaaattgaaggcgtgctcaaatcagcgtcagcgggttgggttgcattcaccaggaacttctcgtcaggatgtcgcaagctggtgctagcgaacccaaatgcgaatgatgttgagctagtaaaagttgattatattcgagggaaattggtcattagatttgatgaataagtcattctatgttttgaacatagtgagctatggccaggtcagggttattgtctctgaccgcatggtatcccccgcatgttcaatcgaattcattgaagagaagacttccaagtcaagcaatccttcacatatgggagatgcaacgctggcaggggtctgccagctgactagcatgggcaggccgtgcacaaggctgtatggaatagaccgtttgtgcgaactactatggcttgaatgacaccagttataccgttcaggccggtgaattgtttctctagcagcgagcgtagcctgccgcagcgtttgaaaggtatatactcttcaggctgacttatgtcagtacgattatagacgatggccctgccccatcatcgtcttaggacaaggcgtatggtatacggtgatggtgttgcaaacgtctcctaacaaaagtacctgcatgcacttcgagatattattcctgttctgctactcgagtcctagatctgatatgcttttctttgaatttgatctaagtactgtctatgctaatagtaaaagggcctttatgctcacaatcagccatgagcaaacctatatcgacctttgttctgaactagattactagactggcactgaagatgaccaaagaatattctctgcagagcttacatcttggtctctcttttctcttatttttttcccctaaagatggataggcctagcattgagtcttcaaagtttatgtgaaacggtttcatagtgtattacagttgcctgcggatgccccttcctgcaccggcgctttaaattgcaagttatagtctgttggatatctcagtcatgccgtcacacttggggcacaggacaatagaatagtacaccatgactagcaaccgctttcttttattcctgtgccgggggaaggttgttttaccttggaggggctgaccagtttgccagctccttttttcccgccccggtcccttcttttaatttccaaatttttggtc

SEQ ID NO: 11663 - DNA, 436 bp, Emericella nidulans
tcttaatgattggccggggccctgagtaagcgatcaacgcatcgtgtgccgctgtatcgggtgcgcgccattccgctgtccgattctcgtaggccgttctgcgagctaggatgattcgatgcgccgaggcgccagctctgttggacgcgaataatggactcacactgccacataccgagacgtatgcatgcactgtgcagactgtacgagatcgctcgacacatcgcaagtatcggattaggatacccaccttgtgtacgatcgccgactagacaagcttatgcagcataactacgggctacttgatccttatgcggaacctatggatgctgcgccaaaacgtaggcatctgctggaacagtgccaccatcatgacgaggggctagaacatacaacgcgagttcatgcaggagtctccgcgcacgaatgttctcta

SEQ ID NO: 11664 - DNA, 218 bp, Emericella nidulans
caagcagaggagcaagaagagctagtacgggagaagagacaaaggcgacgaaagcgtcatgcgagaggtcaaggacagccagaagcaggggctgcactgagggcggagccaagacagggaggaccaggggaaagcgaaaagacagagcgacgaggaacacgacgacgggaaggcgcagcacggacaggcacgcgcaccggacagcacggacagagaga

SEQ ID NO: 11665 - DNA, 2375 bp, Emericella nidulans
acagactgaaagggcgaccaccggggttagttcggagttatcccaacttatcgcttttgaggattaggagacttgctaggctgagcgacggtggtggtgatgccgattccctctctcctgcttgtttgatcttcttgatcttcccgtttactaactgccggtgctttggctgctctgggttgggctctgcgggtgagacgtcgattcatccttcaggacgtgcatggtcaaggcccaaggttcataattcagggttcaaggtccggcatccggggtctaggatccggggatggggttggggttggtcgtgcatgtttgccttgggtttgcttgaaggattcatgtagagttcgagccatgtgaattatgtttttgagcatatactgcaagtagatttcttgctgcattccttcgaactcatctaggtgtagatgacaatgagcgaggatgagcctggcatgggcagtatgtggattgaagatggaaggtgtagcgtggtgggctgtcgtcgaggcccgcgttggggttcggcgccttgtcaggctactagtggcctaccccatgtacttcatatgcaggttcagtcataacccgcaatgccaaacccccacgttcagtgcagttcctgaccgcattttcgaacaatcgaagaagaaagggttttttggccggttggacactctcacgcgcactgcgtagaggtaaattccccagttatgacggatttatccagtcccgtggctgtttctttcgtagtggttggatgcaagacgctcaggcatttcagttcaaatgcaaacacaaataaagcacgggtgtcactcgagattgggtcttccaatcgatgaattgggtgaaatagttgtccgagctcctgtgatgtccgcgtattgatgtccaatcctggactgcagctttgcagtccttagcagctaaacgccaatcaatgcggagtccggggtcggttgaggcctggtcgagttagttccaggcccgatcaggattcgtcaacgtaaggaacagccgcgccaggcgacagtgcgggataggctggtttgcctgcatttggcggccgggcaggctagcacagaagcaaggttgggtttgagatactacatgtagttcacaggtagaaggcggataatgcccgatgtaatcgccatcacgcgactccagacttctgcaatcgccgtgatgctgactgcgtttcgggatacaatgacgctcgtcttgaccgctgtcaggtttccttcaatgttgcattgctgctctgcagctggttgcaggtagattgtgagctgttttgaattgcaggaagtctgtcgaaatgtgactcagggaacacttcgcgggccgtctttccggtcgattcagcaatcaagtattagatcttcctcatctgatgcaggtagtcaggtgtctcctggtcgtgatctgtttgttctcttcatccgcaggagcggaatagcaactctgccacccgtttcagaggataaagacctcacattaccggtttcaaagcccaattcgactgtcgagcctataacacatcattcagaaagccactcaaagccactcagtagcgcgggtcaaggcgttatagaatcaagcctgacaactgttcaatcctccatggccagaacaggagttcgaacataccgcttatccttggacgttggttccatcgagtcgctccattacgataccgtcatgccgcagggagcatagcgtggcaggccgtcttaaagaacaaggcatggagagcacggaggtccctttaagagcataactcgccaatttccctggtattgttgttagagatagggaatgtaccactctaacatagcggttactgatgcaatatgggcaattaaagaacctagccatttgattgtcatcttccttaaactggcctcatgctcaaataattcaggttcttggcttagttggtttccatggacacatagcgttaccttcacggctgtattgtttcgtttccagaggatactccatcatctgcacgtaaacccgtccatagcaaagcgaaggcaaaggaatgtaagaagtaacctgatgggtcaaagccatgtccctcataaccgctcctgccgctgttgatgtgaataagcagtatgactcaaatgaggactgaggctgagtctaagaccagattctagacaaacgagcaaacaatcttactcacttattggttgcacgatggtaaagccacacgactgggctgtaggagcaaatgatccaaagtaaaagaaaaaaagccggctcaggacattccaagcccatctttagtttgcactgcgtctcgatctggcgttgagaatatccatctcttcatttctgtctacgacatcagaaat

SEQ ID NO: 11666 - DNA, 1324 bp, Emericella nidulans
atggcacccatataccgggtccggattcgatccttgcgtccctcttcatttagggatgtgtatgggtactccagggtctgaaactggttagttaaaggccacgatcagaacaaaatttaggtgacatacctcttcagggagggtactggcgtcgaacgatgaattggttcgtgcgatcgcccagtcaatggatcgctggaacgggagaaggtatacttgctggtcattgttggagttccctacatcaatacctttacccagcactgaatccgtccttatggtgtagttccacgcctctgccgggccttctgttggagacgagtaaaaaacagccgccgctatgcatctggacataccacgaagcgatgttcgacacagctcccgcatctcagactcatcggaaagaacgtggacttcatattggctagttctcgccggctccgcgacctcgttgatcacttgctcgattgaaccaccaacaaagccgttatcaacaaaaatcaacctatttctcccggcgccaacggattccaacgcattagaaaacgactggacacgggtcggttcgccgattccgtatgtcgctggttcaataaaaagattgcgcgcatacgatctgcattgacgtcagacatgcatctcaagctatgccatggagcgggtttggaagtacagacatgaatgccacaaagagcacaggcaggatcaatgctcgaaaaacggtcgagagtagagggcgaacaaggacaaccagtaggtttttgactgtcagagtccacgtctgtcggaaaaagagggtcatctcctcagcaaacttggggcttcagggactcgagactagaaacgtggtggttccctgcggctgtcaaacgccacgcgagagcagccagagacagggaaaggaatgttactttaaatgaccatagtcactaggctaacgcgtttctgccgagcgagaagaaccgtcgccaatgccttgtcctcggactggttgcgtcaaaagaacacccctgtctttactgtcctaagtcaggattattcactatttggatgcgtatcgggctagaatccgccgcccaaaggatggcgtttagcggggttttcatttcagatcggccaataagttcaatggacatcagttgaatctttctcacaactgtagcggccaagcattggcacggtcattgtggataggcgccgagcatcggttagctgggaacccgttctctgttagcgatcgatcagtgcgagacgtcactgagaaatgagatctgaccagcaaacatattgaatcagaccgccccgatacttcagtgcgagacgt

SEQ ID NO: 11667 - DNA, 1363 bp, Emericella nidulans
aatatcctagtcagcagcaactttgagcgcctcctctggtttctcgcccttcgaacaaacacctcctctgactccattgaggagcgccgcaagcaagcctctgaaaacgtcagccaatggctctcacagctcaaaacggaaggcggcttcaccgtcccgcccgccgtcattgaggccgccaaaaccgaatttgaaagcgagcgcgttagcaacgacgagacgatcgcccaaatccgttcaacatacaactcctccttcccgtctaacctcactcccggtagtgctacctcttccaagactggcggctacattcttgacccccactccgccgtgggtgttgcggcttcactgcgctccatccagcgcaaccccggcacgaaacacatttctctttccacagctcatcctgccaagtttgctagcgctgtagatctcgctcttcgcgccgaggacggctatgacttcaccgaggtcctgcctcaggagttcattggtctcgagcagcgtgagagcagagttacgcccgttcgtgctggtgctgggtgggaaggtgtccgtgagattgtcaaggctgaagttgagcaggagcttgagggaaagcggtagaggacatgcattagaacatatattcccagtatcattagacatataccttcagaatttcggcgagcaaaaagttacatctgcttgatacggttctcttcgttattctcttcacttagcgtattcatggaactcaaacaatagagcaatagaaactgctgactttcttttctccataagtccatgacttgtctgactacagagtatatcaaattacgcgatgtatagttacgatttcttcgaattacagacattaagtggattcgactctcaagctctacttcctcagatgtcgaactgaaagctcagatgagaagggagattaatgcaagtgcaagcttcatattaaactctagagtactattattattactattttaaaagagcataggacctcatctgccctcacctagaactagaacgcctgcaatatggatccgaacaggcaccaactaggccggcaagcatcctcatgaagaaacgaaccaggacaggaaatggaacagagacatcacaagatacaaaatccgaaactccatattaactctttttggggaaaaaaaatagacaaaataatggcatgtgtcatagccccggcaacagagtaaatgtcattcgactctgttgctgttgtggttgtctagaggagagccatgattgtcataaggccaataaggaggccagcggcggggcggacgttatcggcggacggtgaaatctgggcgtgcgggggagacaccagttgggggagcttcaggag

SEQ ID NO: 11668 - DNA, 220 bp, Emericella nidulans
gaagggcgccacagaagaacacgaagccgacgccccacgcagaagacagaggccacgccgaaggggcagaaaagcgccagcagacaagcctttcaaagcgggggacagaacaaacaacaggcaacacaaaagcaggaccacccgaaaacgcggagccagcgacgaccgacgcagacgcaggaaagcgaaggagcgaccgcaaagcacaagcgcaaacaga

SEQ ID NO: 11669 - DNA, 2515 bp, Emericella nidulans
atataatccctgtcaataaaataattctatctatatagaaatgtctgaccataaggacctgtccaggtacctcttttaaatggcattcatctactccccgccactcgtctgcctttcacaaacacatgtgctacgttccgatcgtcgccggtcatgatgtacttctcaaacagcctcctgagcgaatccccctcctctcttggagtcatggccgacttcaagccagtcgtcgtagtcacccagacggcgtcaaactccttgccaacctggaagttgccaatccggtcatccaaacagaggactcttgcaccacccaacgtggctagatagaacgcctcttcgaatgccagtgccttgtccataccttctgacacctcgcgcgcattcgaggcgatcatcgcttgcctaataacggccagcatctgcgatgcccaaccgccgccgctgtctgttcctaggccgaccttgatcccacgacgcaggaagtctcgcacgggcgctaccatgaagcctccgcctacagtcatgttggcgatcggacagtgtgccacgccgcactgtaacgaagagatcctctctttttcgtaatcggtcataattgtgcagtgcgcaaggatcgacctcgaggtcaacagcccatagctttcgtacagatcggattcgcgaccattgaactgagggaaaagctcagtcgtggcatcaatctcctgctgagcctcattgaaatgagtctggaccgccagagtactatcgcgcttcactatgtcgccaagaccctggagaagctccggcgagcaggaaatagcaaacctcggcgtaaccactggcttgaccagagcaccgtcagcatcggcgcatccgggcagaccccttatgtgctggatgcagtcttccgtttcccgtagcgattccgacgcgcttttttcgcatatatagtctggcgcgttccggtccatgttgcatttaccgacaaatgcacgctggcctttcttatgacagatatcagctagaatcttggtcccctcggcatgccgagaactgtaatatgaagcagtcgtgatgccctggcggaggaagtcgtcgacagtgtgttcatacatcatcgcagcgtaggcggggtcggcaaaacgcgcctcgacgggaaaggtgatttcattgagccagtccaggatgtggaggccctggccgagaccacgcattggccattgaggagcatggttgtgcgtatcgacgaagccgggaatgacgaagtctcccggtggcaggcggtaaatctgggcgtttcgaggaatcgcatcgtgggtttcagaagacttgctgaaggctgtaatgcggccgtcagtgacgacaagggtagcattgttgaggatctcaaggtgctcaggatccgtagagtggatgacggcgccctcgaatacaaggactgaagccatgatggtcctaaattgcgtctggagacatcttaaaggttatcttgaccgagtgatagctgtctcacagctgcagtagcttgatgggcgcaagaggggcaatgcacgtgaggagctagccagactaagccagttatttgtttctgaaagggtcaatcagtccagtgcctctctgatacgtttgctgactgtcttcttctggttttcaggaagaaactgggctaattactgcaaatcagtaccgggtgtataatccatgataatgcatcgtttctgggtctcgggatcgacaaaatgatcatagatctttgggatcgggacgttgctgttgcagctacgaacttcatattctctgcctctagcggcgcgatggaggtgcccactttgaccgcgaagcgctctcttactcggatgacctttactgatctactgggtcgtgagaatattggttgattcttcaatcttggcgacgcttgggaagcgaattctctcgtcagccattctgtcaatggatagagatgtgtggactttcgaggtggttacttgacacccggtttggtaatttggccagtcttgcaacgaggttctttgatttttaaaggtcatcataatatatctacagttctggatagtatgttttaagtcttaatggctctttattctgagcgtctttagttaactaccccggaaataaagtacgttcgacctgcagtttgttttataaatcagttctgttttttattttcaaaaaattcttaaatagttgggactcttattgctcctaagctcagtcttggctcttctctctctttttctgatctcttagttttttgtcccttttatttgtgccttctcacctctcatttttatccatattggtgactaattctttgtttatcttgcttatttgaattactgattatggcttcttcttttttattattttttctaactgtcattttttttggttttcatggttaattattcttactctccttaattttctatatttttattcctcctcattgcgtatattattttcttatactttttattcattcttaacctcattacttttattattt

SEQ ID NO: 11670 - DNA, 2176 bp, Emericella nidulans
atcacggctaggtttcgaagcaatggtctcagcatgaatagtatgagccaggaggaatatcgacgagatcgagcctgccgccaaaatctacagcagccccagagccacaacccgcgcgtgacaccctcgcagagacatctaccaaaaagctttatttacagccagtatcttcctcgtccgtcacccacgacaacaacggccgcatatgcaccgggggtgatgggaacaacatcatccacgacactcccaatgacagcgacacgttctcccgccatcgagggtttcaatttaggtaatgtcgttggctgtgctgacgccccgccctgcacgtccgctactcccattttctgtgacatggcggggcctggtccagattgcctcgtcttcgacaccgggtttatggggatggacggcatccattcgtcctttgcgggctcagagatctcgactacagatcttcatattgggttataagtgtccgtgagcatgcattacgcacgcacgttccaacaagccctgctcggcctgcactgcctgagctagacgggtggctagctagggggccactcgggtaggctagatgctgacagcgcctgacagagagcagcgactacatgagacgagaaaagatgggtctcgatgaattgacgagttaatgtgaggcatgtacgttagagtctaatactgttcgataaccagtgcagtagtctgcccacctaccgcggatatagtctcggtgtacggcgttaccaggagcatgatctacgattccattctctatgtctatccttgtatcttcatggtctcaacggccctgatcgaccaagtcatcacatccatgcacaatttccctagccttcgtcctagtcctagctccagtactcgatctagacagaaaaagaaaccatccctcccccctccccccgacaaaaccctctcgtcccaaccccggcctactgcagtgttggcgtctctggatttgcctttctttccatccacccttggggatgggctccctttccatgcaatgcagtcgcattaatccatagcccggataaagcagatatctccagtgccgcaaggaatcacggactcgctcgtaagcactttcttccatccattttggctcgtatttcagttaggtctggtgatcattattttcttttgaggttcacgccttagtaatggtcgccgttacgtagggccgtgatacagacggacattattctgcatggataatacttgtagcgctacagaacagcaatgaggttatccatgcccatgctgccatggcatgcgagggggcctgaggcccccgaactacaagttacagcttgccacctggtccatgaatgtatgtacgtatgtacactatacctagacgcctggccggcaaataaatccggaattacgatgatcaggagcagccaaaagaaacgagaacgagaggaggaaggattgcgagcagtggacattcgacaggtcgctggctcctggagaatgtcgcggcaccactgaggcgaggtctctaccgggaagaatgcctcggcaaagtagctgaggtccagggttgatcgagacgacgaaatcgcaaatccgggttggatgagtctcctaccggtcacgatatgtcatgcagggtggacgggagacgagttgggtagtagtctgtcaactatatataactaaataccactaaatataaccaaatataactaaacatgtaatatgtatataagaataaggtacatgagatggtatgctgccgatgaagaggaacggggtacctatattaggctgctctgctctagctcctcgatccataaggaagcttacgcctgcgttgacagctaaatgggggagtattaagagcaggggtgcggttcgttcgtccaggccgtcctgtgccgttgttccagcacagcacaacacagcaccctcctttccaggatcagtcagggcgtccagtagcagagctctcttggcttggggtagggcgatagatattctcattcgatggcgatatcccgagattggatggtggctgatggtgtgagggcggcttaaggcaacgccggtcagggtcgggtcagggtcggcccaaggtcgatgaggtcagtcagcttagtaggtcagctcaaatttcaagcctctgatatgtgtaagagggtggagc

SEQ ID NO: 11671 - DNA, 2651 bp, Emericella nidulans
ttgcgaccaataaaatgagagtacaattcagtctgcgagatcaagaaattgagtttgcgcttctggcggttggcttcgcgctctgcctctgccctcttcgcagactcaagttcttgcttctcggcgaggcggcgcaagtcacgctcctcacgttcgttccgcttccagaaggacatcatctcacgcatcgtccgtttagcgcgtgcctgtgtatctttcatactcttattagttcgctcctgccacttgcgagactgcttgctggctagttgagctgttttgcgcaaattctcttgccgagtgctcaaagaattgactttggtgcggtagaccttgggaatatcttttcgtgcgatatccctccagatctgttcataaatctgattgtagccctttgactcgtatgtggacacgggaactggggtggcttccttagagcgaccacccttggcatccttcttgagggactcctttcgtgggtcttccctgggagcaagaggcaagggctcgtcgttctccatagcggcatatgcagcttcagcagcatccttttcggcttgcttctgctcctttgacttcttcggccgtgtaacgggaccaccgcgtccggttttgcgcctcgacggagagcttcggccaatgtgaaaggaactggttatacctccttccaggttgggagccaatggggtaatttcgccaatctcttcgggttcagtgacgccttccaaggcccgtttagtagttttaatcttcctttgcgcccgttcggcttcccgtaagaatttggctttctcggcagagtcctgggtctcattcgctttaagctctgcttcgagcttcttctgcatttccattcgcactgtgttctcccttcggcgtttccgctgcatatccttcttgcgttccttttcatcctgaatttctttcgcttgaacttcggaaatgactgaggcttcgtttgcgtatcggaaccgatccatacccgcgttagcttgtttctcaaacgattttccgagtttaagaagataatcgtggcggcgacgctagatacatgtcagacataaatggctggagggttgataaaagcataccttgcgcctgatgctctcggcacgttcaacatctaaggcgcgcttctttcctttgagaatatagcgttcacgttcttgttcaaatcctggggcttcgacatcactcttctctgcattatcgatctcgaccatgtatttgttcaccatttccgtctccttttctgacataatcctgcgaggtgggcggagaatcttgggaggttccgtcacaccgttggttggattctcggcgcttttcaggtcttctttctcggtattacgttggcgtttatccgcgctaggtttcttctccaatcgtggagccgagacgggaggaacaggctcaatgtctccgactttaggatgaaaagaagccggtggagggtttaggcttgtagcattggcggctggaaccgctgaatgaattgtacctagtccaggcgtaggagactgtattttgggaggagcttgctcctcggtgggtcccgaaagaatgctagcaaacgacatggggtccgcggcacgggcaggtttctgtagtgaaaggaaacatgttaacatcagaaagaaaagagtggcaacagcgaggagagagataaatggtcgaaaagaacgtacagcttcctttggaggcgaagcctgtggctcgcgcatcacagagtacgcaggcgctccatggttcactgcaaagtgtgactccggctcttttttaggcgacacatgagcatggctatctggtcgactggacgggtgagcatgtgaaggagtagaaggaccgtatggagatgttccactggcgggtaacagggagccggagtaaggccgtggaagggggtactgtggagtccctgcagctgagtgtgcctggtattgcggcgaaggatcggatggatgtgctggcgtgggtgcgccgccattcaatggaggcagagcgcctggcaagggcgaaggtgcgtgtgagtagtgagggctccgcgccaggttcggctgcggaaaggcaggaggtgtttggggtggttgttgctggtagtgttcgctgttagggtagtagtgacgcggtttattcgagggcgaatatccagcgtaatgagattgctgagtcggagactgagggtgatatggcggagccccggtcattatggtagccgcgtttgtcggaaacgcggcggcgaaacttcgaagacagggactgccggtgacgatgagcaggaaacaattgggatggaaatcggttgttggtagatttgcccggggcagctagccggcgggcgcccacgcgcagtagtctgtcctgtcaagggagtgatcacgcgttcggtagtcggcggtcgagctatcttcttggtgaattagatataggccagatgatggcaaatgcggatgtcgaggggggagtgaaggattcgaggatcaggatggatacattattgtcgaggcgaatgaagggtgtggaggatgggagaagcaggagaagaaaatgaatgagatggcaggagttcgccttaccgggtttgccaggaatcttctttgggagggtctggctttagtgtctcctcgtctcgtgtggtgaaccagcgaatc

SEQ ID NO: 11672 - DNA, 2266 bp, Emericella nidulans
taagtcagtcttcacgcaatcagcactctccccctctctaccctcccgagagtcttgcaaactacgtatccaattctattaataaatactgccggagaactgtttatggtcaggtcgtagatatcaaataatatgtgcggccggtcgcagcacctagatggcctccgctaagatgcgcaataatgttcaaagtttcgagcacagtgacccagatcgccgcttctggtaggtttcagggcatgttcatcgtcttaaaatctgctacactctgttctagtgagcatagattcagagtggacatacggcaattacaacagtggcgccgttcggctcgagagtctaaagcgaggtttatacggtacctatcgtcatatctccttgatcatccaccctttatcgcgcctttatgttggtcgaagtgaatgaatgcagtgctctctgtttaggctaccggacataacgaagcaaggaaggagaaaccggatacctgagtttctagtttcaactgccatttctttacgaatggtttagccgtgctttctgggatgtaatctcgatttaagcccaagccttggttgtaaaaataagagaagcgttgtatagtaccttcatacgcgtctaggagtagagagtaggtacgaatcaggctgcttctccaaaactgggtttataagtcatcgtacacatgaagtatttgtgtatgatgccactctcaatatcatactttgcaccgtccgcaagataaacgtattgcttatgcccagacgctaatgcgtattctgcttacaatggcccggttggctctcacggcggtatctagtgtatagaatcctggcagggagattgttcaccactgtagatgcgccaatgtcgtgactggagtatctatcttggcagatttcattagataccttcggataggatcctggcacatgttggacatcgacacgctttgcttcttggcggatggctataagagacagaacgaggtctcttgaagccccccacttctaccgttcatcgccatactcctcccacacctggaccagatgtccctcaccatgtgcgccgtcgcccagttcgtgcaagcattcaatgtctcggtcatggacagaccggtgcccacgatcctgaacagcaccgatgtggttgtgcgcttgaatgcccccgccatatgcggcacgacctgcacagctacccacacatctgctggatccccagaacacccctttctgtatggacatgaagggatcggacatgttgtcgagggagactcagcccagtccctgtccgtcggagactacgttgttatcccggataacgtcaacaatggccattttactttggatccggatacctatattccgtctctggggttgggtggtgtggagggtactgcgctgcctgggttgcagggtgagcaatgccctcgttccatcaacagatccatacccatagatattgatgaagtgattgctaacgggtgggtgtgacgccgaatatgcccgtatcccctgccgacaactctctgatccccgttcccattaccgacaccaccaacacctcgacattgatcgactacctcttcgcctcggacatcttcgccactacctggagcagcgtcacctggtcgggctttgaagccggcccagtcggtctgttagcagcatactctgcgctcttgcgcggcgcgtcaaagggtttacagcgtcgaccgcgtgcaggaccgtgtcgacctcgctgcatcagtcggtgcgatccccatcagtttcgctgagtcggatcccgtagagcagattctcgcccttgagccaaatgacgtccgtcgtggtgtcgagacagtgggctacgaggccgtggacgcctctggtgccgtacaatcaggcatcacgttgcgccaatcgatagacgtcaccgctcggcatggtggaatcggagttgtaggactcttctcctcgggtcaggcagatatcgactatggagctgcgtatgctaagaaggtctctgtgaatgggggcattatgcttccgttgcaggttgccgacgagattgttcccctgattacctcgggccaggcgcacccaagctttattgtcagcagcgtcattgggattgaggaggcgccggagtattatgggcggttcaaccagacggaggagagtaaggttgttatcacgttttgagccactcagcgtgcaccgtagtcaggccgaatccaaagctgaactggatacaagttcatcattgtactagagggttagaaagc

SEQ ID NO: 11673 - DNA, 537 bp, Emericella nidulans
aattttcgttcccagtgttcgaatcaaccatcttgatctttagttcctgcatggggggggcgctgtagtctggctggttaccaagtgttcctgcctgataccaggcttgaatccccccatcatccaggctgagagtgaggcagccaccgtagatcagagctttgttgtaagtggaccatctggagacattgaacttttgttttgccacagaacggactgcgtcctctgaaacatgcgtgatcctactcttcaacttacctatgacccgagacattgacacaaatgcgacgtcccggctagtgaccgtattgctatgccattgttacaaccgactaaccaattctgactataaaaactcttatagcatgaaatgagactgccatgcattcatatcaaggttatcaataccatcttattgaaatatccgtttctgtgatgaatgctaaaacttagcctggccgctccataagatggctaaatcctgacatcggcctagcaagctcactcgtgcaacagtaacacatcctatttattggc

SEQ ID NO: 11674 - DNA, 1002 bp, Emericella nidulans
tactcgcctttcgtgtacttgaaccaactcacatttatccttgacgacgtggttcgatcatattttagcctcgcagcctctgatcaaacctctgcttccctttcggtctccttggcactggccaaaggccttgcggctgcgtctgagggcctggcttgatagccttccatctcgcttgcagccccatgagcggcggacggtggaacttttagacggtaatgacgaccccgggcccagtgggaacttctccctgcacctggcgtacatgactacacaactagctatatatagggcgctgatccgccccgtgtcactaatagcgctgcagggccacacatggcacaatgctccaacttcgctcgacatcgacctggatgctgctgaagcagtcgttgaaggagccctatcaaacaccaagacgctcctcgcctctcttatgaagctcacgactgccgagtgggattcgttctggcccggatgtaagggacccttcaaaaatactctcatcgatgcggtaagattgcaacagcgtttactgacatggtcatagggtcacggcataattttgcttccatttcgacactgctcctacacctctacctgctcacctcccgctttcaagcatggcctctgagcggcccctcttctccaaacaaggccggatcctgctttctcaccagccaactcgagaagctccaagcgctgatgccgaaatggcggtggcatctgatcctggccagccgcggtgccggtggtcgcaagggcttgactaacctcgcccttttgagactggatgccctgatgaatgaatggaaggaagaatctcccatgccaacctcgtagagtagaagatgaattgtctctagattaaattcttaatcttctcgtcctcgcgcaactctcgaaaggccactggccgcggcagctagaaagcagtcgggcaggccccgtacatgatccctccagccctaaacactggccgcagcttgtgacaacagccgg

SEQ ID NO: 11675 - DNA, 1440 bp, Emericella nidulans
ctacacgccgcttcccctggactggtttaagcaaggtacgtatgaccgagtcgtgcagctgcattacggcgcatccgccggagaaacagtcgtatgagtatgcgcagcgcggtgggatgattgttgcgaatacggaggtgaagattattcataccgagactggcaaagaggttggccctgaagaggagggagaaatccttgcgcgcggaccgcagatcgtcatgggatacctaaataatgagaaggctacgcgggagacgtttgatgaggacgggtggttgcacaccggggatgtgggatacatggatcgcgaggggttcatcgtgatcaccgatcgaatcaaggagatgatcaaggttaagggaattgcggtctcaccggctgagattgaagatctgctcctgggtcatccagacgttgaggacgtgggcgttacttcggtagcggatgactatgcgggagagaggccgaaggcgtatgttgtgctcaagggagacgctaagaggcgactgggaagtgaagagggtgtacaggctgttgggaaacagctgattgaatatgtcaaggcgaagaaggtgcgccataagtggattgtcgaggtcgagttcctggaagaggttccaaagagcgccagtggtaagattctgaggagggtgctgcgcgaccgagagaggagtaaggataagggcaagaacaaggctgagaagaggctggttgtgagggacgagaaggtgagagcgaggctgtagatatctcttagacatagatgtagtcaggtagttagcgaactagggtttggctttaaccaccaagaatctccatcgttcaagtcttatttctgttttctaattgcccttccagttctcattattgggcttcgagtaatagtccattcattggacaggaaccgctccagctcactcgcacataaaaccttgacttggactatggacatatactccgaaggtcacgcaatgtctctctcacctagctgactcccattctatcatcccatcagccgtattcactcaggaactcatataatggactgcaccaagcacataacagcccgcaaagtcctctttcgcggcggcgagtcagcctccccttttccctatcatcaagtcaagcctgtgctcaccggttgaagcagatcatggcccggcacctggcacacccgcacaagcaaaagcgcaactcctcctcttaaaacaaatagtgacattaccacttatggcaccggtggcctcacctacgcctccatggaacaccatccctacgccgagacgaccgagttctacggctggctcgaccagagctcgctccatccagacaccaacgccaccaaaaacatgaacctcaagtccctctccatttacccattcataggagtccctggtcgacaacgacaacttcgccaatcctgggacctgagcggct

SEQ ID NO: 11676 - DNA, 1998 bp, Emericella nidulans
atcttgggttgtgaaagctacttgatatgtcaaccggcctgatgctaaagcgatttccctaatgatgttgttgtccggccacacataaacccaaatggcatggtgagtgtatctgccaaggcaaaattttgttctaagtaaagatctatgagaatatgcctgcaacttccaggagctgaaagccccttgaaattacactggtaagcgtagattgtcagtttgcacagccacaccattgtttacgcaaaatgatgcacatccatgttactgtccttattattggctttgcgccccgttaaacaggtcagctaactttgtattactgttcatcaaaagctgcacatgtcatcgcttggcagatggcgccttgtgaggctgaccctcgccgcaattccaggtcgcgccacacagctcaagccacaaggtcgtactgtatgttcatgttcgcgaagagcctctagggagagaagcataagagaagcatattaaagcacgtcatctaggtaaatatacgaaattacgatcgtctgtatatttctagaattgtctctcatactctcttcagggcacactctataagtcttggaaagcttgactttcgggactcaaaagtggatctctatagccaagcatttgcagcagtatatacagtctggaccctgggcggtcgaaacaccaacaaccacatgacgcatgcgaaacttcccccttatatgtatatgtcatttgcttattagcttctctttattagctttctactagcccaatccatatagccaacacactaaagggtccctagacttgacgtaggcagcagcattacggtcatataagctgccgttatcatgaccaacgttccatccacccgcccctctcccctccagctcgacaagtatctgatcgcagacgcttatcttgaatcaaggaaccgaaagtggcaatgcctaaacaaaacaccatcgtcaactctgccttccccaactccttttcccgcatcatccactcagaaatcgtccactctacgcttcggaacctcgactcagctgacactataagccgatgcaatatcatttcttcatctatcgtgaagactaccaccccaaccagcgcctcaaacaccgacaacccagtaaacgtcctctctggcggcccagtaacatcaccagacccaactccaatcaggataaccctcaaacgcagcaagatcaccacttcaaccctcacgaacacctctcttcatagggctaccataacatccagctcgctttcgaacatcccacgggctcgatccgtgactgcaacaagtagcacgctcgataatgtctcccggctgcggcgcgtcgacctcgcaaacaccactgtcacagagcagagcactatggcgcgctcgcaggccaaagactctgttgtgagtcggagctcggtgtcccgtggatcactggagaagagtcgagtactgaggagtagagtgcggaaaagccggcttaaggactgtgaggtgagcgattgtgtgattgtcaatacggactttcgaggcatggtgctgcgaaatggggtttggaggaacggaagacttgttggctgttgtagggcaggtgaaggggaaggggttgttgtgaatgggaaggtacgtgtttcacacttttctagtgtaaagagcgtgtgctgactgcgagtagaaaatggatgcaccgatgaagggtgagaagaatagcgggtgtgggaagttgatggaggggtgggagtctgagacggagagcagcgacggcctggatagcgacagcgacgacagcaatgtggagattgcaggaaaaaagacggaggaggaccttccgccaccatataccccttgaggcttggttactcttcatagcatggtttgctaggctccctaattgcaagtgagtatttctcattcatttacttcaaatctgcgttgcaaacactataaaaacacaatgtacccaaatatgttacagagaaaatcacatctgcggt

SEQ ID NO: 11677 - DNA, 176 bp, Emericella nidulans
gaagacagggacagcgagaaccgcttggagttagacaagcgcgacaccaaagagaggacgaggcaacaggccaccccaagagagccagagcgacgcccgccgccaacccgcgcaaggacgaaggcaacacaaagacaagcagagcacagggcagaaagcacaaggcgacaacacca

SEQ ID NO: 11678 - DNA, 4063 bp, Emericella nidulans
gtgacaataccgtgtccctacgcgactagcccgtcataatttcataaataagagtcatcaaaacgctcacagtcaactcctcctgggactttctgggggcccctgggttccattctcgccaagggatcggtctggctgcccaaacagccacaaaagtggtcggctgccaagtaagtactaggtgatgcaccaacttttctggcctggtgagacttgggcctcgactcgactcgctatacgctgcaggagtcacacgacctggggtaagctgctggatcacgtgcaccatggttaactcttcagaatctagagatctgctggtaaaactgcgtattgattatttcttttcaaccctggatgttttccgacaaaggaccaatattgacagctcttgaaggaactttgaggggccacgatggcttggctgtagcggctgagtaccgcagagcccgcagtgtccgcaagcccccataagcccccattagaaggggctccgtcacgggcgatgaatctgtttagctcatagtcgtccactgttttctcagagtaataccgcggcgaaacaacgccccatacagtccgttgcccagctccacattttgacaggcactaccccttcgcgcaggcacatgaaggtcgaacaatccagtccttagtatacttgtacttgaatgcttgtacttgaatacttgtacttgttattgattgttaattttaaaggggttcacgagtgatatttgcatcgtctgagccatgaattatatcttctatttcttggactggaattgtagagcaggacgccgcagagcatagctgagacgactcggtaaacagtgctttgtctctatatgtaactgccgcggccccacacagtgctcagcaatctggaagacggcacgggggctcctagaggccattccttcagcggcattgacagtccgagctcagctgcagtatcatagaatatgaaaatgcagacaacatcagatatgtcaactcgaggcttaaggcttgatcttctttgtcggtctttgtcggtggaactgagtgcggtgtatccggtgagtcgtgcgctgtggatggcggcctcgtggctggttctggcaacgcggattcctgacattatttaatccctcatacacagtctctcatgggcgatgggcatttcgtattcagagtaatattgcatcacgactctcgagctgtattcgaacgatcggtggggtctccgcgtaggaaatgaagcacctcagtggtgtcggtagttgggatcgaagctaagcaattttggagtctcctgggagtctccgggaatctcttcctgtcagcattcagtaaacacaatcgtgcttatccatgtcatcatgcacttaccaaggtgctacccaaggtgcacgagattcagtgtcccggccaccgtgaggggttgcccagtgctggcgatctgtttccccgacgatccggggtcagccactcacaggagctctaattcgccgcccaatttatgggggatcgccctccgattctcggctgggcaccgtccctggcctcggctgtcttgcacagtattgggtttctcattgtgacagtttattgcataatcagggtctacgagtatcggctgaccagggtcgctctaaatgcctgatagccctgcacagaatgctccaaaggtaccaggcgggacgtcgactgggtcgacattgcttaaactgatcaacgtctgtcaagcacttgaaacgggagataacaggaaacagctactgaagggtatctcaaaattgtgtaggaaacccatccaataaaacaacccgcccaactcccaccatgctgttgtagggtaaaagagttgacgcatgagagaaactaaaagtctcatccccgctgagactatatatctgggcagacgttcaatgctttggagtgtttttcagagcgcattgcgctcggcatttattccctgctggtattttctcagttaacctttaattgtcaccgccagcgctcttagctagccttcgccaaaacgcgtcgcgtcagcagctctggcaaccttcgtcctcactttctgtctcgtatcccttcttcgtggtcgatttacctcttcccttgcttccattcatcattcctatcagtgttttctgctttcccccactcttggccttcttcttttcctcagtttcttgtttccgtagatactgctccatgtgcttctcccgcgtctctcggccctcttcagagagctcggcttcaagcgcacggaactcatcactttcgggatccatgccaatcaaagactcaaggagggcgatttcgcgagcccagatagagtaatctgggactgccttggccgcagcgggtttcttctgttgttttttcttggtctttggcttgatttcgtcatcactggctcctgactcaacatcttcctccgctgcttcttgttttgccctatttgtagcggcagctggtattcgatcgattggcgtttcgagaatcattggtaatccctcaaagcgaggctcgttcatgacattgtgaaacgctcttagaccaaggaagccagttccgatattcgcgtgcaggtcgcgtttgctgccgccgggcgctttagagtcgttaaggtggagggcacgtagatgctgtatgccaattaagtcctcaaactctttcaaaaatgcttggaatccggccggagacacgagatcatacccggctgcaaagctgtgacaggtatctatacacacgccaatgcgtgaatggtattcttttgggatgagagcaagaaggtcccggaattcggacagagagccaccaattgttgagccatgaccacacatggtctctaggacgggtaccacattggacgtcgcggcaagggcgttggtcagggctttggcaagccgagcaagtgcgctggagaggggagtcttatttgtgcttccggggctactcgcgttagcagtgaacgagtgtggaagctgctgccttactgaaagttgtaaagcctgatcccgagtgcttcgcagcgacgcagatcgtctaagaacgcgtcatatgcttgtttcgctttggcctcatcctcctgtgctagattaaccagataagagccatgagggagaacatatctgcgccatattagcgcaccaagtccggccaagcgtctccctttagacaggacactctgacgtacttcgcagcatcgtagtcgtgctccttgcaaagcttgacgaagttatctctatgctcatcctggagcggagggttgtcccacttcctctgagatttcaggaaaagggcgaaagcgttgccgctgagcataatcagccacagttatatatgaggtgggctttgctatagctgaggactaacccaacgtgtttgctgttattcacggcattgaaaactcctgataaaattatgagtataagcttcgaagccttgaccggagcgaagcagccggaaagattcttacctcctgctgcgcttacatgagcgccgacgaacatccgcaatccctgtgttcgtacccttaatggcgtcatctcagcttcttctttctttgtagacctccgttttctagtggcctttgtcgcagatgtttgttcctttatctcctcttcattgactttaacagagacttccgatttcacctccgtaagctcctctgtgtttaaaagcgtggggttttcagcttttgttgtctcctcctgcaaatatcgagcctctctcttcacctgaactcttctagatttgggttgtgggctagatggggtagaccgaagttgttcggccgacttgatacgtttcgactgccgtcttgtagagagtaactcgtggtcatcacctaattcccgtttgttcgtctcaatccccgccgcttttcgagctcctcggggaggcattgcaggtctgaggaaagaaaaggctataatattgagccagtagaagagcgtcgagtcgtgaaaggaccccttcgctgagtagtgaagcaggcgcaggtagtcggtgacggaaacgttgatttcgccgagcgggccctgattgtgcttcaagtggtgag

SEQ ID NO: 11679 - DNA, 2775 bp, Emericella nidulans
atacgaaaatgtctataatagtgatttaaaaactgtactgatacgccaactagcctttctagggctagagttactctgatgctatgactcatcgctaaacagaatataatcctcttatccccatctaccaaaacaacacaacccaggcctatacaagatgccatctctgacattcacccggccaaccgtccttctcctaattgacaatcagaaagctttcgactgtgatccgaacactccatgtcactggggcactcaacgctcaaacccgctactcgaacaaaacctatcccgtctaataactgccttccgtgccgccaaatccagatcagagacgaaactcgaaatagtccacgtcttccactcttccacatctctcacctcccctctccatccatccgcgtccaacgggaccggaattcagcccttggcttgtgtccagccggcacaagatggttcagagcccgtgatgtggaagcacgtcaattccgcctttatcgggactgggctagaatcctaccttaaagagcacggaatcaggcagctagttgtggcaggcattactacagatcactgcgtatcgacatctgtacggatggcggcaaacctaggcgtggcggatcggtatcctgagggcaagcccgttctgaatggagatgggagtcaggagaaagcagtgccggttgttgaaggccggattgtgcttgtgggcgatgcgacggcgacatgggccaaggggggattcgacgctgagactgtgcatgctgttaccctggccagtctggacggcgagtttgcagatgttatggcaacggagcaggtcattgcgtccttggaagcgttgaattagatatggctgagagcacggaattgcatccagccaggaatacagccatgtgtctaagaaagtgccgacccgcccaatggcacaagatgaaacagctgagtacgattattgtggggctgcagagttgtaggttgttaaagaacaaggcaagttgtgctgaaacaccgggaggcgagcaggcctggaggacgtagcttctgaagtatcacctagcatatctctcttcaatgttcagccagaccgcggcatttgggtttatatgcctcagcttttactgtttgcacaaattgccgtgaccagttgaatataactttataagtcagccgcttcaggaggctgctgcgagtgcgtcaatagccataagtctcgagtcaacttcaaataaaaacaagatcccaatcaaatagagcaatttttttgtgcatgtagtaccgagccgttgcattcatgcggtattggtgacacttaaaaaagacttctatcttcactttggaggtttagggctcaggtccacgttgacagtcataataccactggaattaaccccctcacaagtaacattgtctcgttcgatctttctttgccagctccataggcacccggggccgcagcaccggcagaccgaatgttcgacctggcgtcctcaaagatgaccgtctatgctcagccggtgccggttcctgaatgtgaagtccgaatctgcctgacataccacaatcacgccgtcgtgaatcacggcgtctcgatgcgtctttctcaagccaataacccgtcggagaccagccagaatatagctgctagcgtcgtcttctgctgtcttatacaggtcattgtagtagctaagagtatcgattttgcggtcaacgagatctgatcgtgaatagactgagttccccggttatccgccgagcgcgtccacacaataaaatccagtatttcaatagccgtgatatcatcgtcttgcaggaccagggctaagcccatgcgcagcctacagttctttgatgccacagccatcaggccctgctgtttcaatacgcgtagtgagccggtcaagctggacttgcacaacgtaagccccccctcgtgaacaaggtcgagtcctcaatgttctgcatttaaccagtcaaaggtagcttagtggtataagacaagaatgagtctgtagtgtatagatcgttgggcgtttttgccagcagaagccggacggaccggacggaccggacgtagtgaattgggttcgcctccaggatatggtgaaaatgcttcgacctaagagcggatcaaaggttgctttctgactatttttccgagaaatacgcgtcatttgctagatgtttccaagcaaagatatacgcgattggttgttctgggttctggatgattcaatcccgtgcgtgatagaaggggccagggggatgctcggactgcagacggtatgcttggagtctctttatgccgtcaatttttactcacatcaggacttactctcacttacccgatgagagtggagttacgctaaggttaaatgataagaaataatcccgttgtctttggtgtattgaggtggccgagtggagaaaaccaatcgaagcaagcaagcaccgactcctcacatgcgcaaaataatactgtctgggaacattagtgcatgtcttcacacttcagggagtccaatattgtatattcgcggctgggagttgtaaagactggacttcggtatactacgaaaactctgagttggcgattgacttttactgtagagaagagggctgagatgggtcgagtacctttaaaacaatgagacgcagagaatcatgaaatagccatgttgcatttgaaatttctggcgagaggaaagtagaaggggagacagaaacgactcaaggtagacctttggggaagaacacttggagaggagaatagtg

SEQ ID NO: 11680 - DNA, 132 bp, Emericella nidulans
  unsure (1)..(132): unsure at all n locations
aaagcagacgagcgggaaagacacaacactggcatcgacgaaaagacgcaaaccaacaacagagaagggagggccaaagggaagaaccgtggaagtccacataacgcngaaacccgagccaacccgaggacg

SEQ ID NO: 11681 - DNA, 2209 bp, Emericella nidulans
cggcagagtttgtgcagcatgggttcgctttcgtcaatgtcgactctcgaggcgcgttcgattcataaggcgtcatggctatcatgggcacacaggaggcagaagatggatacgatgtgatcgaatggattgcacagcaagagtggtgcagcggcagcgtcggtctcgccggcaattcgcatctggccatcatccagtggtttattgcggcactgcagcctccatccctcaaggccatcgccccctgggaaggctgtggcgacctttaccgcgagcagtttgcgcgtggtggcatctacgggggcgacttgtttgaccggctgatcgtcaagtacatgctgcgcggtcgaaacggcatggagagttttcgccagatgtaccagcaacacccgctcgcttgcgcctggtggaacgataagaggcccgatatgaagaagattacgatccctacatacattactggtacctggacgaacactatgcacgggatgggcgcgattcgaggctggctggaggtgcagtcgaagcataaatggctgcgctggcatccctaccaggagtggttcgatctgtgggggaatccagaggccaacaaggagcttctgagcttcttcgaccggtatctgaaggggatcgagaatggctgggaggctacaccacgcgtacgcatggcagtgctgaagtacggcgagagcagtccattggctggcatcgtcgagccggacttccctctgccacggaccgtctatcgaaaagcgtatctgaacgcagacggcagattgctcctagacagcccctcgtctgcctccggtacagtgtcctataattccgaagagccctcgtcgatggccaagtttacctacaccttcccagaacgcacgcagctggtcggtatccccaaggccgtgctttacatgaattgcgacgagcatgacgacatggacgtttttctcgtcctgagcaaactgtctgtgtcaggtgagctgatgttcaacctcaatatcccgtggaaggggctcccagtctcatcgattgccgaaatcccgaccgacaaacgtacagaggtcatcctctatcaaggcccaacaggcatcctgcgcgcctctcaccgcgccattgaccagagcaggtccatgcaccccaactggccgttccacccgcacgagcgcgaggagaagatcccgccgggcacggtcgtacgcctagagatcggcatctgggccatgggggtcgagtacgaagccggcgaaagcctgcagctgaggattgccgggcactaccaggggatatcaaattttgggacctctgaccatatccggaataagggacgccactttgtccatgttggcggcgagtacgacagtcatctggtgctaccgtttgtttagcttagatctaccataggtacctaatatactacgatctactccccgttctcaaacagatggctcagatcgttccagtcccagcctgcccagtcgagagccgatgggccccaggctagctgtaggtcccgatcactccaggatgagctctctatgctcccgctcccgaatgccggcgggagctgtccatctagacagtcggccatgtacgtttctagggcagagagaaggtcttccacccgttgagcgccgttcaggcggcggtaatactgtcgtactacttccatggcggctttcatgagctggtcatgttagattcagtaggtccagaagcaaagaagcaaagtaaagacgtacctcgaaatcagaccggacgagaagagaatttctctctctaaagatgtgcacggccagggcatagactgcgctgaggggtgaagtcaacgccgtcagataggtcgggcatccagagtcgaccatggcgacggtcagcttgaccatctctctggccgcctcgacgcagacccctgccccgttgatgaggcgatgctgccatggcttgccagaggcgtagcggtcagtgacctcgcggatctctgacttctcaattaacaggacgctccgagttgaggaggatgagtcagccggtggtcagcgttgggtggcctctctgtgaagtatactcacgcgtagcgataatagaacgtcaaaaaggccgactgctgagagaatggcccggtgcgatattcagccagtagacattcccaccactcctcaaggagagtcgccagctctcctccagtgtgaaccttctctttgatggc

SEQ ID NO: 11682 - DNA, 124 bp, Emericella nidulans
caccagaaagaacgaaacagcagcgacgcaaggcgcacgaggccagggcgaccgacaatcgagcacaggaccgggtagaaatgaaagaagggccggagggcgacaccggacagagcaggagcca

SEQ ID NO: 11683 - DNA, 544 bp, Emericella nidulans
tctgagcggttttatcgtcaaagttttcgagtatagtcaagcatcgcccggtgtgctcaatgacggcgggaggagccgcgggctgcgaatccgccggctgtgaatccgcggtcgtagcagctggttcgccctcagtattgggtttctggtcaatttgcattgggtcccctgcgcttccctgaccctctagttgtccgtccggtagagcagacgcagccccatcagcggtaaccatagccgggataggttcagaagccgattcagggctcgatgatggtttaacggtcaactcttgagccaccccattgggcttgtcttccaccttaggtatttccgtgttcgacgtattgccgtccttctctaccggtgcttcaggctctgaaccaggaccttggctcgttcgacggtcagaagactcttgtactgtctcgctgttgatcacttttgccggttcctcactagcggcctgggtgtcctcattcgcttctgaggtttctttggttatgatttggggtgaatctgctccgggtaatatgctggatgc

SEQ ID NO: 11684 - DNA, 2227 bp, Emericella nidulans
taggtgactgcaacaccctgcggactaccgggccctgcagggtctcccggcttctgctctgtctcgggtttgccttctttatccaacttcttgctcttttttcgcgaattctcatctttttccggcttgggcgtaattgtgaccttgccgacgcgcgtcaaccgaccatcagcccaggtagcaacgccgctccagtaggagataacagggccttcaagacggcgattttgcaatgcttcgatcttcgctcgtctctcctctgctttacgcttctccatttcctcccagcgattgagacttttgctattgagcctttccactctttcagcctctgccagtcgttccgcctgtgtcaattctttcggcttgttcttcgcttttcgcttggcagcttcctccattgtagcgataaggcgaatgcgcttctcctcgctatcttttaaccgggcatgcgtgagttccttgttctgcatggtctgccgacgggaagaagatcgtgtagggccttcgtcgggggtggggatccatgaaactcgctctgacttcttcctcgggcgcgaggcaggggttgttggtgctttgggagtcgcggtcgggtcaattttcaccttcttgctggttattctataccgaaggtcctctcgagctctttttttcctcttctcttctttctcctccttcgcaagttgccgctctccttcaaggtcgtctgcctgagcattcggtccttgatcgtcctcatcgtcggaagaagaatcgagccccatatcatcttcctcagctccatcttctgctgcgtcggcggcaaattcgttatcgtcatccacttcttcaaataatagtgctagttcgtcgtctgcttccgcgtctaaaagggcggacatctgccgtcctgctgtgctccgcttctctcgcccctgaatgagcgattgcaccggggcttcatcctcggatgaggacctctctccatcgcgtgacattctcgttattaaaatagttgacgcggattctcgggcgcaagatggttttagctcgtaatgattcacattcgagacgcgtgcgtgaactgattgtaaggtcaaacggatgacctaactccactccaacaatatcatttaatttctgacacgtagcagcgatagtatgataaatatatacaataggacgatagtcaacagcaaatcattcagataagggaaagctggtattataccgtacttcaatgcggaagctttgttggcggtgtgaaaaacggtgtgataaagccggcagattagtaaataattcttacataaactttcacagtgcacacacccagccgcgcatacgttacttttcaagttttctaggtttttatcatatggaatggaaggaacagctacttttaacttgaattccccatgattattcatttagaccttcctggtacattggaacttggcagaattccatacataggctgtgtatctagtcttggcgggtctccgttgatgcctcatccatcgtcggcccctgctagtgtgctgagtatatgtataagagcgaggagctgccttggccaagagtgcccggaaattttgagtgtctgattattattcaaccatggcgttggcgttgccattcactatcctgttgggattattgacgtgacgagggtagtgcagcaatctagaagcctcatccccttgcattaggtatagcctggcacgaacatttttaatggggacaaagggccacggattctggatcttttacatcgtgacgcactttttctacaaagtcagcatcatcaggtcttgtcaatgtgccgttcgcattatgagcaagtccagttcagccaggttcagccagttttgattgctttggtttagatgggactcggtagtagtggttggaatgcggggtcgaaagtgtttcaagagtgtcaagcatccaaacagggctggttctcagatccctcactgtttcagaaattgtgccggcggatcttcccatcattggcagttgactctctaccatataggggctggttcctgaaaggcaggcggttttgaagtaggattaccctgtcgtaatccaatttgaacttgatgtcatgacggaatgctaagctaatagccagccctagacttctaacgtaaccagttatcaagtagaataatactattaacggagtaggccggcttcttcttcgaagtaggcaatgcggactaggagtagatgtttt

SEQ ID NO: 11685 - DNA, 321 bp, Emericella nidulans
aagacgggagaccgcccaaattaccgaaaaagggagccgcgaagggcgcagggcagagcggccgccaaccgccaccccggcaagccccacgcgccctaggcattaagggcgcgccacgggaaggaagacgcgaggccggcagagccacacgcggaggagacacagaaacaccagcgacacacggcacacaacccggcaaaggaccactcgcgaggctctgagaaaagcgaacccagagagaaccgacagcacgaacaaaggaacggaacacggcggaaaagccagagcacagagaaacggccggaccagaaagcgacggag

SEQ ID NO: 11686 - DNA, 182 bp, Emericella nidulans
gcacggagagtgaggctgcagcgagcacagcgacgccggcaaccaagaaaaacggcagcgcacagagcaacgcgagagacccagacgacgaccacacacagcaaaaggacaggaaggagaacaaacgcacaacagaaacgcaacacgcggacacgggcaacaacgcagggcaggaagacggg

SEQ ID NO: 11687 - DNA, 624 bp, Emericella nidulans
aaatgatgctagtatggcctcattgctctacgctcatttacccattgatgatactggccgcgcccaggtgacctatcattgtactgtcagcctagcataacatgtagacatccaccgtgtcgctcatatgcataatactgcacatagcgaatataattatgcacctgggcaaattactggtcagacgacttgaacatatgacaagggtctagatacattaaccaagcgagaatgaccaatcccaccatgggacgctgggaaacgtgtaggttcataaacagcgtatatatgattgttacgggaacatgatgacctggctgacgcctacactctgacgcaacttgcattcgcgagccaagtgcggtatcccacactaccatattgcacactatgctgctacgcaggctgagcatatgcagtatatacaccggcttgtacacgtgttatgtgtattaaaagaggcttaacgtagaatgtcgatgtccctcgaccggacggatggaatacacctatcaactagcgatacatgcattggcactagagatatgtgttccaccctgtggacggcaactgggtcaaacggctgatcggtaaaaccacgcacagtgaagaatgaagtctggc

SEQ ID NO: 11688 - DNA, 682 bp, Emericella nidulans
acacccaaagcctcctaatttggcactgtatacctttggggaatggatgtgaacaacgatagtgtactttctcttacgagtcatgaatgctactaacgtatatgccatgcccctaacattaactatcccgccttgaatgggcctggccctacagacaagagctcgtttaacgctactgttggcagacccacgtggggactgcgggccgctctaaccgtgcaaggctatggaggggctaactatagcccgattttcactcttgacatatcgccttgaggctctgggctcctgtaagacgctcatttaacttctagcttgcaccacgccaggtcaccttggagaccagacggcttgccccttcgtctacttaaagcacgctgcggacaaagctaaacggcatggtatgaacaagaatcccatgcataccttagttgaccagtacttatacgatcgtgacgatttaaatggatactctgtaccagctctggaaatatgtctcgaatgtgcctactctacagtgatctcccacctgttaaactcgattgggggaaatataaccgtgaatcatgtatttggaacaaaagggctagatgaggaacccttgcgttctgacaatgaccgtgcacctgagcactacgcttgctgctgtgggaccactattacttatacatccagctttaat

SEQ ID NO: 11689 - DNA, 240 bp, Emericella nidulans
gaaaaaccgccgctcccatccaggcgtagaactcgaaaagagtcgctgcggctcgagtgcatttggggtacattctgttactcgggagcctgtcgatctctctgcccaataaaaataaacgcgcttaataccaactgcaacattgggcaatgaaccgcacttgaactggagctaggtccgactgatgcttgagacgcaacacttgctacaatttacggtttaggtcgactcaaacgctgt

SEQ ID NO: 11690 - DNA, 515 bp, Emericella nidulans
acagacgacatatgtccaccctgacaataatagatcatcaccagagctgctttttttcgagggtcgtccagggaatcgaaacatgcaaggtgagaatctgctgagtgcgatcatcgcgacaactaggctagcaagactacttgcgactgccacagcggagtatgaggaacatgaacccttaacagatacgtaaggtggacgttcagtgtaccacagctggccggacgccacatactccttggaggtagcagccatgcaggactcaaagattgacgaagaggcacagcgggggccctcataaggatcgggcgctacgctttcaccggatccttgatacgtgaagatacctgaattcgactcccaatccagccgtatcccgaaggcctgggaagtgacaacaactttcggattctgaacaacgcctagattggtaaattacagcggccaccatgcagggctttttcttatatggggtggccaacgcctaacgttagcaccctattcactggggttca

SEQ ID NO: 11691 - DNA, 3700 bp, Emericella nidulans
  unsure (1)..(3700): unsure at all n locations
gaatgaacgccagccttctgcggcgccgtccaggacgccgtatacacgcctgtcgcgaccctccctggttgcgtcttatgcttccaatccattaggagcgtaatagtatcctctgtctcgggcacacagcccaactctacagcggtgccctttgacgcactcgcattcaccctgacgggcgtgtagtcattgccaaccatggaatcgcaaatgtcaacatggtgactgtttaaatagtaggagatatcactttccttgcctgcccacgccttgaacgtctcgagctggaattttggctgactcatgtatgagtagaagtagttgaagtcgccgaggttcttcgccttcgcgcgggcgtcggagtaagctgggtcgaagcgcttgtggtgctcgacaaagacgaagacattatgcttttgcgcagcctcgaggagcgcgatgtgttcggggagggttttgacggcgggcttggtgaccagcacgtggatcccgcgttcgatggcgtagagggcgatggagaaatgggtagggtcgggggtgaagattgtgatggcagatcccttggggagggcatcaatggccgccttataggcgtctggatcggtggcgtcgtccgccgggtaagaggtaaagcttgtatcgaggttgttatagacctgcgtgatgttcttgtggaggtgctcgcctgcgatgcgcattagctacttcgagcccttcctcgagacttcaaggaaatctgggttcgtacgaattcctgggaacttgcgccctgaaacgccgaccatgctcaggtctccgactttaccgcgacggcgaagatcaaacagcgtcaggccgacgacgccgactttcttgtctgaacctgaggcgccaccgccgacatagccggttgtgtattcgccggtaccgaccatcaacacactgggaggggccatttttgagctctgctgttgtatcgggacaattggatagagattgagggaggggtaacagagggtgaggggaagcaagcgagcgacaggagaaaagggcggatgagacgcagatatactccgacgagagcgacgaccttgtggattaggatggaataatgttaacacaaatactgagccggaagaatcaaccccatgccgcaattctgctttgaattgccgggaatcaggcgctggccctcatttccatgacgaacgttgatagagtcggcttttgatggcccgagctcaaataggaagctcagttgccgattggtggaaattccccgtccggcaccctttttgggtccaaggtggagacacgtgggatgagcccgcgctaatccggaagcggtaataggacgtggggttgcctgttagtatacaggcctggtttatacccctcttctggtttatatagctgtctcacaccactgcgctcttggttgctctttgtacactcaatttgttaagcttgtactagttaggtatcaggaacagaaccagaatggcgccaacacccctccgccccggagtttacgctccgacaatgaccttcttcgacccctctactgaagacctcgacgtgcccaccattcgaaaacacgccgtacgcctcgcgaaggccggactcgttggccttgtcgccatgggctcaaacggcgaagctgttcatctcacactcgaggaaaagcagaccgtcatccgcgagaccaggtccgccctcgatgaggccaacttcacgaacgtccccgttatcgcaggtgcatctgagaacagcatccgaggcacgattcaattgacgaaagaccttgccgctgctggcgcagagtacgcgcttattgtcccgccaagctactaccgctacgcgacggggaacgacgagacgctgtatgagtacttcacatccgttgcggatgggtcgcccattcctcttattctgtataactaccccggagccgtcgcgggaattgatatggactcagaccttatcattcgcatctcccagcacccgaacattgtagggacgaagttcacctgtgcgaacacaggaaagttgacccgtgttgcgagggcgttgcatgctatcaaacctgagtcaccgcttgcgccgaccaagtccccggtgcctgtgaccaagagggctgcgaaccacccctatgtggcatttggaggtattgccgacttcacgttgcagacgttggcgtctggtggatcagccatcctggccggtggtgccaatgttatccctaagttgtgcgtcaaggtgtttacactctggagcgagggaaagtataacaaaggcgatggaggtgcagagtctccttagccaggcggactgggtgctgaccaaggctgccattccgggtacgaagagtgcgattcagtcttactatggatacggcgggtatcctcgtcgaccactggcacggcttagtgatgcgcaggtcgaggctgttgcagctgggattaaggaagctatggacgtggagcgtacattgcccgatgttgcttaaatgataaaatgattattcttctttcttcaaattgatcctgaaaattaattctgcagataagccgtaatccgtagcagatgacctgttggagtagattagtgcaattgggcgcatcaacagctgttgagagatcggcgtgaactccgaggaatgccccggattccggctccaccccgcaccgcgcattgcaggccgttgtctatggtggataaagtggaccgagtcggggttgaattcatccacgaatcaaaggggtgtgaagaatgccagtctagacagaggggtatgtgtctttgcaaaggcgtttgcagaaccgtcaagggagaacaattacattcccttggagtcttgggtagccacatttcaatgagtacaggcactggaagtcatgcattgactggtccgaatgtcaattctgcgaacagtatagcttcgaatagatacggtgcagcagattgagcgaacgagggtcgagaggaccacagtgcgggcaggtattgtcctggataatgtcacgatggtaacgaggtgtcattcattgcacccccactcgcaggcctgaaagtgtgtttgaagtgccaccgagcctgtgactggaggcagagataaatacccgtcggtgcccgaggaggatcgtcacccgcttcaaccacattattctacccagattttcagcaaaattcgcgaccaacatgccgtatcctgaagaagctgaaggattccaggtggacagtccggaaacctataccgatttcaagaagcgctttgtatgtcgaaaatcgtcaatgaccggagacaatcagctaataattgtccatgcagttcaaactgaaaccgttcggcgactatggtatgcgccgatgggcgcctncttttgtatcaaactgaactgacaagnacaatgtcgacatcaagatagagcgtgcggcgttgtggaagcatgtgcacacttatagcggaaggtttccccgtttcaggacccatgcaagtggattatagccataggtgtggggttccaaaattcccctttggcggacacgtaagcttcccaatgacgaacgcatgttacaggcaaattatggccgcnggcgttgtccagtacttttaaaaggcagtgttgttgccccactatttggggggaaatgaaaagaaaaatttgcgggttaatattcggcatggcccttttttcgggtattttctccctcttattgt

SEQ ID NO: 11692 - DNA, 130 bp, Emericella nidulans
aaacgcacgcaaggagcagaagacccacgacgaatagccaagagaacgaaaggagcgggggcaggcgaggcgacgcgcaaggcggatacgccttcacgcaggaaagacaagacgcccggaccaccacccc

SEQ ID NO: 11693 - DNA, 473 bp, Emericella nidulans
acaatcggcactcggatattagcgaacaccgcgaacatcgagtcacttgcagggttcatagctctatcccggccggctcggattccatgcagagacaagagcagcgactgcgacttctgcttttatagtgaggagggacgttgaggccgctgacgaggtcttctcaccttcaatgcaaattgaggcaaaggaatgccatcgtcgcgaagtagaaagcgggggatgatccccttgataagtggaacttaaacatcgtacagatcaccagtagatcatcgagtcccatcacctgacgcatcatccgtgctgcgtcctcagtacgaatggtggaatactaactggggttggagtatctcgtcccctgtagttgcagtaattgggccgggtgtccagggtattccgcagttcacgtgcccggtcaactcagaaatatcaacataatacgcagcatccccagatatcctgtacgaata

SEQ ID NO: 11694 - DNA, 462 bp, Emericella nidulans
tatatatatatcacccctttgagaaaaaaaaaataagacttattatattagtcatgatcttgataataagtcatatcctgccagtaactttataaatatagtacaaccctttactaagtattatataacacaaaagttctactttgtctggatagatcagcctaagaatagattcttctttactatcagtattcttcttataatattctatacttagtttagattttttgggccttgttaggacttttctaataattttatagactaatatgatatgatctacaagtaagctgtgcaccctgctcaatcttttatactaaagttatttaaactgttattctaactctaaaaattacttaactatatcaaaatttggctaagaagggaggataatacttgtaattttgagctttagaaaaaaaacaacataaaatacctagtaattatctagcagtagtagtt

SEQ ID NO: 11695 - DNA, 3295 bp, Emericella nidulans
ggataactcgagatgcaataagtcttaatggttggctgctgattagcctgattattttggtctctgagaggaccttcactcgtccttcgacttgataacccagtcgccgaatcaaggggccagaagcaagttgtcttaagttaccaccagatctaacaaacaaaggaaatagtgacattggttcttcacacaggttttgacgggaaataaatatctaagatacagatacaggtctctggagaaacatctaacaaaacagaaggccatcggcaggaaagaccaagtgaaagatacatgaacgacatgggtaacgagactgaccgctcgtattaatcacactcgctattcgtcgctagatccctcacttttcatactttatacagtccatttgtaaccttctagcgccggggaacgggagggctgtacacgatctttcgtgtcttgatgggagaccacttgtagcgcttgacccagacgctaagagcgaaaagaccggtaaggagagtgatggccttgaatcccatcttcttgcggtcgtccatctcgggctcggcagcccagttgaggaactcaacaacgtccttggccatctgggaagtggtagcgggggtgccatcctcgtattcaacaacaccatcaaaaaggacacgagccatggcaatagctgggaaatggtcagctaaatttcgatgctagttttgatgtaaaagaatcgtaccagtgccggggaagtaggggttgaagttcatgccctcctgaacggtagcaccagctggaggctcatcagggtaaccagtcagcagactgaagatgtagttgcagccaccgtgacgacccttgacaatcaagctgaggtctgggggcaaagcaccaccgttcgcaaagcgagcagcctcctcgttcttgtaaggaggggggatgtagtcggacagctttccggggcgcttctcgatctcaccctggtcgttgggctcggtgtcgtactcgttctcttcggcaaaagccttcatttcatcgacggtgtgtgtaacaccgacgaatgaacgccagggaacgcgggtgagggagtggcagctggcgcagacttcacggtagacctggaaaccacggcggagactggggacaaatagtgagttagctgggcgtcatcggcccgaagctagaggctcaattgaactcacgcggcgtgatcaaaggtcttgttccacttggcgtgctcccaagggtactgagtagcgtgcaaccttgaaagcaacatgtcagctgtctgatcaacttgacctcaggatatggtccggtcgggagaacggaaacagccgaggcggtgccattccataacgtagtcaatcgactcacccctcctcagcaggtgtcatcgcaaaggcttcctttccataaagatacgtagcggatccgagggcgatggcggtagcgaccgatgcagtgagtgtgaggtggaagggggagctggcggcttcggcaccggcagccgaggaagacgcacgctggtcaaaatattagtgattaggcattgcaaatgtagccatcacaatgccatgagcgattgttcccatccattggggccaatgaaggcggaggccggggtgatgcgtaccgaggaggtcttgctcaaagactgacgggcgaggccccggaagggcacgctgcgcaggacagtacgtgccagcatactgacgatatgaagaaccctccgatcaaaagataaacagaaaggtacgataaccgcgtgcggggagggaagggagggggcgtggagggtgagcgcacaggaatggttgttgaagtcgagagttcgaagtcgtcaatttctcgctgacttgctgccagtggtaaagcgtctgctttgattggctgcttctgcgctaaactgcttcgggaattaccggaaaagcgagtcttatatgaaaaacaatcgcatgacaccagaattcaagtaactactgattctacgatattatcatccttacaacattgcaatatccaatttaatttcttttcattgagaagcagtatacgttccgctgatgttgacggcaaagttgctcctgccgtttgtttccgactagccttgaacccgtagtcctaaaaagcatcaccaaataaccagataccaggtctaggagaccttctgaaacgacactttaagttgcatctagattcaaatgtggcaaataaactatatgcgaataaagataataattgctctgtttaattcagaagagctttgtaatggttgtatgtcacggcttccgctcaaaatatatagtgggttcacggacatagattgtagctggatacaccaacctagcggtccttcggcttccagatcttttcgtaatgatatacctattgacctggatagataaattactcctagctacgtaaattaagcactgtaaggatattatgttgatgtagataatatgggtcggaaggggaaagtgccccgccgatccagccgtagttttaggtgcactcagcctacatacgccattatctgggtctcaagcctgagcttccatttgatgcatggcgtacgatgtcgatgtccccttcatggataatgcaatgaatttctatcctacagcttaatactcgccttcctcgcaagtcattccttaccgcaattcgcagattatttggagaagttgtcgggtccctgaagagctccaacatccccaaacaaacaatatcggctgccttcctcccaatgcaatccttgaaaagacattatgtcaaaagcgaggaatggcccacgcacaggcacgaagcctcggcgcgatgtgctggcatcgctcaaaatggcctctatggaggagatctccagagcctcccttcctgcaggtaggtaaagcaagagccaacagaacatgtggagtgactgacattgaaatagagataatggcttcgatcctcgatcatctctcccccatcgaccttattcgagcggcccgggcgtcgaagctcctgcgcgaaatggcgtacgatgattcgcgatgggttcaaaggctcaaaaggataggttgctgggatgaagcggaggctcgcaagaatgcggaggagaaatttgggacaattgcgaacagagcaagtgttgagcttcaagattcaactgtcgcccagcaagtgcctagccagccaaagatcgatgtgaccccaatatcagatggctttgatcagatcaacctctccgcgtctgcagcgaacgatgtcgtggacttggataccgaccccgtcttgggagcactgaaactagctagatccacagaggaga

SEQ ID NO: 11696 - DNA, 2796 bp, Emericella nidulans
ccgtccttgggtattgagatcctccatgcatatgggcgcaacgtatgtttcaaaagctacctctttcatgaagtcacaaaagttcctgggtatttccggattcttctcccgccttaaggataagggtactctcgcaaaagaagcctggacaaccatctcgactgtcatcgacgcacaattgaccatggaggagatggctaaactcgaagaaaagggcggcgagaattggacggatgagatgagggccgagtattccgtaaaggtaacgggcaagcttctcgcggccgcctggcgtggtagcaaactcgagattcaaagcgtccttcgcgacgtctgtgataaggtgttgggcgacaagaagatcaagttggagaagcgcatcgagcgggctcatgccatgataattgccggcaatatctattctaaggtatgagccatctctttcctaggctggtattcttcatactgattctcttcaggccgagcgtgaccccgacgacgagggagattacatggccttcgagcagctcatggctgatgcaacggcaaagaaagcgaaggacgagaagaagaaaaagaagaagcacggtcactctgagctggaagcctccagcccgaaggccgcgtcgtagttgctcgtcatctcggaacctaccctctccccttttcgcccagtctctccccgcttaattattccccgtgtgccttggataaatatgccggatgtatctttcgtcgtagcgaattgttattctctcccgagagcgctctcttggtacgaacactcgaggtatgttaatggtaccgacacctgtgactggtatatagacggaaagtatatattttcgctattgccagcccggtgtgccgtgcacttattccacacagcgcatagcgttccacccttggctcgaagtttgcgtgaagcgtggactcgaatataagttttactttttgactatttctctcaaattccgcgatgcccataaccgggcctagttatgatgagctcagatttgaaggcagtcaattgatgttgtcaaggaagcaataacattggactatttattcccgtattactagatgctgaagtgatagctgagctcgtaaggtatagatggtctcgtattattcattattgcgcttgggtatctcgcagagtccagagacaggtgatcagtcgcataaatctatcgctcgcataaacataacaagggataattgtgattggaggacaatgttaaccaaaagcgccagtacagtaacaggtatatagatatcaagcaagcacaactcgagggttgagaagctgtcggcgcgtatataggtcgcgtctctcaaataggtcctgcgaatattagagatttcggcagagtccctggaagcgcagctcctgaacgaggaagatattgctatatagggtatcgctaacaaacgaaaggagaacgagtggcatttaatcatgtcgatagcgagtcctcgccgggaggatccatattaggaatttcggattcggacgagacggtggctaggagtccgcggccagtttctccatcatcgttcaactcatcaggactaaggactcgcccgcccagttggatatcattaaccagcacgttgtattcgagtgccttctgtgcttctttgatgagttcttctgtccatccgagacatcttttgaggctttgattcattttctgactgtctgccagaagctcttggtgcttggccaggtcaatgagaaatcgtttctcatccttgtttctgtgcttcgagtcgtcgtcggctactgagtcaggtcctagttcactttcatcttgcaaggattcttcgtcacttaattcagacagttcgtcttgtgattgaccagatgagagatcagtcccgccttcgttaatctcgctcgggattgatagagtatccgacaccgagcgagaaggagccatggataaacggcccgagcgacttagtcgtcggaatcttcgcagttctgcattctgtttccgcatttcgcgctcaagcgtccggttgatggcaagaagagacgagttgctgatttcaagatccaaaatcttacgctctacccgcgcgctgaggactgggccgctgctcactccatgctctgacttgactgggctctgcaacccgtcgttatggctatcgactgtatttgtagatttattgctgaaaatgcgtggcctgagagggacggaatcggaattatagtttacttcaacctgcggatccgacgtagatacaatgatgggactgggtcgtagagcctcgccgcaagtctcacgaacaggagtaccgcgcgccgtgtcaaggcttgaagatttcgtatggcttattattggcacggtccgaacggtgctgaatgtgggactgtggactggcgaatgaatctcaggcgagtcatcaagatgcggtgcgccaagcgaggaaataccatcggagaatcgaggagattctgcgctgggttggggtgacttaagccgcggagaagctgtcggccttgccacgactgcaggtcgcgacaatcctgacgaccgccgtctggagctctcttcaaccggaggctgattttcttcttgaccattcgcatatacaaaagtagcaggcgaagacactttcccagaaacttttgaccgtgtatctgcctcggaggagctcgaaaccgaacgtgcatcactagcgtggaagaacatgggagatgcaggcgaaaattccgtgtaggagtgagggcgagaagtggagtacaaatcggcgggcaaggtctttgctaatgcagtccgt

SEQ ID NO: 11697 - DNA, 262 bp, Emericella nidulans
tctgttaagtatggatatagtctagtcagcttacggcctctaccgcgtctcatcgtagagcatctcttagggaatcttttcgtatcaaccaattgcccctacctcccaaggtccattaccttgctacagcacagacttccttcgttcacttgccaactcccaagcgtctcgcgtgctccgctcagattcagtactgaacgtagtttactacgtcctgtcctaccgcgacttccgcccctttctattccctctcgggagccga

SEQ ID NO: 11698 - DNA, 169 bp, Emericella nidulans
tagcggcttctgctgtgaccgttccatgggactccgtagttcagggctgccgatagactgtgactatgaccatgtcctccagtacttcatctagtcgattagccccaaacatttctaatttgtcttagaagccgtacagtaccagcatctacaccaggacggtggcctt

SEQ ID NO: 11699 - DNA, 5248 bp, Emericella nidulans
attcgaagcaaagcggcagtatgacactggtattataaagagctggaacacctactctacgataggttcttaataaaacttgattccacacaggtgttataggccccggaattgagaccgccaaagcccagctcgggccggatgtcgagtcaaagaacttacatataattgaccgcatcaatgtcgacttcgttctggaaatgtgcattgtgccgaagcttaccgagttaactcgaacgcggatatctggccatctccctgagcttcacgcgtcgatgtcggacacgaaatacaaggggctgatgaaactcatcgatattgccattccgcggttcgacgacgaggcgcaggatacaaatacttccaaaaataaggaaggaacgtcgataactcacactcgagctaggtcatcctctttccaaccaatcggccaaagagagcttcctgttgtggacgaagagtcggatatagaagacagtgaccagatcagtaaaagtgtggacaaactacctgatattcaccgtcgagactttgagttcaagttcactgtcggccgccttcgcggctccttgttccggtccgattcgactgaccccttccgcgaacagctgttggttgagcttgttgctgagggctttgcattagacttctatatgcgaccttttgacatggtagccgaagtgattcttaagtctctcagtgtggatgactacatagaggcgaacccggttcctgaatttaaaaagatcatctcatccacgggtttcgatgcggatgagaacaaggacctgttctatttgagatttgttcgagtgaagcctgagtctccagaattccactcaacgtatgagggagtggcgatgaaccttgatatctctgtatcaaccatcaaccttgttgtcacgagaaaaacgctcctaacactgttggacttcatccttctcacatttacaaacccacagcaaccgaatcaagatactcaggcagcactcactattgaggataccgagtctgccgaacaacaaccgcagcaagaggggaagatccgcatcaaagccgacttgaagagtattgctttaatcctgaataatgatggtgtcagacttgctacactcagtcttcataccgccgatgtgggaattttccttgttggccggaccatgctcatacagtctcgtatcggaagcttgacattgatagatgatgtcaatactggcgcaaagaagagttcggacctcagaaggctcctaacaattgaaggcgataattttgccgacttcaaatacgaaacattcgaccctgaggctcccgagtacccaggctatgactcggaggttttcctaagatcgggatcaataaagatcaatttcctcgaggagccttaccgaaagattatcaacttcctcgtcaagttcggcaagatgcaagccatcttcaacgctgcccggcgggccgcagccaaccaagccaatcaattacaggagaatgcctctaggatgcgctttgatgttgtagttatgaccccaattctcgtatttcctggtgctatgagtgaggaccgaccctacgacacggtgactgctcacctcggtgagatttatgctaaaaacacctttgtgcctcttgacgaagagcaacctgacagtcccgctgtgaatctgatatccacagggatccgcaatattcgactgacatccagattccactatgcagggggtgctgtagaggagctcgaaatgatccaaaaagccaatcttgacttcagcatatgctaccttgagcatcagcctggcaatccacgtcctgatatggaaatcgagggaacaatgtcacctattaacctacgagtctcacagaagcaactcaagttccttctagatataaccaggactgcgcctaatgccttcgtaacagattcggagcagcaggagttagaggccaaggaagctctcccttccctcaccgattctggaaaggagacagagtccagtttggtccaaagcacaaatcaacacaatgtggcgactacggaccccaatggtaaaggggagaactgggtgcgacttgacatgattttcaaggcagatagtgtcggtcttgagcttatcctcggaaaagacgacgcgcctattggtagtctcgacgatgccagtctatctaagttctcgctcaatgacacccaggtcaaattgcgcatgctaatagacggctcactggaatctgaacttttaatccattcgttttctattcgtgacagtcgaaagcaggaaacgaacaaattcagaaagatcatgtcgctaatcaacaatgatgtcaagcagcaattcatggctagcgtctctatctcacccggccctgcaaaacatctaatcgccatgttgacaattgacagcccccggattatactggccctggactacttgtctgccctacaatcattcgccaattctgtcttttctgcggatgagccccaggaggatgaggaagatatcgaatctcctgaagaagatgaacccagatctagcatggcggagagcactgacggatccatacgctctccctcgcttgaagaagaacctcaggcaccaagccaaatgacggtgtcgttcagggtgagccttgttgatgctcagatcatcaccatagccaaccctgcaattcctcatactgaggctatagtcctcggggctaaggaagtccttttctcaaagcaaaatgtttcgactttgcacgtaagcaaaatcggaatgttcctttgtcgcatggacaagttcgagacaagcagacttcggattctagatgacttcacacttgagttatcaatggacagtcgctcccaggacagaggcgcatcactaacgtctatcgatatccatgtcgagccgcttgttttgcgcctctcacttcgagacatcttgatggcaatacagattgtcaacaaggcctcggaaatgagggccgcgagaatattaccggctgaaacaggcgagaccaaggcgttaccagagagcacgggcacattcggttcgagaacaagaaggaaatcatcagtcggcaagcaagcatcagcatcggccacgaaaagatctcaccgacgctctattggtgcagtgaatgcgattgatcgcaagcccgtcaacaagcggtccgtggtcctgcaacgagaggagcttaaagctcaggttgacggggtcagggtcatcctcattggtgatttgcacgatcttccattgttggattggagcgttaagaagttcaacgttgatgcccgcgattggtcatccactctcactgcagataccagtttcgacacatttgtcaacgtgtacaacttctccaagtcagcctgggaaccccttatcgagccctggcaactgggaattcacatggccaaggaagttaaccctgatgtcttctcggttgacgtatactcacataaaacaatggagctgacagttacatctgctacaattgacctcgcgtccaagtctttccaattcttctacaccgatgaggacgtactctcaaagccgagaggagctgatgcaccttatcggatccgcaattacactggctttgacctccatgtttgggctgatgttgctgaaggagaggatggaccggccgctaagcttgccgacggtgaggaatatccttggcggtttgaagactcaacttccatgcgtgaaaccctcgcaccagaaggccaagcgggtcttgttggcgtgaaactggagggcagcgggtttgacagcgtgactcgtattcccgttgtacgagaaggcgagttcttgtacaatcttaagcccaaaaaggacactgtactccaccgactcctagtcgaggtcaagctgggcccagataatgtgaagtacatcacaatccgttcgccacttctggttgagaacaacactcaaatacctgtggaacttggagttttcaatccacaagatggccatctcctgaagatcgagaaaattcttcctggcgatgctcgtcctgctcccgttggagccgcgttcatgcattctatcgtcattcgacccgaccagggcttcggttacgattggtcacacgaacaactgtattggaaagaccttatgcgccgaccgactcgtaccatcaaatgcttgagcgaaggcgcgcaacaatctcctccattctattttcagaccaacgctacattcaatgcgagggatcctcttacgaagatctatccgtacatgcgcatccggatctttgcacctgttgaaattcagaatctcctaccgtacgacttcaagtaccgtatctatgacaagaacacgaggaaagactggacgaatttcttgcgcaagggcggcgttagcccggtccacgtcgttgaattagcacacctactattactcagcgttgaccttgaggatacggtatttaaacaaagtgacttctccattatcaacggaaatgcgcacgattttagaagggagcataccctatccttaaaggatgagcggggccttccattgaaactgaagctacattacttcaatgtacctgacagtggaggtgcctttagagtgtcggtgtacagtccatatctcatcctgaacaggacaggtcttacgatggaggtacaaagcaaggcctttttgcaatcagctcgctccgcagcgggacaagggttgagggccgaagctggctccaggcaaaggcgggttcgtccgtacatgtactcttatgcgacagaggaccagaagaatcggtctataataaggataggcgattcttcatggagcaaaccgcaaagtttcgaagccattggaagcacttttgaggttgtccttcctgacagagatggcagatcggagtaccatgcgggagtgtcggtcgcagagggtgagggcaaatacaagcttaccaagattgtcacaattgcacctcgtttcgtcttgaaaaacaaactggaggaagacattctggtcagagagccgggttcttcgaatgttacagacatcaaaggcggcgatctagtacctctacacttcctacgccaggccggcgaaaagcagctctgcctctgtttccctggtgtgaacaatcaatggtcgtccccgtttaatatcgcggacgttgggacggtatacgtcaagctggccaggcagaaccagcgacagcggctgataaagatcgatgtcatcatggaagctgccaccttattcgttcacctaagcctcgaacaccgtaactggccttttttcatgcgcat

SEQ ID NO: 11700 - DNA, 570 bp, Emericella nidulans
tgaaaaccctctggacgttactccatgtatacccgctagaccatatatgtatttacacctttgaatgaacgcactttgtgcttcagcggcgcatgactgccaactctcgctgacctgagcggactatgggacacattctgcccaccggaaacacggagggtgaggtattgcaggaatggatgcagaaaccggactaacgcgagccttctgggtgtggcacgtccagacttcaataattacttgtgtgatggcatgatgacatggccacactgggtggagaaaggcatccaggcctcctgtccgagcatgctattccattctgcgcctcattatatagactcccacttcactattcagctgagcttgaggcacgatggatcgactcttgcacgtagcacgcacttgacatttttgatgtaggctggaaatcccgatcttctcgaaaggtaagggcctgttcttgcatgtcgtaagcctcatgtaaagctctttggaggacttaatgctagcacccgatcccgaatctggcgcacttgtggctttttgccacttggaaagccgaaatacttg

SEQ ID NO: 11701 - DNA, 631 bp, Emericella nidulans
  unsure (1)..(631): unsure at all n locations
atcatttcaatactactcctattctgcttattctcttctcttctatttatattgtcgtggcaataatgaatgttanctctctncctctccctcttccctatcccccccgagggcagtgagcaagtgcgaaacctcaagacgatttccaccaacaaaacatgccagctccaatgatctaacctgccaggatcagcggcccaatggcgggcaatagcagcatgggattgcacatccagcgccaataatagcagctgacttcactcctgtgttataggttgtgattgaagcgcgccgatattcataggcgggagtccgcgaaatgggtgttccgacggcagaagctctcactgagggtaccctggtatatgatctgacctacatgatggcaactacctacaattatcatccatgcaaagcttcgactatcttacccacactaccataggccatcagctaagaaccttacatgctgtaagctatattagccactgaatgccaaatctgccactcacctaatgccgaccacgtgataagcagatatttaggccctatgaatggtatatgcacaagatcaagagacttgacaggtgctgtacaagaaacgaggatccttttatatctgaatctttag

SEQ ID NO: 11702 - DNA, 471 bp, Emericella nidulans
gactgataagaaccaccacaggagctcacacaacaccagctcacgaagcaacccaaaggcattttttcaatataaccacacccacctgctaccaaaaccagtacagcagccaaaggcgaacttatcgaggacgctgctagaaccgtgcacccagacaagggactaaacataagcgccaaagaagaactaaggacaagcgcacaaccctcggacgcaagaaaagagcggatgtaggatgtcaagaacccagacagacaagcacgatatagaatgccaaaataacactgaactgaccaagcacaactacctgcccgcccctgatggtcccatccgcgtaagacgaggctaagggcccatagccgcgaacaaaaaccagacggaaacaatgacaccaacggaacaccagagacaaaacttaggatggaaccccaaaggtaagacccacacagtgaaacccccaataagaaaaag

SEQ ID NO: 11703 - DNA, 3070 bp, Emericella nidulans
cttatcgcgcgcaattaaccctcactaaagggatcagccttgagaagtcgtctgccatgttaatcaggtcaacagcaccgactagtgtattgttgagttgcatgatgacctgcttgtccgtaacgcgcgtcactctggtaggtagaaccatgccaacagacagatcatcaaatgtgaggctttcagaccgttctctggctgagagatcaatgtggcccttctcagcgtcgaccccagtgacgcggaacttcaatgcacaaccgattggatattgcttttctatatctgcgagaagagatatatcgtccgatgcgtcgatgaagcgcaaccgtcctcgaacattaggggacagactgacccagaagaaatcattgctaacattgttgacaaaaccgaatgatgatgaaccagcttgcacctggtcaatggttaacggcgtagcgttgtctgctttgacgaacttaggcttcatggaaagctcatacacgttgaacttgcccgtgcggtgactgataggaagatatgtgtaactgcgagcatcgtgcagacccaacacctttgcggttatgacctggccgggacgaaagtgctttaatggctgtttcttgtcactgatatcttcccaactgtcaaacacttcggagacatcaatacggccctggacgttgtcggcaagttttacattgatttgggtacccttaactgaattaatcttgcacttcagaactcgaccgacagtgatatctgacttggccttcagggtctcgtcgactggattggcaagggattcatcaccggcggctgcagtttcctttgcagatttcttcgtagactccttcttagggccagcatgtgtcgcttccgcaggatccatgctcaggatgaagcgccggaaatcggtgtcgagggagtgcacagtcgcagagaccacctggaagttagcttttccgaactcagatttattcgaatcctccgagccgacaagtcgtctgggaacaagaccaataagtcctccaaggaattgcacaaacagtccagtaggcgtaatgttcctgataaaaccagtcacttcggcgccctctcggagatcttcgaatgtgctcggcatattcccttctttggtagccttcttgagacttgctcgattggtgacgtgaatgaggcgatgagcacggtggacgtcgaggactacgagctcgttgagtttctggcccactcggattttggaaagagttgaggagcgtttagaagctgatccatcggctacctgacctacacccagccgagccacaagaccgccgagatcctctaacctcagaagaacgtagtcgtcagacttctcgaagactgtacctgttacggactgcccaggctgaatagtcttaaaggccgttctgtaactatcggcaagcaatgactgatctctgcaggacactgagagtttgccctgagatgcatcaacgttcaaagcatgaacattaacaacttgaccaagtttgaagtgttgagaaggatccttgatgtaagcttcactcatttctgatacggaaagccagccacgaacgttgccgtagaactgaaccacagcaccatttggcaaaatattgataatagttcctggggattgagctccaggaaggatgtctctgtagtctttccagacggcagcttcagtattcaataaactcttctttagagtcaagcggacttcgcgcttctcaagattaaccgacaagactctcgcggtgatcgataacccttcgcggaatttcttttcaggaaattgcaaccgtgtatccgcaaagtgcaccgagggaatgaatcctgtaatgccatcggtcaaggaaacaatcaggccagtaacgcctgattctccaaccagaactttggtgatggttaccttgaccactgcaccaagggtgacatcctctaggcgaaggaaaggctggttaatgacttttctctcgaaagacaatgagtagaggttatcgatggcgctatagccgacaactcttgcctcgtgggtcgtgccgactttaaaaggtccatggtcagaagagattgtttccacttgcccatccgcaagtctcgaaacatggacgaagcccatatgcttggttgacccgattttgacgtaaacaccaagacctggatcgacattcactattgtggcctcgggtatcacggccgagatggcaggcgcatcatcggaggaattcggcccatgaccttcagccgagaatttctgaacatgatcaagcatcgagaaaccaatcttgtagggttctgagccagggaatgtgcacgaaatacggcccttgatcttagcaccattatgatacttcttcgtcagatcagtcttgcctgtggcgccaccagagtgcactaagtcgacagtggtgtctagcatgcccataatctttccgatcattccagttgatgatacatccgtcaggaggatctctgctgcaacaccgggaacgaaggaattgatagtaggtgctacactaaggaaatgcgacttcttgatcgatccggaagactggaggttggcagataacttgatcacgttgccattggcgttttggcctgtgaccatgcacagaaagacagaaccttccttaatcgtagaatagtccgtcctaggatcgatttctttggacgacatgaaacctctgacatcggtgccttcaatgcctagatccatgaccaatccgtggtcttctacactgacaacggatgcttggacggcagcgttgacaaccaaatcagttttctgaaggcctgtgttcgcggaccgtggatcgatcgaaagctcaatacgcttcttgctcttcgaactggcgtcggccgacttgttcccgacagatacgacgtaggtccgtagatattgaccaaggtagaagtagtcgtgcaaatcaaattcttcctcatccgagtcttcgtcttcctctagcatcttctcaatcttactctcgagcgtctttgacacggacgttagagggacataacctgtaaggttgttcgggagcgagattccaatgttatgagcatttatacttgaaacttg

SEQ ID NO: 11704 - DNA, 2240 bp, Emericella nidulans
cttcgacgatgccgccgtctataatggaaaacacatcgatctgcgcccgaaaatcaccgacgtcatcaacggtctcaaggacacatccgaattcaagagcctaattaccctcccccggttccctgaccacccagtcgacgtgacaagcctgccgaaaacgcagcccctagcacagctcttagccaccgcgccctccgacaagctggagtttgttcgcgtagggttccgcgaccccttcctggtagcgttcagctcaggaaccacgggaaaaccaaagccaatagtccacggcgtcggcgggtaccttctcaactcaaacaaagaatcccgtttacatcgcagccatggccccaactctgtaacccttcagttcacaactacaggttggatcatgtacatgtccgccatctcgggtctgttattcggcggccacaccatcctctacgacgggagcccctttttccccaatccaaaaatcctgatacgtctcttgggaaggtacagggtcactcacttcggcacatcccctcgatacctacacgagctacgcaagaacggcatctccccgcgtaccgaagaagaccttcgctccctcgtcggcgtcacaagcacagggatggtccttccggattccctagccgaatggttctatgacgccggttttccgcctcacgtccaactcgctaatatttcaggcggcacagatttagccgcttgctttgggctagaaaatccaattacaccgctctacctcggtggatgccagggtctcccgctgggcatccctgttgaagtttatgatcaagcagatgaaggcgcgtcaggtgtcaaaggtacgcctgttcctgatggtatccctggagagcttgtagccacggcagcgtttccaaccatgcctgtcaagttcctcggcgaggacggggaaaagaagtattttgattcgtattttgcgaggtttgacagtacgttacccctacagcccacactaaccctaagtttcagtaccctccaggaactccttgccttctgtcaaaaactaatgtaaaccagacgtctggacccatggcgacttcatctccatccatccgatcacaaagcaaatcttctttctcggccgctctgatggcgtgctaaacccctctggaatccggttcggttccgccgaaatctataacgtgattgagacgcagttcgccaatgagatcgtggactcattagctgttggacagcgacggccccaagactctgatgagtctgtgattctgttcttgcttatgaagccggggtttaaggtcaccaaagcattgatcgaacgagttaaggaggctatcaggaaggctctgagtgcgaggcatgtgccgaaatatgtgtttgagacacctgagatcccggtaggttatgctgttcccttagccttttcattgtctcttgaacaaagtagggacataaaacaggctaatgagaccctatatcttgcagacgactgtgaatctcaaaaaggttgagttgcctgtgaaacaaatagtttctgggaagaagataaagccttcggggacgctactaaatccggagagcttggagtactattaccagtttgcggatgtggagaggttggctgaaagtgagctgaagagtaagctgtgaatatatagcagtgtcggctagttagatgtatagtagaaaatgcatcggaaagaagtgctcacgccacctctagtatattattcctgttgaagaatttatatttgaggatattgatagcattgagatcatcaattcgacctccagtgcagaagggtcttgaataacgtttcacctgcaatttcttcaacaaccgatccaggtctatcattgaaacgggtaacgataatacaaggtgacttgaaactcatggacaagaaaaaaaaaatatgccccaagtcagcaaaaaaaatatgcgccaactctatacgcctagcccatagtgaaagaaaagaaatagccctagtaaaactgcgggaagttgcacctgcacgtgcgacacctatttattgtgaactaggaagttgcggaacgagtcccagtgatctgagtcggaatatctaggcgaaaagttagcagcgtggccctttctgagatagagtgaaagacacatacatgtaaaccatactactccgcaaactagacattaagacttcgggatgccagcggaagagatacatgacagatgcccagctcagcgacgcaaagacagcccaggc

SEQ ID NO: 11705 - DNA, 129 bp, Emericella nidulans
tctacctggaccagatgcgagccagggtattctgacaacctcagtgatcctaatcggtcatcagacagttcgacattcagtcactcctgcatcaaaacgtcttctaggcaaagaagctctaactccaat

SEQ ID NO: 11706 - DNA, 2568 bp, Emericella nidulans
gaaccgtttttaaccagacagccacaaccgccaaaatgggtcgcgtcaggactaaggtgagttgtttttctgttgcaattgaagctgagggagtcgaaatcttattaacaacaattttttctcgcaaaaaatagaccgtcaagcgctccgccaaggtcgtcattgagcgttactaccccaagctcacgctcgacttcgagaccaacaagcgtgtctgcgatgagatcgctatcatcccctccaagcgtcttcgcaacaaggttagtgcacgaataaatcacggcttggaagaagcgatcgataaggagacgaaaaggctaaccctgggaattgcgtttagatcgctggttacaccacccacctcatgaagcgtatccagcgtggccctgtccgcggtatctccttcaagctacaggaggaggagcgtgagcgtaaggaccagtacgttcctgagatctctgcgctcgacgtctcccagaccgagtccggtcagctcgatgtcgactccgacaccaaggatctcctcaagagcctcggcgtaagttcactcttaaggccactattatagatgatgctgggtcatggctaatttggtactcgtagttcgacaacctcaaggtcaacgttgttgctgttacccagcagcagcccgagcgccctcgccgcttccgctcttagaggacaatcggaaaaaaagtttaatgatcttatgcggctgatctatggtctgtgactgtccggtcgtgtttttgttaccctctggctggcgtgccggacttcggtaattttagaaacagcatatgagaaatggaacatggttgctgctgagaaaggtgtcgccgattccttcgggatgacgcttgatcgccaatatatttctcgtgtctttgagtcttctacggaagatgaagtagctgctagatgtgagggaagtgttatgctgctagccagctaggctctcctgattcgatggaccctgagaatcattcgcaggaaaggtatgtatgctgtgcctgtataacattgggtatcgatatgtagaacgcctcgaaaaagtaaagataatttgcccatacataaaatcaagattcatgcggcatataaccttcaatggagcctcccctttcgtctccaggccgcatttccggcgcagtggcctgtgttacgttcgccttctcctgaatgtggatatccaccctgccgttttggagggcaggattcaggtcgcctcgttccatagcgagctcgagcgaccgagtatcgtccctgactgatagcttcgagatgtcttctgctactgcattgggttccggcgttgtgtccatgtgaaggttgtccaatcgaccaaggacctctttgacgctccctgaatcccacatcgcgttcttccctttcgctgatctgccctcttcaagtaaaaggagctcttttcctcgcaggtcgtctgcccgtctctcccatacaggttcttctgcaagctgaacgcgaatatacatcgctctctcggcacattcatctgaacaccacatctcatacttttcctttggaacaatgttcatatctcgcccgcgacctccaggtccgctccccctagcgccccaggttatccgaaacgcgccccttgacttctctttgcggtgctccttcggacagagcccataaccgcagaggccttcgatgttcctctcctgtatcagattatcataatccgtaggctgaaagataatcagagaagatttgaatttatgcgtgtcctcagcggagggcgcggctggatcggccgatggagatgacggaatggtaagaagttcgaggatgcgatcgagaatgaggtcttgtgcatttttttgagcttgaatgcggtgggcatgatgtagagctattgccagatggcgaggatctgtctctggttttgagggcttctgcttaggtttcagcggcgaacgtcgagaactgctgggtcttgacttgggtgggcttgtgtttgactgtcgagcggatgacgcatgaatcgagggtagagaagtttttagaccggaattatcagaagacatgattcaaaattttttggtcatatatggagagttaaatgtgggataaagctgagagattagcttgcggttgaggtggaacaggcacgaaggaggatggtcgggccggcagaaggcgaaaccccggattcaagctgtagacttggtataagctcaatacatgacgacgaggcacaaagttcaagaccacgctctgaaaccgccagctctctctactgtgactagctttgttacaccacgttgctccctcctgcaatcgtggcagtgtccttcatttctgcctgttggctccgtcattcttagccgccgatcgtgccgttggtggagcagaagcaggcggtctttacgctttactctttcctccctccgtctctcacactccaaacctcctgccactcctctttgctactactgcccgcccctatatcattgtcgctgttgtccctcctcttggcggttttttttgcctcaaccggatcgtgtggcagccatacgtatttgctttctgtaagtaaat

SEQ ID NO: 11707 - DNA, 3875 bp, Emericella nidulans
cacactcaatcaacgccgacagacgcaagcaatgacaacgataataccttcctcgctgcatcaatagacggtactattagggtgtgggacagacggcagccatccgccatcgcccgcatcactccccgcaattctccgccttggtgcatgaacgcctgctggtccccagacgggaattacatctacgccggtcgccgcaacggtacggtagaagaatatagtcttcacaagggtctccgtgagccagaacggaccttcaagtttccgcagggaagtggacctgtgacggctctcaaggcaatgcctaatggtcggcatctcctttggtaagtagccatccataataatgaaaatggaaggacattatctaacaaaaccagcgcatcccatgatatcctccgtctatacgatcttaagcacgaacaggcaacccgccactcaaccgttcctttcctcatcattcctggtcaccgcaccgggacagtctcgcagctatatgtcgatcaagcgtgtcggttccttgtctcaactagtggtaacagagggtgggaaggtagcacgacggaagtgctgctgggatatgagattggtgttcctgttgttaggtagtcgaatctatcacatcctctattgtcctgtagttcgcctccgttgcgctcctttttgggaagtgccatatgtactatatgccttgtcttattataaatactcactaggcaggatcttcgatgttgatcttttgtttccatactcctatatctaggtagccgtagttggtgggcgagatgctgcatataatgctagtcattatctgagacttgagaatatactataaccgatatgagctatctttgaaaatccttagggttcagaatcaagattcgtatcaagccgatccatatacaaataacccgaccatatccgtatccacaggtatccaaaatcgaaacaggttgaacgccagccaaaaatcattactgaaacatgtaaaacgctcaagaaacagcaaatcaaagatcgtcaaaaccgccgtctagcgcacatcaaagtccagcccctcgcatatctcatgttgttgtgctctccaggagccaaacaatggattcttttcccatttcgcgttaccttcgttatctcgttcaaaccatacatacccaggctgcttcgcagggtcagggctagtatccgactcagccaaaacgccccaaggtccagtgacaatccgcccgaatccttccaatgccagattggggatgtgaccgcgggcttcaatgttgccattctcgatactgttcacggtaacaaggtacacgggaggaagatttgcgtctcgctccgcgcgcagaggcatagggatccacgcctcattgttgtatgattcgaccctgctcttgtcatgccgtagaggaagaggacgagagagaagcatggagtccaacttggctgagtcgagaagtagtccaggtgtctgaaggtagagcacgccgtcatactgcatgaactggatctggcctaagcgaagtagttttgtatctgtcgccgtgtagccagccgatgtagcagccgacatgtctataggtaagagccatatgtcgtatttgagactggcggctctgagaagagatagagctactgaaactggtttggaaagagtcatggtatcccaatatgatgggtacatgaagaggcggtcgtggatcgcgctttcattcgtagacagttgtttgaagaataggatggcggagcagatgttggagggatcaggatcggacaggagttgcaggtaggcatagttgccttccgctccaggtgttatcttagtctgcacttgaggcgtttcttctagttctgccccgaggtcgaaattagactgagggtcttgacttcgtttgtatacttttggatgctccggaggtcgaatgacatgctggatggttcgaacagattgctgctgaagcgcatatccagatagaaataataagaaggtaaagatcgacaccacgccggttgataaaatgacagagactgtggaatgcgtcaaaagcaccatggctacctttcgttctgagatggcggccgcatgagagtcgtattgctgttgccgctgcctgcgtaacgctcactcagaaacaactagatactaatgaggcagtaagagtagtaataatacttgagatgcagaagcagatccgatgaaagtgggttgatcaaacaaaatgcaggttcacctatacaggactcgaggacgtgtaagagagtccgtgttgacggcggctgttgtcagtacgactatcgataaggcttaggcttggcacgggaggccgcctggtggtaacgtgactacgattttcttgagctttctgtcacccttccatcgacatcatcctccgcaacgactctgaatatccccacaactatagccatggcctcccaccgtgcagatgccagcactcttctggacaaccggggctactccggacccctcgtacgcggccttaatcccgcgatgcttttcgagaaggcagtccgcgacagaatcacagagtcttactactggaaagagcaatgtttcgggttgaacgctgcaactctctgtgaccgcgcagttgagttgacttttattggcggaacttatggtgtctccgagaaggcttcgccattcctttgcctcgccttcaagcttcttcaaatcaaccctgatcgagacattatcatggagtacctgaacttcagcgaccctgaaaatgagacggacggtgcagatgaggatacaactgcggaggaccgtgcgcagcgcagcgtggtcaaacatcgcggagactttaaatacctccgcgcccttgcggccttctacgtacggttaacctgggaaccagtcgagatctacaaaacgctggaaccacttcttcttgactaccggaagttgaagcggagagtacgtgactcatttgttctgacgtacatggatcagttcgtcgatgatctgttgacgaaggatcgtatgtgtggtaccagtctatggaaattgccatcccggcagcaattggaagatctcgatctgctggaagtccggataagcccactccaggatgaactggatgagatggacagaagcgatgatgagaatgggcacgcgagtgacgctcgctcccatgggggccgatctgacgactgagcgcacttggtcggctatgggaactccgttctcacttggccatattcaagtgatgtctattttctgtccggcaattgcaatgatgtcaacaacggtgataaacacggaccttgccgggtctacccggcatgtgacaagcaaatcacagcaggagggtcgccattacacggctagactcaatatgaacggctaggccaaggcttcgtggctgcaacacgatgaaatcagccaaagctctgacgaggatccagctatccacgcgtcaggtaccatcttgtgtaacgacagcctgagtgacggcaggtataccgggatgcaggacctgggtttcgcgatattcgcaggcggtctcttcgatatttacttgctaatggccgcaacacctgaatagaaataacgcacaagcggcctccgacgtgcgcactacataaactctctacagacactggatatgaacgcttgtccctcgctaaaacccttgctggcgatgccacttttcttcccagcctttgaaccatgggctctcatccaatgtagccacctcccagttttttggagcaaggccattctcctcttgctctcgagcccaaatgtcaagattcggaagtacgagatgctcaacgtgccatgtacccttgtactgcattatggttttctttcccttccgcagaatctttgccacgaggcgccggacgcagga

SEQ ID NO: 11708 - DNA, 1476 bp, Emericella nidulans
ctccgtggctcaagtgtataacgctaagagcgcttatgaagttggttctggagttggctctgaagccgaatttgaaacatgcgtggtcgactcgggtttctattctgagatagacattgaacgagacgacaacactgatgctggagccagctgcgaagccagctgcgaaaccggtgtgcttgattcggggttcgagtcagaaagggacgtcaaagaaaacgacgatataggcgctgagatggatctggggtataacacagacgctgaaatgatcgtgatcaagtcgaacataggggaaagctcggattcaggctcagattcatgctctgactcagacatcgagtcggactcggaaatagagctagagctggagacagatctcgacagggagattcgagaaaagatcacaatgaaactatcccgtacaaagtacgcctgctcgaccctatttcgactccgaagcataatcaattttgtctacaaaggttatctatccaggcctcttgatgggaaaattaagactgtcgtcattaagcatgcagagcccttccttgctgtcaatagggcgtgggaccttcgaacggaccgctgtgtaattctctcctgtatccgtggtagatatatgactgaccccaatcaatgcagaccggcgaaggaactgtcatcagagcattaaacgagatgttcgacgtccgagttacgaacattacgcgcttcaaagggacgttcaggactatcgttcgagcgcccgaattataccatattaactacgcagcgcatattctgataatggagcacctcccagacgcgatcaacctacataaattccttacaaacatgctctgtctcagtgacgaacgcctgcattcgtggtgtttcttcattggaagtaacctaggccactggctgcacgcattccacgaatggattgcaaatgaccagcaaaagcaactcgcgaaggattttgataatagtctaaacaaagcgatggcagacctgaagttccacatcaattatgagaagcttcttgatgcggtggaaaagtatcccaaaatactgaataagaagaagacccgcaggatcttcaggaaggttgttgagatggcccgggctgaagtacgagagagaagtaagaatggtaggacagggcctatccatggtgatttctgggccgggaagtatgttgccagattagccatcatgactcaacttacttacagattatccagcatcatcctccccatcactgccctccaggatctcgagaaagatcccaagcccgatcctgacgccgaagatgacccccgtcacatcccttgcccgcaggctactctgctaattactgactgggagttcgcccagtacggccctcatgctctcgacatcggacgaatggtcgcggaactctatatgttgcaccacttccaaggtattgaggctgccagctcgatgttggaagggtttttggatggatac

SEQ ID NO: 11709 - DNA, 3211 bp, Emericella nidulans
acattttttttttcaagacatccgtccagttcgagtgtttgagtcgctgatggagcatcgcgttgggcgtggctaaaatttctagtttacgttattcgagtcagaaaagaatccaatattctttttcgcgttcctcttgctcatcgtatattttcctgataccttcatcatgggtgttccggctttgttcagatggctctccaagaaatatccgaagattatctcctcggtaatcgaggaactgcctcaggaggtcaatggagaagaaattccggttgacatcaccggcccaaatccaaatggcgaagagatggataatctgtatctcgatatgaacggcattgtccatccgtgtacacatccagagggcaagccgccacccgccaatgagcaggagatgatgatcgagatttttaaatacacagatcgggtcgtgaatatggtccgccctcggaagctcctgatgattgccgtcggtatgtttcccgtattccttgttctgtgggatctttgattaatccaacgattctatcgcagatggtgttgccccccgcgcaaagatgaaccaacagcgagcacgtcgattcaggtccgctcaagaagctagagaacaagacgagaagaaacaggagttccagagaatgcttgcgaaacagaacggggacaaagaacaaatgctccaggaagaagtcatccagaagacatgggacagcaacgttatcactcccggaacaccgttcatggacatccttgcagcgtccctgcggtactggatagcttacaagctcaacactgatcctgcctgggaaaaggttagttttctgtcagtatttgagtgttgaggttctcatcgaaatagttgaaaatcatcatctccgatgccacagtgcccggtgaaggtgaacataagatcatggaattcatccgctcgcagcgcgcttcgcctgaacatgacccaaatgctcgtcatgttatttacggattggtatgtcccctccagcctaaattcaaacatgagctgatgtaagatcatgataggacgcagacttaattatgttaggtctggctactcacgagccccactttagagtgttgcgagaggatgtgttcttccaggaatccaaacagcggacatgtcatctctgcggtcagcctggccataaagcggaggagtgcagaggtcaagccaaagagaagaacggagagttcgacgaaaaaggaaaaggtgcaacactcaagccgtttatctggctccatgtttcaatccttcgagaatatcttgcggcggaactttacgtcccgcaccaaccgttcccgtttgatcttgagagggcgctagatgactgggttttcatgtgtttttttgtaggaaacgatttcctcccgcacttgccgtctttggacattcgtgaggatggtatcgacactttgattgcaatctggcgtgataacatccccctaatgggtggatatctgactcaggatgggcgcgtggacctaaagaaagctcagcttattctccaaggtctcgctaagcaagaagatgctatctttcgccgtcgtaggcaggcagaagagaggaagcttgccaacgagaagagacgcaagcaagaagaaaaggcacgcaatgaggagcgcgccaggaaaagaaggcgaagctctccctcttacgatgcgattgaatcacccactcatgctaagccgcgcagtgctggtgcagctgcagcgccgccagctggccttgagctgatcacccctgccagaggtgaactggcccgtcagacccgagagctgactcatagtatggtggtcaatcgcggcaacgtctatcgggccaatatggctaacaagagcgcggccgctgtcttgaaaagcaaactactgggagggcaggatggccagccctctgacgatggagagtcaaccgctgagtcggacgcacaacttgacgctgcaggacctgttctcggcaaacgaaaggcagatgaggcagaggtcggacagctcggtactgagacaccagacaagccggaacccgcgaaggcggatgagctgccgccagacacagtccgtctgtgggaagaaggatacgcagaccgatattatgaacaaaagtttggcgttgacccacaggacaaggagttccgtcacaaggttgcgagggcgtacgccgaaggcctcgcttgggttctgttatattatttccaagggtgcccgtcctggacttggtactacccgtaccattacgcgcctttcgctgcagactttgtggatattggtgacatggagttatcgtttgagaaaggtactccatttaagccttacgagcagcttatggggcgttctccctgcgtcctcgaatcatgctataccaaaggtgttccactcattaatgaccgagcccgatagcgagattatcgacttctaccccgaggatttcccggtcgacctgaacggcaagaagtttgcctggcaaggtgtggtcttgctgcccttcattgacgaaaagcgacttctggctgccatgtccaagaaatatccccttttaactgaggatgaaaaagctcgcaacaccgtgggtcgggatgtgctgctattatcagaaagccacccgctttatcaagatctcgtctcaaatttctactctaagaagcaaggcgctccaaagtacaaactcaacatgcgggtgagcgatggacttgcaggcaaggttgaaaagaacgaggcgtacattccgcacagctccctcgtgtcatctctggaggagtatggtatgccatcattggaggatgaccgttcgataatgtaagttgcttctcttggtgattgttgccactggctaacgtgacttagggtcaattacgagataccgaaatccaccaacattcataagtccatgcttctacggggagtgaaattcggtcctccagccttggacaatgcagatatccaggctactaaatctagagcccagcactccggacgctcgtacggcggagcgcctttccgtggcggacgaggaggacgtatgaattatgccggtgacagacaaagccatggcaacgatagaccaaacccgtttgcggcacaccttgatcccaagtttatgcctggagccaaccccggggctccgatggggatgccctctggttgggttcctccctctggcaatttttcgcggggccgccgcctcctccccgtggaggaacat

SEQ ID NO: 11710 - DNA, 225 bp, Emericella nidulans
taggaagccatccaagcgaatatttctgaccgagcacggggacttgctaatctcggatctccttggtccaccatacaacatctttcggtgtctttcttatatcagattaggtagcagcatcggatcgcgatcgcctaagcaagcggcttaaccggtgtgtactgcacatcaccatgttaaggtgggttgtgaatgaagccattagggagcaacgacaatatgttc

SEQ ID NO: 11711 - DNA, 362 bp, Emericella nidulans
  unsure (1)..(362): unsure at all n locations
tgcggagtctgcgggttcgaccgtaggtacgcctttgtggcctcccagcagaatgatatagcatgcatcgcgacggcatggtctctcggtcgagcgtgccggtggtttcttcgccttcgtacccgcgggctagtcgtnnnnnnnnnnnnnnnnnnnnnnnnnnnnnnnnnnnnnnnnnnnnnnnnnnnnnnnnnnnnnnnnnnnnnnnnnnnnnnnnnnnnnnnnnnnnnnnnnnnnnnnnnnnnnnnnnnnnnnnnnnnnnnnnnnnnnnnnnnnnnnnnnnnnnnnnnnnnnnnnnnnnnnnnnnnnnnnnnnnnnnnnnnnnnnnnnnnnnnnnnnnnnnnnnnnnnnnnnnnnnnnnn

SEQ ID NO: 11712 - DNA, 144 bp, Emericella nidulans
aatctagactctgtattagtagcaacccacatcagtccagaatgcagactattatccccaacacgaaacgcgaatccagtcgtactcacatatacagagtccgactcctgggaccaagctcaaccacatcactgcgatgcgatc

SEQ ID NO: 11713 - DNA, 1289 bp, Emericella nidulans
ccattgtgttgatctagggtgagctaattgagacggctcgagtttgagaagcgaaacggtcgagatgcggtatgtttgccatattatatagtacccgggctaggcgccagagaatggaagcactgtgaaagttcggcccatgtgctgataacaagctcctgatttgatacaagatcgtcaggcctcagatccatgagagttgccgggctgccgctaaaaagagcaaagaccaatggggcgtcagtagcgggcttagcgggggagtgcagagtatcagaacgttgcatcggctacacagcctggtgtgataggagagacgatctcaggcacgcggtccatggagaaattgtgcctgtcagactagtttagagatgggcaaatcaggtcgtcaaacaagatcgctgttcggcggtatcctatcgatcaatcattttatgcagaacagggagcatgtggggaagagattgatgactacctcaagggttcaggctcaggttggtctcgtccattttattgcttcaacctggaagagccttcgctgtgagtcattctagaagccgagattggttaaagtcctctcaagaacttaagatggactcggtctcttctctcatctctgcgacaactatcgggcaatctacactatggataacaccaagttccgcatcgtttccgcgcagacagcagaggacatcgctacagcgagagacctatttacagcctacgttgcatggctaaatatcgaccttggcttccaagacttccagtcggaattggactttctgcccggaaagtatggcgctccttacggagaccttctgcttgcatatagcatagaaaacaagccactaggatgtgttgccgtccgtcctcttgacgattcgaagcaactgtgcgaaatgaagcggttgtatgtctctccagaagcacgcggtatgggtctaggcaaggctctggtggcagcgattgtgcagcgagcaaaggacctgggatacaaagagatgaggctggacaccctcccttcgagaatgcaaggcgcaatcgtattatatacccgggtcggcttcgtcgagacgcctccatactatgagacgcctatgaacgaaaccgtattcctcgcacttgaccttactcgatgaacgacaagcaaccaagggtaatgatcgtatctttactcagtcggttgagcttgagcttttgatttcggtgcacccatagcagtatgcgccttgtgaccataagtgtcactcagagtcagacaaaaatgatttatccgcaacagcacaagc

SEQ ID NO: 11714 - DNA, 2031 bp, Emericella nidulans
taattcagccaaaccgcgatgacgctcgtgcttgaatgcttcgagtgtgcccaagccattcgttgtcgtttctgctcgcaagctcaaaaaaggattcctagcttgtgggcgacattgtctcagtgcgggtaagggtatttgtagactctatcttgcacatgccctttgctttgcctacatatgtgacatttcgacgctcgcggtccagccgctcaagcatggagtgacatatctcgcggtcgctgggggctggtggcagcagtttctaatacctataatcattgttgatgctgatggatatgaaaggggtggcactttcccccagtatcgaggcacaactaatgccggaatcagcctttcggcctttgtgtcctcgcgacgacgtagaacctaatccctcatccaagctggccggaccattaatcatggagcattcatcgatcatttcgttagtcctcctaaggtactcgtctagggcatttctgacaaggggccagccagtgctctcgccctctggtgcaccctgcgcaatgaccttgtcgaggatatgtctgccgtttgtttcaatatgggagatgtaccggaagaagccgtcacgatgcgctttgaggatgtgcggagtaagatatggagtgggggtgacggtagcttcggtgacgggaggaaagagggtgttgagcatagccatgcaattcgccttgttcaggggttccataagcatctcattcagcagagtctgtacataaatgttagcagtaagcaaaatttaagcctttggtacgtatttacccatcggcgcaagccaatataaatctccgcgtagagcttttccaccttggaacccttggctttaatggattcgagccaagtcacgacacaaggatatttcttgagatattccggatcctgccgagaattttctgggtggaggcccagtctctgtaacgctgcagcgacttccttctttcgtcgagtttcaaggtctctgaggtagtccagaccagtcagagcttgagggaaatcgacatcttcgagctgtggggagaagcagcggcgcagaaaggatgtaacaaagctcggcggcaatgagcatggctgggagggtaatcgggagatttggtgagtcagttgtgcacgaaggtcctcggcggcagaggatttgggggacgacggtcgacgtgcaaacgccgtctcgggaagctgagtgccaggcactgattgtctcgtattgttgcagttcagtgcatacattgtccggagggggatctcgtaggtccctggataccggagaatatggtcgagaatccaagtaagtgcggatccatcgggacggtccagcttctcctccagatgagccattggggcgggcggtttggttatgttccagaactagacaaagttctcaagggcggattgtatccgattgatggtgtggtaataagttgaatctctaagacgctggttacagaggagatacgatgcagaagaggtataaaagagcccgcgctgatggatcaaccaagctggggaaaagtcaagaatgttgtgtgtacgacgtgatgggtgtgcaggacaatcaaagggacggggacctgttcgcagagacggctagcatcaatcgtgtgtaacatgtcccttcataccacgaatctgcacctcgagaatcaaagctccaatggcgacggtgagaaagatcgaaactgccagacgactcggcagggagagaaggagtgtgtcccttgagttttggcgcgaggaggcgtgatcagcaaacgttaggcggcaagtggaacgaagctgctggagccgggaccggtccgtttggtggctggcaggtgcggtaccgagggaccgaggaattccagataagagcctcgaaacgtcagtgcgagaaagcttatgagtgattttctttgttctggcgatggcggcagttatgagttctatctgcaattgattgaccggagcgaaagacgcggacgctggaatgactgacagatcaaagagcggattgacgttgtggatcgagtc

SEQ ID NO: 11715 - DNA, 171 bp, Emericella nidulans
gatgggccacccgaggtagattaccacgtgaatactgtactcgctgaccaggctgaacggctgcgcaagttcgagcgcgcctggaagtgctacgcagcttcatcgagcagggcatctagacacgtgcaccccacgcccagctgtactggacccatgaagcaggtggacgca

SEQ ID NO: 11716 - DNA, 1286 bp, Emericella nidulans
gtaaacagtattctctatcattgtacgaacccagtcacattgccacccgaaactttgtgcgagtgggtgtcaggattcggtgacggaggggagtaagaagtgttgactgctctcgtttggaggtgatagagtattaccttggactgggagaacggactaaatggaatgagaaggggttgaatgcgtttgtatagtatgttagtactgctgaaaagattggttaactgaatctgttgccatagtagagagatgcatggtctaggtctacctaccccttcaagtgaggactaaatgtatacataaatatatatttagataactcacttagtaccagtggctccgtcgaagaacgccaagttgggggaaagggctaggatgttaatgacagtcaatatgttctattgggcgttagagttgcccttctactatgcagattaatacgtaatgccatgattttgagcttgaagaaaaatatagagtggaatccacatgattgcaagcgtcatcaggatcagactcagccaacctatgcgcaagcccaaatacaaatttctccggaccagtaacaagtaagacaagacaattcttcgcagtgaacgcccgataaaaactttatcgaagctgaaaaggccttgactcttttgactgtctcgagtacgcgtatactgaagacttctcaccacgaatggatctccacgtgtgaatcaacacatgggtttcagtgcatcgagtatcggattgcagccctaagtatagaaaatccccagcatctgtaattctacctgatagtcgtggctcatgataaaccggatgaaagtaaagtcgccacttgagctggccataccgcatagaagcccagatgactatctgatgtcattgtggtgtggccactgggtatccaagcgtccgtaagttggggcatgaagttatagttcatcccgcatggcccgctttatagcgatcaggcaggacgaacaagtcgatagacgcgacagggccgcagcgtggaaactggagggcatgaccgcccgctgtttcggctccgcaatgcccatgcgttccaagtaatgggtagccattatgtacggagtatgtatgaaaaatcacagcaacgaaggaatagacgccctggattcggagtttctttcacgtttcacttgcaggatctgatcgcgggcaggagtctcaaaaattaacaagtgtccaatgctttcgtaaccaggggcttagtctgtttgctcagatcagcaatgcagcggacggtttgcaattcgcatgcagaggtg

SEQ ID NO: 11717 - DNA, 635 bp, Emericella nidulans
tgaactgttaactaattagatatagcatggtatatacatattacattgactaattcagttgtcttttttttgagatattctaggctgctttgcgatattcgcatgactaccagggtatcgttacggggacattaactaaattctatgttaggatatatctacattcacaatttaagttcgaaggtactagcattctagtgtacgatgctgagtgacctctcacttaactagttggcaccgactagctcttgtgttagcaaccacaaaggtctcttttaacaacatattgcattaaatgggtaactaaagaccagggaataatttgctggtgtgtgggttggtcaacatttcagagctcccttactatttttggccggtgttttacgccgatttgtccctttcctactaaatgctcttctaacaactcacaaatacaccaataaattaattttaataagctcatcaaaccccatatgggctttggttgtttgccaggagttaagtagcttaaaaaaccagtcctatatcaaaacgtgatacctgaacaatattcttctggcttggtgaaagaacaaggtccaagccctccccacaatttctgttgtgcttaagttttaaacagactgtcctattga

SEQ ID NO: 11718 - DNA, 1618 bp, Emericella nidulans
gttgaagcttccgatatggagttcgaggagaatgagcgtttatacccgatgtataacgtctctgctcccgccgaagaggcaagagatccagcgcccgcagcagccgctctccggcagccagccggtaccgcaaactaaaactgctcgcccgaacccaatccttggacaaccgttctcgtcagcattaaatgacaataccctcacgcctgccgaccgcccagcggtgcctgtttcgcatgctacacctcgcctgggagtttcgaagacactgaagatccggtataccaacttggagtcgtcaacgcaaactacgacccttaatacatcgacagatagctacatagcagaaatcctggattccgtatgcaagcgatggggtctggataaagggaattacttgcttaaagtgatgggctccaacacaatcgctccgctggaccgcaccgttgaggcactgggcaacatcactgacttagacctggtccgccgacgcttcggcccgcaggtattgacaggatcgccagtgagctcttctccgaatgctcccctcctggtcgacagtcccgctgtgccgaccaagaaaggaaagaaaagcggacagcggatgctacatcctcttactcaacaacaggatcttatcggaggatactaccggcggtattttgtgcttcgcaagcagtcgatggggttcactacttcgctgcatcgcgtcctgacgtttgacaacgactacatgcacatcatgcctgcagatacgggtaaaaatgggtccgacaccaagacccggtcaatcagcttcaacgacgttgtggggtgtaaagtaagccgacggcatccgaagaatttccgcgtcgtggtgctgcgtgggaacgatgcgacggagcagaagcggtatgattttgaggcgcgcaattcgtttgaagcggaggagatcgtgggcgagatcaagaagaacatggcgcagtatcgcacaacatgaggtgcagggaacatgagtgcaggatttctattattacttctctttgtgggtattcaaggtgtaaacttggactggcgaattggctggattggctagcaatggattgatgaatgttttggcctggacatgcatgaaagcctcgactccaatctttatctgggacgagcaccgactctcccacgagttctcaactacaaaaggtacaaaagtcttctcgaaacgctcgtctggcgtctgcagcgaactctaatgtttctgaagcccgatacaaccatgtggttctttaaggtctctcttcaacgttggttgggaccgtccgtccatggaccgttatgaggtcatcggtcccagcccgcagcagtagtacagggtaccaagcagtagtggtgatctcacccctgacgcgtatagacatcactgtcgaattaggtcaatagtgcaatgaagccagggatcgcaggattcatgctgtcgagcatctcgatcagaaaaagcagagaagccagaaaaagtaagcaagactcgaggctcaggcgggtgggagaaagaggacaaagaaagccagctccattgacgcaaggcagggctttgataggttgcagagtggatcgaagaagattaactggtcgttgtctgatc

SEQ ID NO: 11719 - DNA, 3786 bp, Emericella nidulans
ggggaataaagataaagtgatagagtaaaagtattaaaaaagaaataataaaataaagagataaaagagtatataaggaagaagatagaggaaatgttagaaggaggagataaggtggaagataggaagaagaatagagttaagattgaaatataatagtatatagaaaagaaaaaagaggatagagagagaagaagttaaaaaatatagctggagaacccataaatagcggaagtgataatagggaggatattaaaccgggggccgacaataatatgctccgccaaaaattaagactagacggggatgaatcgtgactttctggggaaaaagtgggtaagtcgctagtgttcctcttcaaaggaaaccgctccataccattgagggtctggtcctgttgccaatagtgatcgtggccatctctgccggtaaaacgtctcggcctcatgcggtcaaatgcattttgtatagtgttaggggtttcaaagtctggaataagttcacgggaatgggatgctggtgcgtcatgctgaacgtcctggagttctgttcctgcttgggatggagtctgactgacaaaaaggtcgtcatcggagattcggtcgtcggctgtatcttgcggttcttgcaccggcgcaggcgaagatgaagcaggcgaaaaatgttgttggctaagtgttctcctgggcaatgtttcatccggtggagtgtctcgagtcctgatattgccaagaaggcccttcatcctgtcttgcgggttcggttgactgcccccctcacgttcgtcacggtctgatgcttcctgttccatagctcgatcagacctagtagtttccggcaaggaccgctgtctagcgagcggtacttcccaagaatctgtgactgaggcacagtctgatccgcagactcaaacagtttctgaagagactgcttcaacgactcaataagtgccccggcgtcatgcaacaggatcgtccgcttgtctggagacacattgacatcatacgcattcgtgtccatatggaagtccgcgaagacaaatggtgactgagccaaattaaacgatttgtacacctcattaattgccttggtaatttgtggcaacgcacaggggcgggaattcacaaagagcatctgccgatcaggcgtctggcggccttcgccgaaaacaggtcgcgagatgtgtccgcgcacttggatgttgctcttcttatcgccggccatcatcgtttcagctacagacggctcaaactgcagctccagatccagcggtatcaacgcaagaagtgtcttcgcgccgtagacgttggcgatattctcctttgttgtcgggtttccgttcgttgcgaagactacaactgtcttcttggcttgtgtattcttgatagtaaagcgtactcctgtgctaatgcaagcgtatgcatgtagcagattcaggaccttgccatactcgcgtttaatgttcttttccagctcgcgtcgtcggacaggcagttttctgaacagactttccacggatgcgactgtacctttttgccccgcaactacttctgtctttctcagcttccccgattgttcgaactcgagacgggtcgcgcgcggggcctggttagcttgggcggtcgtgatgcgaaagtcggagagcgcgcataacgacgataaagcttcgccgcgaaatccgaaagtctggaggtgaaggaggtcatcgtaggaggacagtttggatgtgtagtgctttagagctgtagatggtctcgtcagctgcgatttttcggcgtattgttgcaaatcccgtacccacgttctcataattctctggggcgatcccgctgccattatcctgaacctcgatcaggtcgaggccgctatttcggaaacgaacttctacagaagcacttgtcagatgtactcatgatgacattaggctattaggactgaccgatcgatgtggcaccagcatcaaggctgttctcaacaagctcctttatcactgaggtaagatcaacaatgacctggccggactggatttgatgaatctagcacgtaaaaatgttagaaagcataatcttctcgggttgaggggtaattactgagcgggcctcgatggccttgatggttgccattgtcccattgcgagcaaggtcaaggacgaggaaatcgagacgcgcaacgcgttcgtgcggagaacaatttagataagataggtacgagggccacgatagccaccctgcaccccattaacataaagaagatggaatgatatcctttatgtattctaaaacgatcttatcagtgtttcgacttttattctacaactgctctgcctgatgtactttttaagtggtgagcaacaaggcattgccgatagctccgttaaccccgactaactacatacattaaaccgcaaatccaactacactccatgtctctggtcccagtcacaaccttctcagaaactagtcaaagataatcatgggtttcgaatttgtgaacaacaatactgctattgatagcgcggcgaggaaacgtattcgcacccacgctgcagcagggaaaaacgccaacaggactttgacacggccatccaaggccgttgctctcagacgcaacgtggcagttccgtttcgaacaccggatactataagacgattgcagagagattccaaggctggtgcagagattgagcggccagttactgatggactgcagtttcttatacctgttcctgcaagatcacagggtttagttcgacaaggtacctgcttgcaccgtaaacctggattgatagtactataaggctgatgtgcacccatcgaagcactgttttttttcaccggcgttcgttataaccctgagctggaaggggccgtggagaatccggaccatatgggctccgtctgggtgcgatatatatttctcgacgaggcttgtgtgttcccttccacagactttcctgatgtacatggttgggcgctcattaggacgattggcatcttcagattttcactgctctgtcgctacttcgctcctctgctctaagaatctagtccgcgaaacgacacaaggaatgtaccacattgcgcgcacctatcgtatcgttcaggatcggttaatgagcgaggaagaggcaacatctgatatgacgattgcaatattggtggctatgtctcagtatgagcggttgcagggccagtatgcgcgtggctatgtccatgttcgtggcatgcggcggatgattgagctacgtgggagcatcaagcagttcgatagtgattgccgcggggttattcaaaaggttctgaggtatgattctggtcaatttatttattatttgacgctcggctaattatgcagggccgacctcgaatatgctttacagcttggttcggcgacactcttcggttttgagggcatcaggtttctgcgtgaatgtaaagatatatgtttggatcacgggaaggaagagaagttggttgcaaatcccgaggtgaattccttcctgcaagccggcctgcgtcttagtctatggtcggccttttcagacatgaggaggctcgcagatttactcaacgatgccggcgctgggtatagacggaagctaggtgctgacgagttccacaacaccatcttgctcttgggctatagctcctatatatcagccccttagatgtaagcactgggcctggtgcatgctccatgttgggtatcagtccccttgaggaagttgtccacttgggccttgttgcgttcttggtgacatttctaaggggtctaaaccaacgaatc

SEQ ID NO: 11720 - DNA, 239 bp, Emericella nidulans
agcccaagcagcgggggacggtgatcagcgtgcgcacaggggccgacgcccgctgtacgccccaccttggggcgacagagatagctaaaactgtctaccataccatcgatacgcaagggattcagatagacaactgagatctatcaagcgcgcacccgcggcgagaaaaatgcatagccatgagatccctggcgcgtcgctggggctccaatccacgacatggaagcgaactccgatgg

SEQ ID NO: 11721 - DNA, 114 bp, Emericella nidulans
catgatggaagtgtcgctcgacactgagatatgctatgatcacgaaagcaatgcgtgatacaggtactggcgtgcaagccaagtcgataataatcaagagcacaggaacagatg

SEQ ID NO: 11722 - DNA, 592 bp, Emericella nidulans
gacaagacgcaaatagcaagcataagaagagccacagcgacgtcaagcgtaccataccatcacaacgatcgaagagatggaacatagcagaacacacctacaacgaaagagcacgatgacgggtcagacgaccaccacgcccataaaaaaggcgaacgcacagagaagagacaggaaggccaactcagatcaaacagagagaacacgagactcacagacaaggaaagcccaaggcacattgcagggcgcccgaagactacacaagaatggccagacagaaccaccacaaacgccggacgcacaaaacaaaaagacctgaccaaacgcaaacaaaaaaaaacgcacaaacataaagaccgactagacaattgtgaaacggaaacggtataaatgacggaccccaaacaaaccccaacagagggaaaagagcatgtaaaacctcacaagaaccccaaccctaacccggcactagaaccgccgggacaacaaggcgataaaaacacactaggagtctgtcggcgcgagcaaaaccaattaaaccacccgccaaaggcgggcgaagacaagaagaaggggagccaggccgaccaac

SEQ ID NO: 11723 - DNA, 182 bp, Emericella nidulans
ggcctcggagagcgtgcagaagatcatcataagctgcacggatgagtgcgaatagaacaacgagattgagagtaatgtacaccgcaacgcagatcccctccagtgccgcgactgataacagtcactccagtgggacaaccacacgcgataagcgcaacaactggaaaatcggccatcgtgtg

SEQ ID NO: 11724 - DNA, 715 bp, Emericella nidulans
  unsure (1)..(715): unsure at all n locations
aataaaccatactactcacaccatcacaattaatacaaactttaaatcactctctcaaccacaacatcactattcatataaacacaaaaccccaaaccacaaacagaccncnanaatcgcaattccattctctattcacaaacaaccgcatcatcaattcgtctactcttccaactccaactgactaatttccatccatacctacccctagcactactcccaatgatctgtactaccctaacacatctaaattctaaacacatactcgtataaacccacattccacttatcaccaatactaaacaagtccttctataacctcaattcaccgacaacagctcacccatatcgtgttctatattaccacattgccgctaaaccatataatcaactctcaaatcacactcaactagcactacagcaaaccctaaatgcataatctatcacctacacaatagagaaccccgatatcctctatttacctacaacaatcatatcatatcactactttccgctaaaattctatatgataactcttacacaatcaaacaactctaaacctatcaacaatttcttttcgcaactcattatttccaacagcaacaaattacccccaattaagaaaaaattctttaaaattacaatccttcttccacaaaaaacccgaaccctttaaaaaaaaatctaaaaaaacaaattttccccccaaaaaaaa

SEQ ID NO: 11725 - DNA, 2180 bp, Emericella nidulans
taactctattaactgtatagagccaacaaggatgctgcccaagacgactttgaacttgcaatcaccctcaatataggacgaccctgacatctactaccaccgtgctcagcttcatttcatcctgggtgaatttgcagaagctgcgaaggactaccagaagtccatcgacctcgaccgaactttcatctattcacacatccagctcggtgtcacacaatataagatgggttctgtcgcgtctgcgatggctactttcagaagatccgtgaagaatttcgaagatgttcccgacgtctacaactactacggtgaacttctcctggaccagcagaacttttctgaagccatcgagaagttcgacaaggccgtcgagatggaaaagcagagcaagccaatgagcatcaatgtccttcctctgatcaacaaggccctcgctctgttccagtggaagcatgactttgcagaggccgagcagctgtgccaaaaggctctgatcagtgagtttatcttctgtcattccaatgatttcaattctaacaatagtagttgaccctgagtgcgacatcgctgttggtaccatggctcaattgctcctgcagcagggcaaggtttcccaggcgctcaagtacttcgagcgtgctgcagagcttgcccgcaccgagcccgagattgtcaacgccatctcgtatgctgaggcaacccgcacccaactcgaagtccaggaaaaatacccacagcttgccgcgcgcctgcagagtatgggcgctggcttcggcggccctccccctatgtagaggtcctcttctctttatcaagccttgaatgccagagacatgttgagctggtttctggcaacagtcgactaattaacggttttccgctgtgagtgtatttattatctggtttcatctgttgtttcattcttttggacattgatatgtggtttgtcatttgtctttactttgatgatcgtgctgctgcttttcaaacgggtcgttcgggagctggttccgttctccgtgcctggtttactggacgacactctcatgtatgtaccatagtggtagtaggtaataatggatagagttggacgatatgtggtgagggctcagtgagcaggttaggaccttagtacccggccacctgtagtcaagtctccagtatgtaggctggccgctgatggctcaaccgctcgggagaatccacagtgcgtgtccacctgatagcaataaccccacttagtccatctacttatcagtccccggcatccaccagcgccttatcccccctcattctatgcccgcctatctgttcactgtcgtcgtcttgaataggttggtcgtgttcagcctcaggtgtacggcagcctacagtctttgcgtctcttgatttgggagctgctccgcttgccaggtgttcttggggttacataagctcaggctcctgcctgcgacatcatccggtcaacgtcacgacactgggcgcctgtccgtccttcactacctcgaatcatccaagattgctaggtcatcagagcctttgtcagttgcttcatcgcggatgattcggctgctcttctaagcttctagctactttggagtaggcgtctctgtgcctttttgttttgtctgcctgataactaccgcccaggtcttaggctgactgctctacccctccagcttcttctaatactcctcccttcgctcacccttcgtttcgtcgtgccattcctcgaagcatcttctcggctctctacgtcaataatatttttcccaccatcctcgagttgctttcctccaacaaccgaccgacatattcttctatcagcccgggagactgtcagcatggctgatagaaaaggtacgtaaggatttccttgatgaagcagcagtccaaaagttatcaagtggtctactgacctggttctctctatagtcattgtcgttctccattccttggccctcgaagatcccatccctcagcgctctctcaccttcagtgctgcttcagatcgtgtagagattggcagagcatccaagcgtgaaaacaaaaacctcgcaccatctcttcacaatgccttgttcgactctcgcgtaatgtcaaaaacccatgccgtgctccatgtttcatttgaaaagaaggtgtgtcgaaagttgctaaatctcaatactcgtcttcca

SEQ ID NO: 11726 - DNA, 231 bp, Emericella nidulans
cgaaaagccagaacaagacaagcagacacgagagaccaagcggcggcaaggacaagaagggcgggaccatgcggccggagtttcttagagagcagggccggagcgccgccgcaaagccgaggccggagagacagcacaacaaggacaggcggaaccaaggcggcgaggggagcggggcgagaaggaccagaagggaggaagcaccggcgacacaacaggcaacgcaggccc

SEQ ID NO: 11727 - DNA, 200 bp, Emericella nidulans
ccaagccatcacgacacagcaactttgaagagagtggcttgaaccgtgaacgcgcgcaaaaagtgcttgtctatatacgcaatgttcatcacatgttgcacaataggactgcgctgatcgatagaccatggaacaatcacctcctacgttgacgacaaggtcaacgagacagaacctcagaaacatagcctgcggattgc

SEQ ID NO: 11728 - DNA, 112 bp, Emericella nidulans
ggggacattaacacgggttcggatcgagaattaaaggacctgaaagctggagagagcgtggaaacaggataggcgtagaggtcgctcgcatacgacaacctgacaggacgac

SEQ ID NO: 11729 - DNA, 1696 bp, Emericella nidulans
aatcactcagggttgaatcacatgtcctttactgttgatgctcgaggaagttacatgttagatacttcagatttaatacaaagatatggcatcccgagatgggcataatacgtccactccctgataactctgcatactttgtgtacttcctttgctttgtttgtcttcaatggttcttaaaatagatacatccacaatactcaacacgctaatcacgtcttgcatctcttatcgttttatggctgcggctgtacgccttcttgatccttttcacttagccaacaaacataagattcagcatccaaaatccgactctccgcaaaacaattgccactgaccttcctatggacgtcttcatgggttgtaaaacgctaccctaacagacaaggcctaaatccagcagtcacggttgaggctgtcgcacaaatcttggaaaatggccctcactacgacaaatattgggagctcgagagtgatcatgacgatgcttcccctttcgaaagacgaccgacgcctttcccctaaagccagcccctgatcacaaactgccacagcttttagtacaagacattcgcattaagacagtcagcataccggacaccaagcgcctgccgaagtttgaaggaagaccgcataacaatacaagatcttgcagacaggtgagctaagttggaggaatgtgataatgtgatagggtgcaaagagtccgacgagctgcgctcactaccctcgttcagaaatatagctgatggcgcacaggcgattatgtatgaatgccgaaatgggaatcttagacatgtactttgcggccctggatcatctttcttactgaagggatacttttaaagcccgcccgggaagtatgagttttaggttatgttcttgattcatctagctgggtaggtatggttgaatgattggatactgctaaggaatggggtctcagttgcgccttaagagtgtttggaatcagtgtattagcggtggttgtttatacattgtactctatataccccgtccatagggttaccaggccagttttcagccttctttctataatgttaatcgggacagaaatatcgccaaaccgaactccctttgaactcgaaactgaacccagaaagagaaggagagaacagaagggttaaattaaagacggaaagcagcatgtattacctgaggaccgcaccataaccgacgatgaacgacaaaggcaaaggatagaatacagtaagaatatggttcaatagtgtacaattaacggagagggtcaacagttaaagtaataaggatgatggccaaatcccgtgttcgtacgcatcatagacatagaggcgtgtgtctgcggatggccgtgatgagcgtcattctgttgcgagggttgaggtggtagatgtggattgatatttgtatagcccatagcaaacggctgcatctctagagccggtgcgggttgatggtacccatatggtgacgtcgggtagctaagagcgtaaggcattttcgtgtgatctgtaccgtcctgttgcatagacgagtgtattggcggtagtgtggctgacactgggattgtgggatgaaatgcttcccatgtcgttgaaactgtgggattactagtagggatggaaatggaagtgatggaaatcgacgttgtgtcaagctctcttttgggaaggctgtagcttgtggagaggct

SEQ ID NO: 11730 - DNA, 2707 bp, Emericella nidulans
gatgatatcgaccagtgcatcatcggatacacgcgactctgcaagcacgtcttcggtcgcaagaagcggctctctttgaccggaatgagtccgatgtcaatgtcgaaacgtaaggcaaagcatgatggcaagaaactggcgaccgcgctgaagagtattctccgcgaactggggcacgaggatcgggatatactcttgcaggatgtggatttgagtgtcgcgtgtatgtcgcttcgttcttcaaggttctacgataccggattgaagctaatgatgatgtccatgtgcagcttcgtctgcgttaccgacgcctcaacccagaaactggtacccctttccacttacccgagcaaatactgcccgaacgagctctacaagtcggcaaaaatctgggaggccggtgtagcgacgtttgccaatccggccctcttcgagcccatcgctctgggtcccgcgcgccgccgctacatcgactcctcttcgcaagcaaataaccccatccgcgaggtctggatcgaagcgaaaaacgtctggcgccttacaacccttgagtcgcagctgcggtgtcttgtctctatcggtacgggacagcatacaatcaatcgagggtcaggccgcaagacaagcggcgtcggcggagtgtttggattcgcgaaaagcgctgaagttgtagtcgatcccgaggtcgaaacgaacaagttcatccaggaacacagcgagcttgatgacgagggccggctattccgtttcgatgtgccgaatggcctcgcggaaattggtcttgacgccgtggatgagatagagacgattgtggatgcgacgcaggattacctggccaaggagctggtctacaagcaggttagacgctgtgggaaggcattggctaggccgggggatagtgaggtctcttttccaattcggcggtgatttctccccttactatgtttggaggctgatgtgatttgagtagcgttctgagattatctgtcattgataccatcgctcttctatgcatttatgaattcgttgtcgtttatacaactgcaaggactgagtactcggcccatacgatcatcctcctattcaccacaagtattcccccaattttactcattctggcaacaccgatcaagattccactagtaatctgcggtccctctcgttgtgctctctaacctggcaaggctattcctcaggattctagattccaaaggggtcgaatgcgacgcgactcggggaatatgggttattatcttcagttgcccaatctgaaatttaatattagaacgtaacgccgaagtagaccccgttcccatccctcatgcgtatgggtgccaatgggactgaccatgctggagaaatcaatgagtccttagcatttgctatgggcaccatgcttgcctgtggtgcttgtccatcttttggctcacaaaaaggagtatgttagtcggcctagggcttgcagctttcatcagcatgattagaactggtgaacatgttgaatgtcaatgttccgcaaagatgcacctaatctttgtgaggcttggaaaaaatagttgcctatattatgaatcattgctgttttcctgcacctcagatgctgccacgagcagttcagccacaaggctgcgtgccaaaatggctgactgaatggaactgtagggcctgtggtttgcttccttgtgttgctcagaatatatcagagctgggtttcgttttatcatattcctggtcagccaaacaagatatgaacttgtctctctgttcaagggcaggaatcccaaaactatgagtcttgtctccttctcgtgcgcttgacagagcgatcgtctatatttttggagacttcttggtgttagtccattgtacaaggagcataggtaggcttcccatatctacaactggcattccacccagagagtgagcgctggatatatcacaaacaagggccaccaggcggagtgaacgtctctgccagaaattttaagaaaacaagaaaggacttttaccgtaacaataaaggaagaggaacaaactcgtggacttgtatgtaagatcccttatctgctattaaaatccatgcctagttcaatcataatacaagcaagaattatcaactccatcacaggcaccactaccggcaacagcatcagaagcaataatgacagtcaaaaacagagagactaagaggaattcatagattcgtcatggccgtctaccatatgtgggcgaccttccacctggaacgaatttgttctgctatcgagcagctacccgagaatatcatatccaacagccccaggcagctcgggattaatgactctgggctatcgcgggatctcgctagtctgttgaatggagtccctcacgcagggggtctgaagctgtcagtagcagtcaggagggatccgcggatattgcaagttcaggattagggtctggagctagaaagcatggaaacgcaaacgtgattagcttagaagactggcactgttccaattgattcagaagtaaatgcaaaagggtgctccaatcagatgcagacatcgccctccttctgcgttattgctatacctattgaagagcattttctatctgttgtaaattgctattcctagatagtcatacatcttcaagccttagttgcttaccctcatagaacagtgattccagccttagaagctgccctctctatagttcattcaac

SEQ ID NO: 11731 - DNA, 1430 bp, Emericella nidulans
atctgagtgaagcagggcgtgcagcccgagactcgaccttggcttgttggtggatgacagcgaagctttgcttccagagctactcatgggttgaggctgggcttccgttcgttggcgtgtgacaggctcctccctccgcgccgcttcagaatcaggcttcctagctgcgacgcctcccaaatccttgtgaactgttcgtgcagacttctgtcgcgagaccgcggccaagttttctgggcctgtagatgtagaccgatcctttagcacgcgaaggggttcgacagctacttgattcgcagcttccaatttacgtgattgagatcgcgtctttcccaccgtcaacattcccagatcattgcttgcttgggacactgaaggtacagcattagtatccataccccggactgaggttgtgcccgaatatgatgccgctatgcctcgtcgagttcgaattggacgctcagctaaccctccagtaggcacaggcggtacggggtccgggttaagcccagcgtctcgcacatcaggcatggctttcatagtcggttgtggtgggtcgcacagtgagggtatttttcttatggtacctctgcctgttaacgcttgctgtcgtaaggatgccgcgtggctctgcgaaccattccgccgctgttgagccgcggcaagagcagcctgcgttctcgattgagataccgtatttgttcgcaatgatgtgctactgcttctgctagaaagaacgctggtatccgctaaagcgtcttgtcttctcaggggcagcgattcagggacgctccaatcgccgatcagatcatgagggtacttgtagaccatgtcttcgggaaggggcatcaatggctggaggcccttctcttcctccgcaagacactcggcaaatcctgattttgaggcattgtgtccaacagattttcgcgcagttccatctggtttcctccctacaccacaagagctgtagaatgctgctttgcaggtccgatagcgtaagataggatcatctacatctctgatgtaactcgagaatttctcgtcaaaatctaggccatggccaaaagccatggcatcgccttgcggctcggcccctctgagccaagttggtttttggacgctgcactttggatctagccgtttaggtatacatccattgtacatgttgaagaatgcatgctcaacaatatcgtccggctccggacgtttctgttcatcgaggttgaggcaacagctaaccaatgacttagcttcgtcagggatgtggttcgcgcactccgagtcttttggccagacgtatgtaagatttcgcactttcttatatatttcttcttgggtctttgactggactggagacatccgaagcattgcatactaaggaagcacacatttagtcgcctctatacaagcattgggcagtagcctac

SEQ ID NO: 11732 - DNA, 2522 bp, Emericella nidulans
gaaactggaactgaggtcgttgaactagctgctggtcctgagcgcggcgtactggaagggactttgggagtttcagcgacgctcgcgggctgagttgcatccgtttccttctcaggctgcttctctggactctggccgaacgaaaagtatgaggtgattgtcgtgaaccatccctgcggctctggttcaggcacttcctcaggttccacatcctctatcattttcagaaggatccgtcgagaggctggaggtagatcgccgttcttttcaagagcaataaatgcttcccggtaaattcctacagtctcttcgagctcgttgagccgggctgcaacgtcatcccttcggttattctcctttctccgtgatctccacgactcaaagaggatcaaactgcctgctacaaggaacagaaacgtttcgctgatgaaagttgcgcctgattcaatggcttttgattcggacagtggccgtatatgtggtttgggtgccggcttttcggcctccgatgcggcagcttcgccctggcaattgcctcttcttcggccctcgtctcagcttcagtcttcacagtaggcgatgtgggtttatgctttcggagttctgcttcagcagcggctcgtcgggttgccgcagcgttgtcgcgaattgtgccgagacggagccgcatgtcgagccgatgcaggccctgtgccatagagatgcaaattcgccgaaatcgctcatgctcgcgagcctgtgcttttatttggttctgagcggggtcagtatgtcctcgcaggagatctcgcgggtaggcaagggtcacaataacgtacggctatcggctttgacagcgtgcggatgacgagggaagagagtttaagcgtaagggacattgcgggctgtggccaaggggcgggaaacgaaaagaagtgtgtgttcaattcaagtatatgtcaacagtatatccatcgcaggtttctgaaaatcagccgtgagtcatttgactatagatagtgcgaaaacgctgctccattctgaaaggccgcaccgccatcgtcatcctgccaagagaatggatgccaagggcagtaaattctcgaaagggttagctcaagtgtcaagcaaatgctgggaattgtgattgcttactcagcaatacacattgctccggccgcgggtcacctgtttgatctcaggcgggaatgtttatcgattactgttttggggaaaacgtttttatctcccagctcgtgagaccaagttcttctgcgctgtcttgtcatcccttaagccccaggccaggcatcccccaccaccgcaaagattgacggcccggcgtaggagcaaatttgtcttttagcgtcattgttactattcattgttgttttgtttctggtgagtcggcgatccaacttgctccattatgtgggggtcgagtgataaagtactaacaatagagagttacaaggttatcggcagtccatgttcatataccccctctgcttttgcgattgactgttcctatcgtaaccgatggtcgctacgcctgcatgcatatacaatagccgcccgcatttgttcgagaaccgtaccatacataatttgacgaccgacgacataacgagcgactttaatggagagacacctccaaccaacaatggaagctctatcgccgcggtcaacaaaccagatgataaaaccgaaagcatctatggagcgaaaagtcctagataagaatgcagctgcggcccagaaagcttcatcagcaaagaaccatgcgccgcccccaccagcgctagtcgtggagcccggagacgacggggagcaatactcaaccggtgctttcctcggcaagggggggtttgctatttgctatgaagggactctgttgcgcaacggtcgtgtctttgcaatgaaagtcgtaaagtctgacatgggccagaaaaagatgcaagagaaggtacggtgtagatgaacatcgacttatagatagaaggctaatggttgtgcatagtttcgaacagagctgcagatacactcaaaaatgcgtcaccctcacatagtcggctttcaccgggcattcgtttacgaccagtgcatatacgtgatattagagttatgtcccaatggatcagtgatggacatggtgcgaaaaaggaaatgcttgagtttgccggaagttcgacgattcatggtccaactctgcggtgccgtaaaatacctccacaagcggaatgttgcgcatcgtgacttgaagatgggcaacttgttcttggaccgcaacatggacatcaaggtcggagattttggattggcagccatgattatgtcggaaaaggacgagaagcggaggaagacgttatgcggaacacccaactacattgcgccagaagttctcgacagaagcaagggaggccatactcagaaagtggatatttggtccctgggagtgatctggtaagactatctgaccccagatgcttgtattaaggaggcggactaaatgtgtgactttccttaggtttgcagtgcaaacg

SEQ ID NO: 11733 - DNA, 3205 bp, Emericella nidulans
ccgtctcatagctactgagcatctcagagccagcgcggtatccagtggttcgacatgatgactcagtgacctagactggttttgttttaagggcagtaattcacgctttcttctgcgaaactatattgatagacctcgggttcgttgatgaggcgagagctggtagaccgtagccggtccggaaatgcggcaaagggacagacgccagtccaacgactcgaaggcagacaatgacgtaaatagacgcttgaaatgagtagagagaatcagacaggaagagaaatgaacatgaattgagaaggtgatgatgacggttgaatgcagcggcctacggatcgcattcaaggcgaccgccacgtgattgctcgcccaggcgtttccgtatcggtttgggaagcttcatcttggctgcttttgtttcccaacgctaccttggtctgaattcttcgaagtattccagcgcaccaagtgcggtaatattacttatataatcaagaccaatgatgggattctggagcttgtcataggcctgagtccgacttcttatggatctcgatcggggccccccccccccgcccttttcaatgcgattgtatccacgggcacttatccaactgcagggtctggcagttgtggcacgtttctcaaagctactgacacttacatcactacgttcatatggtcaggctttacgcctagcttatacaccgtaaacggttagacctatctcttcaaacctataccccatctgatacggacagccttccttccaaggctacatcggcaattggtgcccgtgacgcagctggaacgttggatgacttgcggaattcgattgactatttccccggcgtatttttcttaataactagccactatttgatcctgatttgagctccttttcgctcatgtcatccatcatccacatggggagaagctggggcttcgactgatgaggactgattctgagaccagcacatataggttcatatagtgccacccaacctcgatttgttcaacagatcgatttggtcggatatttgggtttgcattaagctcttgttgctcatggggatctcaaagcctcgaaaggttgctgttgtaggtggcggcctcactggaatcgcttccttttgggctctacgaggatcaaattttgatgttcacttgttcgaagcctctccaacactaggtgggcatataaaaaccctggcgttggagaataagggcaatcaaatacaggttgacaccgagctgccaacattcaatcctaatgcttgccgtcagtattggtccttccggtttactttacccggctgactatcataattagcaaacttgacctcactgcttcggtacttgaagattcctacaacagaagtcccattttcgttcggcgtctcagacaatacatctgtcttcaagtggcatatcagtattttgaaaagcatttttctatgccctcgattactttgcaagctagaaacttaccggctgttattggacgtcatcagtctgaggtgtctcgcggctgatatactaacagagccgattcctgagagtgcgggccttcaggactcaactgagcgctatcttcaggagaagggataccccaacagctttagggatcgatatctcaccccattgctttcgactctgtggaggacaaacgcggggaaatttctcccgaatttgcccgttaaggtactcgctcactccttgcacgaacatcagctcctctccatgtgtgagaatatgccaaaatggaagcgtatcaaccctggggttagatacctcgtcgacgcaatagctaaagattttccccctgagagattgcatcttcagacaaaggtcaacgagattgcccggcggtccaaatcacagtatgttctcctaacgtctgacggtaaacattcgcgtttcgatcatgtcatactcacggtagatggccctgaaatccttcgactattatgctcaactgtaactgaagaggagagccatgttcttcagtctttggcagtgacgacgaatattgcagtgctgcactcagattttcccgtaagcagaatcagttattgccctatattctagcttccgctaagtcagagattataggcaacggccaaccatgttgcgccggattatgaatttattaaggcgtctagcaactatcgacgacgggatctcgtaccaccaaagttctgctcgagatacgatgttaatgtgctccaaaacattcccgcctcgcgtttcggcgaggtctttataacctttaattcactctcaccaccccaccccagcctcgttcagggtgtatgggagtttactgaacccgaaccctccgcagattcactaggcgcgcagtctcgccttgctttgattcaaaacacacgaggtctaagctacggtttctgctggacaggccgtggacttttagaggactcgattaccctccggactgagaatagcggtcgaagatcttggagccacggttcctttcgatgtgacttttcatcccctcatcccttggactcacctgaattctcatacaaacgctcaggacttcggtacaacctggttaggacagctctagaggcagtccgcactgttgtccttgtactagagatcgctttgctattattgggtcgtatagagacccctgtactcaagaccaggactccccttgatcgggcaagcaggattagtggcactttttaatggctatattacggcgtctcgggagacattttggctacaccactgtatgttggaaagatctcgaggagatttatttcataaatcttgacatcaagatgttgattttcaaggggaaaaacccgaaatttcgcctttccattacattaaatcttttaacacataaaacatggtatacatactattacccaggaacttcgtctgttaagcttttcttttgcgccctcctaccctcttactttgacgtgcaggacaaccccaagccactccgggatagaccgtcttatccgcaaaccaaagatcattaataaagaaacttctcactatcctgattgacaattgccgcacttcgcttagaatcaaggaagaggtcctcgcactccgtaacgtctgcctcctcaatccctccaggccgcccgttgacccgcgcaagaatgcttgccggtgtcagcagctgtagggcatacctgcaagctgaccttgctaccgt

SEQ ID NO: 11734 - DNA, 522 bp, Emericella nidulans
gatcgagttattgctggccctgagctggcgcagtcctggtcatcgagcatcacacctccgacctgggtagctgtatgatcctgttcaggaatgatgttgctcacctttggcccgagagcacgtcactctgtttcattggtggccgcagataatctcgactttgatgatcgccatagcactgcgcgcgatgatgcaagaactacctataataaccgcccctgatacgcgacgttgatgattccacccacgcctactagtcttagctgacatacggccctgccgttgtactcggccgattcgtgacgtcaaatgcatcatggccacagagcagcagaagaatcctgcacccccggtacgacagcagcccatcctggtggcctgctgaggctagactgcgctgcttttgcgctgcgctgttaggcgcaagccgcacttaatgatccccacggacacgcgactatatgcctgctctgtcttatcaagcgattgctcctaaggagtgtcgactagaccaacgacacc

SEQ ID NO: 11735 - DNA, 233 bp, Emericella nidulans
  unsure (1)..(233): unsure at all n locations
gccgctacttctcngacccaagctccgtcgaccgatcaccatcctcgcacacctgacaccgttcgttgctctcgtccagtgcctgcgtgtttactcggagatacgcantccgacacggtgtagccaccagtgtgtacngacccatacgcaaccaggctatttcgctcatcttcatctcaccaccgatgactgttacagagactgtccaatgcgcactgggacaagtccctccg

SEQ ID NO: 11736 - DNA, 534 bp, Emericella nidulans
ctcggacgagatggatgagacacttgccggcgcctaaggccggagctacacgcggacggagaacgtttgacctgtgaggctagatggcgggatcttggagtgaaaggctaccggagacatgcttttgcgaggcctgtggtgggcgctggccatgccacgacggcttacgttagacgcagagcaccaccgagtgtgctaggcactgaggcagcacttcaagcctgagtgtcaaaaacgctgcatagaataaaaagatttgtgcttagatgttgctgccgttatcagagtaaccgaccgaatgctaactcttcggccgattcattgcctatggaaagcctaactaaactcgggacacagagcgagactaatcttctgctttatcgcaggctatctgcctgagagacacgacgctctctgatccatcgcgcttgctgatagcaatgaggatacccattgtggcagtggcttgcatcacctgactagtgaggcgcggaacacctgagaccctctggtgagttttataagctatgaccc

SEQ ID NO: 11737 - DNA, 515 bp, Emericella nidulans
aacagatccagcatattagaccggccaattgccccgtatgtcaggatgccactaaatgacatcaaaacccttactccgccgtgcacgctacatagatcgatggactatctccctgctgactcaccgcttgcctagactagctatgtaccccatcagctctagaatggacaaaaaccttgttgcaatccccatccacccggaccctaacttttagctctagaccgaagaagacaacaatgagcccagtctggtactctggactagattagaagtcaaaggattaaagctgcacaacataatcctacacttggatgatatatgcaatggagaggcatgtatgcttgctgaccttgatggacaggcagattggcgtgtctgatgaggttttacgtgctcgagcacagaatggccgcccacggcaaccgtcatcttattagacatgcgtgctacctccatggatagtgcaacagctttgatagtagcgtaattgaaactttcttgatacttcaacgccg

SEQ ID NO: 11738 - DNA, 1181 bp, Emericella nidulans
cattatcaacgaatagactagcattgatcagaagagctcttgtgcttctatcaagctctttgcaaatgtaactttggcctgcaatagtgaagagcttcgaaaggcaagctatagatataaggctcgatataacgagacaaggcactaatatgctgtctagaaccggtcagaaagtactagtgaacactctcggttcaaggatgcctaagtattcttcaactatagcaacatccttattgaactcttcaagctccatctcctctagtaggtgaagtacccgcatttgtccagataatggcctcggtgctttcttctgtatgcttggactacagatccattgagcgagggtcgacctgcgcagctagaagtccagcaacggatgttattcacgaatttggcctgtctagcttcacctgtgctttatgacaaggatgcgcgagtgttcttcgttagatatatagtctttgtacctagcacattctattctccgcctaaagaccgagttctctgcgaaaaactccaaaatgggacataatattacgaaggcagaatggcttcattccacccatgccccagctacttttagtcaccgtgactcgcaaccaggaaactggtattccagagcaatactgggctacaatgaatgcaggcaatcgcatctttcagttggacttccttgaacaaaacctatattgagtggacagtagcaaatgaagcataaacagttggtcaagcacctggaatttgttctcacggggaacgctgactacggtttactcgcttgatacaaatgtgtagcatagttcggatgtcctccatccgctttgcgagttgggttcacttctaccttaatcgcaatgaaagtgcacaaaatgatattctgcgctcgtaagatgcaggcgtccagactgtagggaacgacatccatcctaaccccaacaatcataaaggcgcccagcgcatattcgttgaaacccttaacttttgcttgaaatacggagaattggcaaccctcccttttggcgggccttgagaccattgcccctctttggccattgcgcctttgtcaaacccattgttcgtccccaaccgttcccgcacattcttcctttatgaaaggggtttttcacttcttcctccctgggggtttcatcccctatttgtgggtttctccccccaag

SEQ ID NO: 11739 - DNA, 1135 bp, Emericella nidulans
gaatagccgtggcccgctcgcacccgctccttccctcacacaacgaccttcatccgcccattcgatccatagcccaaccctcccatctcccatccagaacagaccgtcgatgtcacccacgcaaggcaaccgtgatgtcggtcctctggccggattcccgccaatgccttcgtccgacggccccggccctggtcccacatcatggacgccgtacggacagcatcagacacctcgccccagcaccggccatcatgcttcattctcgtcagtccacagcgggaacggatcgtttgcagcgacacctaccgccaatcgggcatcgtccccgcactctcatcatttgttatctggcataagccctaccaaacagtctccaaggccctggactgccggaggcatgggaggagcaccaattttgcctccggtacaaaaactagaaccgagccctaagctgatgggaaggagctcgccagacgcgcccattccaccgcccgtgaagtgcatgacgccggagcaagaggaacggaggcagagagagaacgctatgggtctacacggccatctgtcgcagcctaacggacagcatgccatgtcgccgtcaatcaatcgcatccctcctctggaaccgtcgccattggttccgaagcctgagccttcgcagccaggttacgatagtcatccatagagaatctacaagatgtacagcattattcattaatcgactccatccattcatactacttaatcacgttgtcggtgtgagtcgcaaaaaattccctagctaagtggatccaattgtcgcccagctagtttgagacctgtgctctcaaacgttcagcggtctacggaaatatcagcggcgacaaatcggtgaagctttttgagtgttcgtgtcgacgggaggcaatgtagggacacccgcgaacgcattttgaatgactgcacttgagacacaagagcctcctgctgcatcgagacctttggcgtgctgttctctcaattgcattcacaccttctgttcgaacgtcaagtcgatcacgaaacagacaggataggatgggatatttacttatttctgggtctactgtgaacttctgtatcgcccatttttgttcatgttcaaaataatgctcgc

SEQ ID NO: 11740 - DNA, 121 bp, Emericella nidulans
attcatatcttccccgtcttggatcgtcgtccttctctcggtctccccattcttactcagtacacttctacaggcactttattgtatcgcacgccgtccgactaatcagtccccgctctac

SEQ ID NO: 11741 - DNA, 1694 bp, Emericella nidulans
cgtacatggcccagcatgtctttagactcaacccgttcgcgattcagggacgcatgaagcaagcatggaacgtggtcctgcagaaacatgccatcctccgcacgcggatcgtcatgcttggggaaaatgccatgcaggtcgttctcaagcaatcgcctgaatggaggaactgcagcgatctacgcgcgtatctcgatgccgatcagtcgatcacccttcagacgggcgagccgctgacccgatgggcgatctcagacacccatctggtctggagtgcccaccatagtgtttatgatggattctccgttgagctcatcttgagagatgtggccacagcctatgcggacggcgagataccaccccggccttcgtttcgccaattcatccagcggatgttccagcaaaagcagaagtcgctgacagaggcatactggaagaagaagacagcacatctcgacgaggtggatacgtttcctcgactgccggcgtccacgtaccgaccacggcccaacagcgtgtataagcacgaatcgagtctggcaatcgatgggccttctggtgtcaccttgtcgaccatcgccaatgcggcctgggggttggtgcagtccagccatctcggcagcgagcaagtcagcttcgggacgaccttgagcggacgcaacgcgaacatgcccgacatcgacaaggtggtcggtccaacgctggcaacggtgcccgtccttctggatgtccggagcagccagtctgtagccgactttctgcaagcaacacaggcctatttcaccgagttgatcccccaccagcacattgggctgcagaacttgaggcggctcaaccgagcgacggaagcagtctgcaactttcagactctttttgcttttcagccagggatgaccgagactcaggggcagtcgccgtacggccatcttctcaccgcagagaataaggacaaagtcgaagctgccttctacagctatgccctcacattccagtgctctctagcaggaaccgggataatcaaggtgctcgcctcatatgacgacaagatcatttcgagctcgcaaatgaaacgactggtttttcagttcgagcatatagtatcgcagttgatcagtagcaatggctccaagagattgagcgaaatccagctcatctcgccccaggacctggaccagctcgacatttggaaaagaaaaatggaaagctacgagcaactcttgcccttggatgcgattcaacgtcatatcgacactcgacctgatgcgacagccgtcgctgcctgggatggcaccctctcctacgtggaattagacgctttcgccactcgactagctacatggttagtgcacgagcagaaggtcgggcccgaaattgtgattcccatctgcttcgaccggtcacaatggatgatcgtctctatcttcggtgtattgaaagctggaggcgcctttctacttctcgacccaatctaccctgagaatcgcctccggtacatgatcaagatggtcaacgcccgaactatcctcgtctccgaatcgtgcagagcgaggtttgagggagttcctggtgccatactggccgtgaacgctgcttggtttgaaacccacacccacgcatccattcctatgagggaactcccagtagacagcgcattgtacttgtctttaccagcggttcgacgggcagcaaagggg

SEQ ID NO: 11742 - DNA, 2320 bp, Emericella nidulans
caaggggaagaatatcaatatttgcttgatcagatgcaaaaatttggtgaggatctcttaagcaaatgaagttgtggtacgatgatttcatgtttgggggctgcgaacagacaacatactcagtgagcaatggaacagtactaatgcctcctgactaaagtttataataatctcgaaaggactgggtggatagacagtagaggtttacgtgtatcatatatatgccggtgctccgccaactctcttgttttttcgtcccatcagcttggaaaatgggccagctttacatataacacaaggctgcacccttgccttcgtggcaccacgtcatcttacctcttgtcagaagaatcttccaagaatatggtccccaagctttgccgaggctgtacgcggcgaggagcacttcggcggacttcgatacgcaggtacgaaggtacgcaggatcatagttggtggaaagaccacttagtcggtggccaacgggcagatgaattcaatcactgttctttatatgtttggttgaatctagagggcgccaaatacattcatatcgtgggtcattgacacaagtgagatcagctcctccactatgaccccttcgacacctcaccattacacgactgtgcaggtgcatcaccgatgcagctacagatcaccgtatgtcgaggacgatcgcctggccgtaccgaacatggcgttcatcgagacgtaatcgcgtaaccttccatgtaatcagattataggactgacgatcgaccaatcacaacccactatcctcgatccccccatacaccatcgtgagagcatgatgacgaccatgagcagtgagatagttatataaaccagcggcttcaatgattcagattggtaaaagatcaatttaaaaatacaaggaatatacaccaaactatttatttttaccttctagttcaaaacccaattctcaatatgcaaaacgcacgcggtcagggcatttctcacgccaccggtggctccaaggttccccaaggagtccaagagagagttcctcaaggcctcgaggaatcgttgcctaattcggtacgtctagctgatttgcatctcaaagaagaatcaaaactaacaggcgaaggttcacgataccggctccagcggtagccacaagacccatgcccttaacgacggcgaggactcaatcgtccccaagggaattcagaaggctgtccccgaaaagcttgagcgcgctctgcctaacaagatccacaatactggtgatgaatagatgatcacgatgtgatgtttgcatgaatggatataaattgatatcttatctgtatattagtgaatttgaaacgataggcattatttgacgggcataacatacttatcttggaatgtgcaagtggctactattttcgattatgtagctaaaacattgctgttgctacgccttcccattaataccatcaatagatgataatatcattcaaaattagatcatctgtcatttaacaaataattgtgctaaatcataccgaatcccaggctaagacgggctttatgacctgcatgttgcaattcgtcagcatctcttggtctaaattgtcatacccgaactacaattcgccttacctgtcctgctctgagatcttcgagggctttgtcaagctccgtagccggatagattcgcacaatcttgtgcacaggaaatttgccttccttgtaccactgtaccaattgggggatgatctaaacagagttaatgcccaaacaacggagaaccatttcttgtaggtttgattgaaatcatacctgctgtggatccgaccaagccaaaatgactccaatgatcttcttgcatcccgtcaacacatcaagggcattgaccttcagttctgtgtctggcggcatggcaccaacgagcgcaaatgtgccgttaacggccaaggctcgcagcgtcgcctgcagcaccttgcctacccctgtcgtatctatgatatagtctgctccgcctgggaaatacatgcggatagtcgctgctaaatcggagtctgggcctttgagcgtattgatcgtatgggaggcttctagttcaagcgcgagctgtaacttttcgtccacaatatcaacagccacgatccgagtcaaacctaacgctctagctgtcaaaagcgccgcaacttctacaggacccattcccgtaatcaacatcgttgacgccgagcttggctttttcacattgacaactgtgccagcttcagttagatagccacattccattggcgctaggggccccaactcctcgctataaactcgacatcacactttacaactgacc

SEQ ID NO: 11743 - DNA, 125 bp, Emericella nidulans
cggcaccgttcttggtctcggtttccgcctgcgtggccttccactgctcggtgttgttcgcgttacgccctgttcgaccgacgctggaccgacctgagatctcggcgagtatcgcgtcgggatcg

SEQ ID NO: 11744 - DNA, 1644 bp, Emericella nidulans
agttttggtttctttattctattgcattctctctttcccctctcggttactacaaaaaagtatcctttgccattgctattagtttccaaccctacatatcccagttcaaataagtttcatgcatgcaggacattgtttaatattcattatgcccagataataccccctttattacaagctacaaaagttttcttcttttgatgatatgtcctaaaaggagctgattcagaaaagcaccatgtcagggatgtttcagagcatcaacccacagcttcttctgtggctgaagtagacgtatcagataataagcaaaacgacaatatacctgaatggttggcaatatgcgagtagccactatttagtctgtacttcctactccatttacaggctcgagggccgaatgtcagcatttcctgagctgtggacgtgctgctacgtagggcgagccttgaagagacgacgtcatatcactcttgactctatcgaacgattcccaaatttggaataaaacggacattccacctcaaatctaccgtattagccagtacatttacatagatttgaatttattcttgttctcataaatcatggcgagtctaaccatgtcggacgctttatgcgtttcaagcatacgaaaagctggagcgtgtccagaaagaggcaagccccttgctacccaaggataaaccgcagtacactgcagccaatctgtcccggtctggatgttggaataaaatacattttctattattgtctataataacaaagatggtttggatgtcgttaacgtctatttgttagcaccggcctcgctacccattactggattatgtgtttttgcgagtacgtctgcagggggctctgcgaaggatattagtatcgatacctgccaaaaatatccagttggtactcaccagttcgcgtgaatgcgcctctctcactagcaagcagctgttgaactttaccattctctacttgatccctagtcacgttgaggaggtctggggccaatcccattgaagccaaaaattgcacactgtccttccactcgacttctttcctgttcttatcccaatgaagttcctcgcccatcaagtcgatcactgtagggagtgcttcgagggcagcttgggcgttaaggaatgccaagcgggttcttcgggcgatgacatcgactgcagtctgtgcgtattcgtggcgaacggcaaagcggacctcgccatcaatgaaagggtagagggctgaaatgcgctgtccgcggacagggaagcgtgtctgtgtgggagaagacagtgctgccacttgccatgctcggtctccgtacgacgtggttaagtgccgagccacgtctgtctcaaggccgtaatgttgaatgagattgatgaacagagtcttggaccagccatgagctccgatcaggcgaacctggtgagtttggcatgagccatcgagcgaagcattgtcggcaaccaaaccgcgtccgccaacgccactgatatcggggacatcgtgcaattcacagggcttgagattgaattctttgatggcctcatcaactgcttcttcagccatctggcggtaagtcgtccactttcctccagcgcaagtcaacagccccgaggaagaaacagtgatgaggtggtt

SEQ ID NO: 11745 - DNA, 570 bp, Emericella nidulans
gcaggggagtcgtcgatcgcttattcagggaagggttcgaagcctgagcagggccagcttgaggagccggacgagttccgatgggaccgacagagccgatggggccagcgtttgatttcgactgcgcctgtctcgaggacggggagtccgccccaggagacgaagccgaagtcactggctgttcggcaccgtcatatttcccaaaaacggggttgataccagaactcggagaagaggtactgttcgcgcgcgaaggggattggatggcggacgggccagcattagtctgagtgatgccatcgggcccactggagattggaccctgactgaacgggtccacgctgcgaggggatgcgcctcggatgccagtctggctctcaggccgggagccttcgtcggcgagactggtaggagggaagaacgcggggctttcgttgccgtacaaagccctgtgctgtcgggccaggagctctcggcgactttcctcgttcacggcggctggactgagcgaacgatcggacttgccggcggacatttcggcgagaaggcctttcaggaaaaaaaattatt

SEQ ID NO: 11746 - DNA, 229 bp, Emericella nidulans
acactcgttcagcaataagactttgccaatgcgattccgaccgctttgatgcacacgccctcttgggagcccaatcacgctggaacactgttgacgggcataccctcctagacgcgggccgccgagcaggctccaaagcagtgacggactacagtacactctggcgccactgctctctgctagagcgggacactacttccccgtagagatgtgtttcaattggagacgg

SEQ ID NO: 11747 - DNA, 1480 bp, Emericella nidulans
tcaccaatctcctttcaagcgataagcttgatcaatcaattcacatcgctcgcactggcttcacaatgagccattcggctctcgacttgatggtttcattcgtggatcaagacaagtcaactggcagtaacagagagccatatgagggttatgtaaacaaaaaacgcaggcaaaaggagcttctagaactcgcccgccgtgcccttagacagtcttctacctatgaacttctgctcaataaacggcagaggaaacttatggtacttcataagcccactggtctcttgcttcggattatctgcgccccagataaacccgcaaccctcgagtatcttcgagacttccatgcagagtacccgactctcagctccttatatatggtcatacgattaattcttgaagtcagaggacttttcgccagcactcagaattctatggacaacactgaactgcaattactcattgccgccttcctcaaaatgaatcatggccgcttccgacgggatgcccttcgtggcgaatcgttgctcgcatttctatacactttcggcatgcaggtagacctcaccacaaccggtgtagccgtcgatcctccgggtttcttcactgcggagtccgtagcaagtgcctgcacaatgtacgatcctggtgatatacctgcttttctccgcggccaaagctcgctcattaaaacgaagacaaacgccatgaaatggggcaacgagcacgttggcttaaagcttttgatacaggacccagaaaattacatgagacatgcgcctgggacttgctcaagaacgatagaattacagcccgtttttctggaggcttatttgcgtcttaaatttgctcttgactcctgggtacctcgacatgttcggccattcaatagcattctcaattctgctttgcgtgcaaactttcatgactttgagggtcggagagcggctatacttggcagcagtggcaaaatatagacaaacctgataaatcattcaaagtgtcgtttctgcggcgcacaaaccccagtatgaatagactgtaggtggttacagatacatatttgtcttactatgtccgatgccagttcgccctaagtgttctcaccattatgaaccaacctatatttattagcatataaatatctacctgtatcaagtcccttgctcgatggactgactgaatttcggatttttaccctctagtctgattaccaatcagggctgccgcctaagagaagcctcgccggaagtgttgatgtgtatgtataaagagaaagagcaagatgacaacgcccgcttgaggtgatggttacaaaatatactcacatcaatcacagtcacgcctgcgtatgtgaaacatttatacaaacaatacagtagacagaagagagaagtcatgagaaagaccgaagtgatgaagggagagaaatggaatcacaccaatgatgcaggtgggttgaatcaatgcaaaacggcag

SEQ ID NO: 11748 - DNA, 256 bp, Emericella nidulans
ttggagaatgagctaccgggttggcgtaggcatatattaccagtgctcccattggtggagtttgtgtcatgctcaaacacaccgcgactcacgaccttaacgaacttctaatcggggcccatatcttagctaggatggcaattcacattaggtccgtgttactgccgtttgactcagaaccttgtgacacgactccaacagtgcttaagtcctccgtgtgaactgacctattagcccacaggcgtcccatgcgcag

SEQ ID NO: 11749 - DNA, 1433 bp, Emericella nidulans
catttgttcgcccggtcgtgtacaacctgtggttcataccaatcatgcttctagcttccagctgaaactcgatgctcgctagttctgagcgtacaatctcggacatgttaggtgtatgcaacgtcagcctcgtgattcggaagattgttacgatcaagtcttgcgacggacctaggagcaggctttgaccggtatggtagtctatcgagtcaaatatctcggaggcgcggtccaataaaagactcgacccatgcgtgaaagacgtcaaagagaaaaagtagcaaaaaacctccagcagaaatgcccgtaggctgggatccgccggggtggaggatatcctctgctgcaagaggaaagctgcggcattgagatgcgggagcagtcgacctgtatcagagaagttgtgggtctggcagtgtcagtggaactattcagttatttatctaagcggcagtcatacctcgtgcacgcataacaagagaaccgctagtacaagatcgtctgcccaattagccagtaggaactgggcgaaaacttgtatacgtaccagatacgtacgcctctgtagatctatacagctctctgtcaactgcagtcctcagcccagccacggctctaccgtatagttcaagagatatcattctcaattccggttcgtcaagctcgtacttcatcaagtcgccagccgacagcgccagcaaacaatccaaggtcaaagaatgccccaacgccgtgggaattacatgacggagaaactgatcccttcgccgaccagggctgatggacatccacaccggactgctttcggtgaaatgagccaagaggcgatacattatcggtcgactgggcacagcaaagatagtcaccatcccatcgagttcacgtgggatacctagtccgctcggccaaagtcggttccggcagatacggcgtcggcgacgacggcttcttgaatagacatcctcagcccattggcagggtaggtggttcctcgcacagcctctgcacgttggatgaacttcatcacacttcttcttgcggcgacgacaagttagacagccggttttggacctcttgctcatatgcctttgaggagtatattcgttctttttgagagcactggcatcggtcatggctagcgagtgtgtatttcgctcttgtgcgtggtcttatctgagacatcttaagacgactgtcacgatgactaagcgacgagcacatggttactgggaaaagatttacgcggtaaattttcccattatcgacaaggtatttatctctatggtttgcaaagcatgccttgagagcacttttatcatttttttatagtgtgttatacagcagacaccactgggcttaacaacagttcctcttccgtttgatccgcataggcagcaataattcgtttaaccagtaataaaaatgtctcatta

SEQ ID NO: 11750 - DNA, 548 bp, Emericella nidulans
tatcaactttgaattcatggcttgcgcggggcggcccgccaaatcgggaataagagttgacgatgtttttttgcacatgattaaactatcatactcagcgcactacaggatgctcgcggcgatgctggtcacgcctggggggtgagacttgtagtgattttggccatgaatgatcatggccagcctgccctgggagaagaaccccatgttctgatgcttaacctatgcggcgcccgaaatattggaaaatacccccggactgcaaggtaacattattgattttggggtcctacgacaatttaccgatttttaaaaaaaaccctctttccttttaaaaattaattttttttttttcaggagaggtggttaccttatttttaaaatatctattattcgttggggaggttaaacaccccaccctgtcctttttttaaagtaaccttttgatgggataatcatgaaaaattattctaatttccacctttccaaaatcaattacctcgataaactaacgtttgtgaaaagcatggttttaggtgaaaaacatc

SEQ ID NO: 11751 - DNA, 3593 bp, Emericella nidulans
cactatgttatttcaataagcgtcttgatggtaggtcacgcatatcaacatgctagagaagctagctgctgatggggttctttagaatgggtcgcttcttccaggcttgacttgtcccaagaggttgaatggcctcagcctgagaagccggaaaagaagaaatctggccctgcgaaagctcccagcaagaacaagcgcgttagagctggtagccgtgatgtctctgccaccccagataccctcacaggtaagaataccaatgtgggcaaggctcaacggccatcaaaggcaggcggaaaggagaatcgtggcgacgaaaccccggcggatctttccatgttggcttctgaagcagtttctgctgacggaacccccaaagcggtctccgaggatatagacatgatggatgcaagctttactgatgccaaggaaatcaaggaggaggagagagcgttgggattgatgtcgcgggaagaggagattgaaaagcttcgtaccagtggcagtatgacacaaaacccgacagaagttcaccgagtacggaatctagaccggctgcagatgggcaaatacgatattgagccatggtacttttctccataccctgcgtcgttttccgacgctgaagtggtctacatcgatgaattttgtctgagctacttcgataacaagcgcgcttttgagcgacatcgcaccaagtgcacgctcacgcatcctcctgggaatgagatctaccgggatgacaatatttccttcttcgaagtcgatggccgtcgacagcgaacatggtgccgcaacctttgtctgctcagcaaactctttcttgatcacaaaacactctactacgatgtagaccccttccttttctactgcatgtgcactcgcgacgaaactggctgtcatctggtgggttacttctcaaaagacaaagagtccggcgagggttataatctggcttgtatcctcacactaccccaataccaacggcggggttatggaagactccttatttctttcagctacgaactgagcaaacgagaaggaaaggttggctctcccgagaagccgctcagtgaccttggattgctcggttacaggcaatattggcgcgagacactcgtcgaaatcctcttggattctggacgtgagacagtgagcgaaaacgaacttgccatgttaacgtccatgaccgagaaagatgttcatgaaacattggtgacattcaaaatgcttagatacaatgcacgtgttcgtcctttaagtccaatcacctccttcacaggcaaaggcaagctaacaatattacagaaaggacaatggatcatcgtacttacggacgaagtaattgaagagcgaaacaaacgtctagagaaagaaaagattaagggctcccgcaagatcgaccctgcacggctccagtggaagcctcctgtgttcactgcgtccagtcgaacatggaattggtgaagaaagttcgcttagacttttccccccttcttgcttattttcctctcgttgattcagtagtggtagtagttttcttcatgtacagttattccagacattagcggggagggatgtggcgtttgagctagcgatatacctaggagtttgggttttagggtcagtgcgaatacggttattcattactactcagatgtctcaagattggttgggaactactaaatagcatagagtaggagtctcgtactgatatgcttttgcttcttgttcaccttgccgacgtggcttggtgggtttatatattacagctgtaacaattgatgctaaatcattaactggagctacaggacgtgatatcacttcaactgtgaaatctgcaagatgcggcatcgacaactcgatcgtaccattcttcaacctaaaaaaatagtacttgcttccgttcagactcttctttaactaagagaagcgagagacgagaagaaacacgggatgagtatatagaccagctagccagctggagtatctagacgaggaaaatcaatgcgcaacttagtcgcattcgatactttaaactcagtatgtaaccttgcaatcccttcaggctcgagtcggaagatcagttggcgggtcataacgagtaacgcaacggctgccttcgagctggatacagaagagaaggagtaattgaataagaaagaagatgcagggaatatcgtacggtaaaggacaatacaaaagaacatatgctagagaacccgaatgaatcccatctgtttccctgcaggcgtacgtagctcatttcaaaccctcaacgcaaaaagcctggactcagagaatatactgagtttgagctcaaaagataaaagtggaggatcaagtgtcttgtcctagagaatagaagcaacgagaccctgctgagagcggcctgttcgatctgtttattgagctgaacgcagctgtcgctgtgactgactgttcccatttgtttgctgagatgcagctctcttgaagttcgagccactggctccatcgcgtggtttcgtattcttgcgagatttgtaagaagactgtccgcgcggccgaggactgggataggagcctgctttccgcggggcagctactgattttgcctccacggcaccagggagtcggattaagatctgattgaccgctgaagcatttttatcacggtaaccaatccagaaaggctcaacgctctggatttgcattgttttcagaaccttggcacgcagccgggcttgagatggtgccggtgcagctcgccaggcggcaggaggagccatcgtgggcactcgtacaactggtagggaaccgacttcacggtcctcgaacattgcctcggcttcctcgacttgtctagcggttaattcaccgtcgccaaattgggtctccccattgaaaggaagcgagacagaaactgccgtgacatgcagctggacatcgaggggttccttcgaggcagacgaaacagccagagcatgtcttttctccggcactgttttctttccgaaaagggtattgattctctcctgccaatttggggcggttgaagcgggattaggacgtgtattagaagcaaccatggaagcaaacgtgggcggtggaaggtggtggcacgaccaccttcggggggagcttgacaactggcttcggtgcagggagatgcactagaggcctgtttgaatcgccaaagtttgctgggtgagtccagacctcttcggaggagggggctatgggctttgcataatgctcacttcttcaatccccgcttttttattctcgattcctgtggaaggaattcgaacctgatttggcttctttcaaaaaggcttgctttgccttccctattggtattgaccctccgtttttacatgctccaaatctttctacataagtttttctattcctactttatcctctattttttattcctattatttcctcttatcttcctcatctctgattttttccatcaaaacttcatacactacttatcttctcactttcatttcctttcactatattcctttacttatacttcacctcccttcctttaattccttatactctttcatccctatcccttttatctcaattcacctctt

SEQ ID NO: 11752 - DNA, 191 bp, Emericella nidulans
tggtggagtcagcggcgatgcctctccccatagcgggagttccttgatgcgcatccattgtgctatgcatctgagtgaccttgttggtcagacacctagagaggtgacgccctcactaggatatcattccccgagagatccgccgacataaacagtcaacgaacgcgtccgccttggctatccgtagattc

SEQ ID NO: 11753 - DNA, 2375 bp, Emericella nidulans
  unsure (1)..(2375): unsure at all n locations
ctctgcgcgccggtccttctccatccttttcttgaatgtgtgatctttcaaggcattgagaaatgctgcgaaagttcgaacaaccagtgggtcttggtattcttttcttctctccttccccatcagaacccccgttaacctcttttcgagctctgatatgaagccgtgagggaatctggagcttttggaatcgcggataagtgagaaatcgctcatgagatcctggaacgaggtcgaagcccgcttcggccgcggttgaggagccggcgcattctggacacgccgtgcacgcgggtgaagaagatgtgcgaggtacgcagtgcggagagcgtaggagtaggctgttgaggagctcaccgtacgtcggcgagacagcgagaggttgcgcgagtgacgagcttcattttgaatgctgtttacccgtcggttcacgcctcgggattgagtggacgctgtagacatgagggttgttcgctacctgaagtatgtcgaggggtgacggggtgcgggaccatgggacaccagctgcagctgggcagggtacctgtaatagcccgtggcttttcttgctcgttaggccagcaagaagtgattataaattatggattatggtgttgggacaaaccgagcacttggagcaggtgaagtcaataagaagggggcgcgttgttgcggtggaagatcattgtcttgctggtcgctcccgtacgcctgaaacaaaacgatcaggcttcacccccgtcttaaaaatagactgatgtaggcgccgtactctgatatcagatgctacaaggctgaaaggcactactttggcaagtaagatataatccttttacgataatttaatagagccattcaaaaactttaacggtttgcatgacctatttgctcaaccggcggatcataaaacaagccatccttttacacaactacggcatataaattacctcctaagcttttttctctatcatgcttcttcttccttcggatgacggtaatttcattttagcggtccgagcattttagagcatagcccgagatgtaattttgccttcaagccccctgcaaaaatcagatattcgaaggacgccgaacaaatcgcattgtatgtatttacacgttgatacaagtgttattaccaactttcctcgccggtcttgcgggcctatacgtcacgtaatgttagagttcgcttctttctctttctctgtgttcttttagttacgaggatcgtaacccaccggaagagcatttgggcctccgagctccttctcaagaccgtcggggaacgtcctaggagcggaaggcttgtcagggtagaagaggctcacggcgccacagagcccgaggaatgtcacaacgaaagcaccaagctgcaacagacctttgcgagcagtcacatgagtatattgctcgggactgaagacacctagaatttcattctcctcgtgaactggctcgccgaaattcctcctctcctgcttgtcccaccagtcggcattggggtctctgaactggcgcttaattcggggagggttctggtagccgtcattctacgcgaaccaaagtacgtcaattgcatattttcagaggctggagggcgtcataccatcaaagggtcatcgttctcggcagcctttaggggcacgaacttgtgagaatgaagcgcgggggacggtagatcgaagggcaacctggggcaggcgccgcgacaaaagacgttgagcgagcatctgtggaccggaatcagcacaggaagaacagggagcttcataattaggattgtcgccatataccagaccttttcgctgctatgaattgaacgatgcggcttagcgaagggaggagcgaaaggctcaattgaccatgggatgaagttgcggatgacggagaatacggatatgtaactaaatgcccgcaaggacagcgcgggcttagctacctacaccntcgccgctggagaaatgccttgttgtgaccacctggaaaaaaccacctttttgcaattcatcgatttaatgacttttcccttgcaaccccccccctgtccatactttgcagaatttggtgggacctcaatcaataccgtaccggtgagggaaataaccttcacccggttttttggaaattgggaaattataaagggcctctttctggtcaaacttaaaaggaatttgtttcccccaaaaaacggggagaacgcccctctctgttcacaaatttccattatccttgttctctgcgaaaaaggccccaaaaaaccccctactaagggggcccccgcccctcgagccccctgaaaggggcctccctaaataggtattaaaaaagtctctcctccccacaccccctatatgttccaaaaacttttatcc

SEQ ID NO: 11754 - DNA, 183 bp, Emericella nidulans
gtaggatctaccgtctgtattcccccgatacactgaacaggctgcatcttgtcttcggcggcaggtagtcccttgtcttcctccggtacattccgctggacgtccttggatagtctctcgagttgctgttctctaaactgggtaggggcgcctcctcatggcgggttgctctccattccgcgg

SEQ ID NO: 11755 - DNA, 2979 bp, Emericella nidulans
actcacctcgctgtccacaaatcaaatttacgtctggactgcatcttgcgtctcccaaaagtgctgagggtcgtctgacagaccaatccgccaaactcccgtacttttcccatttagagtccagacttcagactgtggttgcctaccctggggtgcaggtctgagttgagcgagcgaaccctccaggctcaccggccccgcgaccccaagcttcaccacacataaggcttatcctgcagtgaatcagatggttggaatatgcactgccaaggtgcatcctccgcagtcttattttttcaagtcaatattcaaaatcgaattcaccccggatttcggtgagcaggggcaagtcgctcgacacttgctctttagattctctcgtttcaacagtaagcgtgcggtagccatgttattagcctgcaagggaacagcatgtggatttcggaaagatacacaactccatgcgaacaaaggtgaagtaataatacctaatagtggatgaattggcctcgaagaaaccatatcaaccaatttcgtccgtattgcgaactaatacaggcgttattattgatcagtgtggaaatatgacgatactgcgtgcagtttcatctatgtcgtgacaccagccaaaagcgcctcgtcgtgagcttagagggaatcgcgggaggcccgagaggagctctatccccttctcggtatgaaaaggtttgacgcccgcctagatagcttcccctctcctcagtagggcgctttccgcggctcgcctcttccaaatcactagactcacgagcccagcctcttctgtcatgctacgacgacggtgacttcacggcgctctagttggctagtccatccctctcccgttcgtcccgaactcaaacgatggccaaccaaatggcctgtctctccatgtcattcttgcgactgtgaccgccctccgccatccgacttgacgaaggatcagactgaggcagaaatgacgccgcactgcatcaccgtgcgcaccgacttccggcagacgtttgcgatcgagtttccgggggattctcaccggtgctggacaaggacttctcgcagcaagtttaacccagtgaggcaagaatcacagaaatagcacgtcagccaagcctttcccgggccatcgtatacagcgatcgaaagaagggtctatctacagagtacaggggattggcccatgcaataattggattgtacttctttctgccttctgttttctgcgtcattttttttaacttggcccggctaaagaagctggaattgagctggagttaaaacttcgcattggaggttattccattgccgttactattacctgctactactaaccagatacgcagaaattgtcgacgactccgtaattagtggaggagctcttatatgaattggggtggagctgataggcaagctgctgtcctgaaccaaactgttcagccgaggctcgagatttactccacaggaaaccatggaaccaaatgaactcctaacagacggcggctctcatctccttgcaataatgaaaattaaagcgagcttgtctcactgttgaagttggacacagtctctgatgcttccaccctaccacacctatagatattatcccaagttgcagcattgaggtcaccgccgagtcatattaactagcgaccgatcgtcgtttcgtacagtattaccggattcagaggattcggggaaaatcttggcgatctttacttctcttactccagccttccagaccacgtgagacattccagaccagacgagccatttggattctctcaggtcatttgtcgggcgtcagtcacaacccagcagatatcgagccgctggtcagtagaatagttgcggtatcagagagagcagcagccgcggctcgataagatcgataattatatcgcgcacgccagaacaaggccatgccacctctcagtctcctttagcctgagcggagccgtccggtaccggagtaactttgatgccgcgccttgtggacaacgctgatttcgcgctgttctgagtggtcaagtggctcgagtccatcccaccgtcaagaccgaaagcaaccatcgtctctggggccagctcaggtaccgtcacagtcgtgcatgatcgaatccgtctgatccgttctcgacttcttctagaatgcttcgtgggtctagcggcttctctggcatcagaaattcgctcatcccgtgacattctgaccttcatactgataactgctagatactaccttctgcgcaagacatcctagcagatgatcggaaatcggcatgacactcagaccaattggatcggctcattgcaagcgccactacgtcatgattgaaaactccatcggcagcccgaatcgactcttcagcccgtgcccggacggggcagccggggtaaatgcacgcgggcgtcctcgcgtgattatgtgatggatttctgtttccggggcctaatataatcgataatatgtacgaggcagaccgtctgatacggtacaggcgtgcggtgagcacccgacgcggcattattacgcctggcttcggcagcgagaagcgaactacctgactcggttagcggctcagtctgtattattctttacccgttgcggtaggttacaaaggcacgaaatgaatccttctctccagtctccatggggttgattcacgtccgagattcgttcccctgattgataggcaaagccctgatatcacagtatggggtctcggtattaatagaatctggacaacttgttagacgtcgaattgcaatcgctgaccagctccagagcaggactctaagatggactattgagtccggtgcggtcttggcttctgtacctacagtagtttacggtccggtgtacggcgtaccagactttacgccatacagctgtatgcccacccactcgcctcgttaagaaagcacgcgctatccctgattcgagctagcccatttagtaagagg

SEQ ID NO: 11756 - DNA, 475 bp, Emericella nidulans
tttctttacataagtcgaagatcctctcccgacggcctgaagttgacatcattcactttgtttttatactaacatcagaggcaatgagtagttctagaatggttctttgaggtgtctgatctctgtgaaattataccccatggtctattcaagaatattttacgtcgacactgctacccgctcggggacgccagtagctattaacacaatatgatacctcctaccggggccctgagcatagaaactcatctacaaagtccttctcattagaagaggccaataatactccggttctagctttctaattacattcgattgtgaaaaacctgagccaccgtgcaattatatcagatattcgcgtattgtataagccaacgtttttatttttgctttcaatacattccctttattacttctaactattctttcacagcctaggaatattactcccaaaccacaaggaccatttgtgtca

SEQ ID NO: 11757 - DNA, 138 bp, Emericella nidulans
gggcaagaatgaaaatgaggctgaattccacggttaattaatctacactgcaataaataactacccatgacatcgggaccgtgaataacatcatacgtgtgttgacgagtcatatgcaagaagcatggattattgata

SEQ ID NO: 11758 - DNA, 4018 bp, Emericella nidulans
tcggacggctggctaactgagtatcccctggctagtgggtatctataccgacagcgtcctcaattcctaccgagggaagaaccggctcgaagtccctccacatgttttcgcagttgccgaatcagcctactacaacatgaaatcgtacaaagacaaccagtgcgtgatcatttctggcgagtcgggtgctggtaaaaccgaggcggcgaacgggatcatgcagtacattgccagtgtttccgggggaagcgattcatctattcagcagacgaaagacatggttttagcaaccaaccctctactggagtcgttcggtaacgcgaagacgttgcgcaacaacaattcctcacggtttggaaagtacttggagttggagttcaacgcccaaggcgagcccgtcggtgctaatatcaccaactatctactggagaagtcgagagtggtgggacaaattaccaatgagcgcaactttcacatcttttaccagttcgccaagggcgcgccgcagaaatacagaggtaaacttcagtggctttgatctggtattgcgcttgctaatctgatacagactcgttcggtgtacagcagcctcagtcctacttatatacgagccggtcgaagtgtttcgatgtccctggcgtcgacgatgtggcggagtttcaagatacgctaaatgcgatgtctgtcattggaatgtcggaagctgagcaggataacgttttccgtatgctagcagcaattctgtggatgggtaacattcagttcgccgaagatgattccggcaatgctgcgattacagaccaatcagtggttgacttcgtcgcatacttattagaggttgacgctggtcaagttaaccaggcattgaccattcgcatgatggagactagtcgaggtggtcgccgtggctccgtttatgaggtgccactgaataccacccaagctctggccgtacgggatgctctggccaaggcaatttacttcaacctcttcgactggattgtaggacgcgtcaatcaatccttgactgccaagggagcagttgcaaattcaattggcattctcgatatctacggtttcgaaatctttgagaagaactcgttcgagcagctatgtatcaactatgtcaatgagaagctgcaacagatcttcattcagttgacactcaaggctgaacaagatgagtacgagcgtgagcaaattacgtggacgccgatcaagtacttcgataacaaggttgtgtgttcgttgattgaagataagcggccccctggtgtcttcgctgccctgaatgatgcttgcgcgacggcgcacgctgactcaggagccgcggacaacactttcgttggacggctgaacttccttggacagaacccgaatttcgagaaccgtcagggccagttcattatcaaacactacgccggcgatgttagctacgctgtccagggaatgacagacaagaacaaggaccagctgctcaaggatttgctgaatcttgttcaatcgagtagcaaccatttcgttcacactcttttcccggaacaggtcaaccaagatgacaagcgccgaccacctacggcaagtgacaagatcaaggcttctgccaatgatctagtagcaacgctcatgaaagcccaaccgtcatatattcgaaccattaagcctaatgataataaagcgccgaaagagtttaacgagagcaatgttcttcaccagatcaaataccttggtcttcaggagaacgtccgcattcgtcgggctggtttcgcgtaccgccagactttcgacaagttcgttgaacgtttctatctgctgtctccgaagacgtcctatgccggtgattacacctggacgggcgacgtggaaacaggagcgcgccagattctgaaggacactcggattccggccgaggagtaccaaatgggtatcacaaaggtatttatcaaaacccccgaaacgctctttgccttggaggctatgcgcgaccgctactggcacaacatggctattcgtattcagcgcgcatggcgaaactatttacggtaccgtaccgagtgtgccatccgtatccagcgcttctggcgccgaatgaatggaggacttgagttgctcaaattacgtgaccaagggcatacgatcttgggtggccgaaaagagcgtaggagaatgagcattcttggttctcgacggttccttggtgattacgttggtatcagcaacaaaggtggtcctggagagatgattcgcagcggcgcggctattagtagtatgtattttcatgaggtttcgggatgatttttctgacttttttagcctctgatgatgtcctattctcctgccgcggagaggttcttgtttcgaaattcggtcgctcaagcaagccttcgccacgcatcttcgtcttggtatgtcccttattcgctgtaagagttctctctaacatgcacagaccaatcgacatgtttacattgtgtcccaaaacttcgtcaataaccaacttgtcatttcatcggagagaactatccctatcggagccatcaagaccgtcagtgcttctagctaccgagacgattggttttcgttagtggtgggcggacaagagccagatccgctctgcaattgcgttttcaagactgagttttttactcatctgcacaatgctcttcgaggtcagttgaatttgaagatcggcccagagtaagttccgttcaacctggatggcggcccttattaacaacggtaggattgaatacaacaagaaaccgggcaaactagccactgtcaaggtagtcaaggacggatcgcaggttgacagctacaagagtggaacgatccacacaggtccaggcgaacctccaaactctgtctccaagcctaccccacgagggaaacaagtagctgcccggcccgtcacgaaaggaaaacttcttcgtcctggcggtccaggcggtggcccgtccaaactggcttccagacctgtaccagagcgtcggcctataccacagcccacgcctcaaacagccgcggcgcaaccgacaccagcgtccagacccgttcctcaaccagtggcagccgttgcagcatcccattcacgtacttcatctactgcctccgcaagggcaccacccccgcctcctcccgcaccacctgcagctgcaggaccgaagaaagcaaaggccctgtacgacttcagcagcgacaacaatggcatgatatcgattagcgcaggacaaattgtggaaatcgtttccaaagaaggaaacggtcagtatatcttttcccaaattattgaacatcttcctaacacttcccaggctggtggctgtgcatgaacctcgaaacctcagcgcaaggctggacacccgaagcatatctcgaggagcaagttgcacccacgcctaaacccgcacctccacctccacctccagttgctccccgagcaagcccagcaccagtgaatggatccgccgcagttgctgcagcgaaagccaaagcggcgcctccgccccccgctaaaaggcccaacatggcaggccgtaaaacagcacctgcgcctccacctgcaccccgcgatagtgctgtcagcatgaattcgcaaggagattcttctggtgcaagtggtcgcggcaccccaagcagcgtttccaatgctagtcttgctggtggtcttgccgaagccctgagggcacggcagagcgcgatgcaggggaagcaggatgacgacgacgactggtgatcgttttacttcttctttaccctacaattcttctttttaccctatcctataactttgcttcggccactagacggttttttattctgagttcgtcgccaagttcccttcctgtttcttgttggtctggtccttttctctcagtttctagaactctataccactaaagcgaccatctggatttctgagacgataccataccatacctgactcgcacttgtttgtatacctgattatttttctttgcaaatcagccgcgaattcgcgattgatcgtcattgtatg

SEQ ID NO: 11759 - DNA, 172 bp, Emericella nidulans
tattgagtggatggatagaggggtgtgagatgggaagccaaaggttagcttaggggaagactatgaatgaagaagagtatatggcataatgaattaatatgaataatgtaaggctgcggacgggacttcatgaattggtagaataggtataggagagaggatatattgggag

SEQ ID NO: 11760 - DNA, 106 bp, Emericella nidulans
accccaagagacataggctggagcgaccccacgagtttcacgtcacgcgaagcaagcgccagacagattggagcacgaccgtaccctctgcgtcggcacaggacag

SEQ ID NO: 11761 - DNA, 189 bp, Emericella nidulans
  unsure (1)..(189): unsure at all n locations
cacgaacgcgnggaaggcgagggccaaaagggacaccggcaacgaagtcgacccggcaaggaagcaggagcaacggcactccaaaaacaagagagcggggcgggttgcgttagtggcgacgangncnangggagcaagngngncnnnacngnnncngcacgaccccaccgcggnccgcganaacgggag

SEQ ID NO: 11762 - DNA, 932 bp, Emericella nidulans
cactaatcctgaaaaggatctaagtggacaaacgcggttttccgcgtctctcaattcttcgagctctgctgcgagactgtcggccattgtttgctgagtttcgccgatattgagttcaaactacttatttaagacagatgtctcccgcagcagcagcagacgatgttgattcacagactcgcaagcgaaatgccctcaagcgcgctgagcagtggatgaccaagggagggatcattcgcgaggattccgacgatgaacttggcgaagaagaccttccctgggagtggatctacgacacagaattggacaataatgaagaaacgggaaagggggtccaagcctctggggagacaccaaagtcgtcccggagacgctcctcgcgtcaatcgcaacgaaagattatcggagctcgaacggggcctttcgagtgcagaataggggataccgtgctactaaagtccccagagcctgggaaagactgggctggaatcattactgagtttcttgaggaagaagatgacgaagacgatgaacccatcaaatcggcaaatatcatgtggtttgcttccccggacgaattcatgtcgacgagaaacaagcgaagagcagatgctttgccaaacgagcaatatttgacgacggacttcaatgtcaaccccctgaattcaatcaatgggaaagcacaagtcatgtccaaagatgccttcttcgcgcgataccccaacggcgctgctccgaaatcgaaggcggaattggccgagtacaacaaatgcattgtctgtcgcaggggcgtcacgaactccagggccgctacacggaggagttcgtttgggaagacgtctaccaacaggaccaaatccttgagcttgtggatctaatcaaggatggcttgaaagcagccaaaaagagaaaacaggcggatctgatgtgag

SEQ ID NO: 11763 - DNA, 2000 bp, Emericella nidulans
ctacgctaacaactactgggtttgtctatcccttccgatacccactccccaatatctgaatatcggcaacaaaccggataccctagcactcccacttcagccgtcttaacatctcgcatcgctaacaaccactattagtacaacctgaactcccgcgctccgtcaatccgcttcggtaccggccacatctacaacaactactacgaaactgtgagcgacggcatcaacacccgtatcggtgcccaggttctcgtcgagggtaacgtcttcgtcgacagcaagaaggccctctactcgactgacgaaggatacgccgtcgagcgcaacaacgactttggtgatgccaagaacgaggcccttgagggaacccttacctccgttgaatacgagtacgacctccttgatacctctgaggtcaagagcgctgttgttggaactgctggtcagacccttactttctaaacatgagcttaacacctttttttttctacttggactcgctcttttgggctgctttcttaggttgagtacggacaatcgataacagcgatagcatatatatatgtacctttggattggctggttggtctggctggctagttctgttacatagcactcaatcgatactcgtaccgttactacttttcgtcgcggtatccgcagaagatagctagagtagtccttactgaggaaaacagtcattggcgaagagtccaatgtctctgtttggcatgtactctatagtttggttatattcgaccttgtccagggatgattcaatatccagaggtaacttgatatcggggaatgttaaattcaaatagaaatcgtgtatgtataatcaacaaagtccagacgatgttcaagcgcaacgagcaaataagaaatctgatataaccgaatgcttttccgttcatccatgccatgcaatgcaaatgtaatgatgcttgccaacatcagtccagtccagtccagtccgtctagatatcacaagaagcaaacaaagatccctaactataagccaaacccaaacccaaaccgagtcaaacaaccagactatatacaaactctactgtaaggcaaccgaatcagacatcataagcgtcaaatctccacgcagcgtccctagcagcccggttcttcctcagcacccacggcatcgtccactccttccaccggccctccaggaagcccatgtcgcggtgagttgcccacatccggcctgcagcggaaaaggcttcctcgacaggtccgcggcgatgaagctcgtatttggtgaagacggtgcagaggggctcgtcgcggtggtgggcgaggatgcggcagaacatgatggcatcgtcgagggcgtacgccgcggattcgtctcgcggaggcatctggttatgtctgttagtcgtctcgtgggaagggggagaggataagaaacttacggcatgtgcggcgtcacctagtaggatgacacgccctttccaccaccgtccacctggccggacttggtaaacgggataaagcatccagtttgtcttcagattcgcaacatcccgaatccaagggatccctgagcttgcgaagcgcgagtgaatttcattttgaagggcggcgtgaatagcgacacggtgacggggatcctttacgtggtaaccgtccaggcggtaccctggtaagagggtctccttgatctgaactatggctgcgaggaagagggtggcgtggttgcggtcacagtagctgccgagaagatcgccatggcggtagagagcaagaccggttgtgcggaagggagggggatgcattgtcggcggcattgtcggcggtgcggttgaggaaagggttggcgaggagttgagggagtttgtgctgacgcttcgagttgtcctgccgctctttgtggaattgtgcgtgcttccgctggcgctggtgctgctgcttggacggctgagactggttcttgctgagccaggaggagggggaggagtgtcgatggtggtctggatgaa

SEQ ID NO: 11764 - DNA, 2551 bp, Emericella nidulans
atgccatctttgtgaatgctcaactcactgatctgtttttattctgtctttgaaacaactaagttgctatggcaacgcttctaacctaatttacggtggtttagggtgcgtattagctgttgggttaacaagtgtattctaaaacgcctcttgcacagtttgttaaatttaataacctgcgtggtctactattaatattatcccgcaagacgacgcatatgaagacaggatcatcattgattgcttgggcaattgctgctggcgcttcactagcctggtgcgccgaggtgccagcccaacgttcatacgtgtatgttggaggacaatatacgcaggatagcgcaggccagcatgtcttcacaaatcagatgtatgtggaaaagctgatgccaactactggtgtgaccaagccgtatccaatcgttttcattcacggacaagctcaaacaggcacagtatgtatttaatgatggcgcataccttttctgcaggaaaattaaccgtgacgaatagaattggctcaacaagcctgatggaggagaaggctgggcatcctacttcctctctcaaggatatgaatgctatatccttgaccaaacttttcgcggtcgcagtccctggttccctggcaatgggacggtgagcacatatagcgctgagctgttgcagcagcgcttcactgcaccacaacaatataatctctggccgcaggcctccttgcacactcaatggaacgggatgggtgtaatgggcgatccgatattcgacacttattatgcgtcaacggtcgagttccttgattcagcgacctaccagcaatctactgtccaggctgccggcgctgctctgcttgaccttattggatccccagttgtccttctctcccattcacagggtgggccaattggctggctcattgcggatatgcgcccgaatcttgtgcactcaattgtttcgatcgagcctacgggccctccgttccaggaggccgtattcagcaacgcctctgcgcgcccttacgggcttaccgatatcccccttaccttctcgccaccggtgaccgatccagccaatgatcttgttaaaaagatcattccttccaattcgtccctgtactcagactgtgttatgcaggctagttccccttcaccgagacagctcgtcaacctcgcacacgtgccagtcctggtcgtaactaccgagtcatcctatcatgcaccgtatgattggtgtacagtgcagttactgcaacaggcaggcgtatcggccaagcacctgaagctggcggatattggcattcatgggaatgggcatatggtattcatggagaaaaatagtttgcaggttgcagctaccctagggcagtggatagagcgtacgtgatagcagccaggggccccgaatcaattagctgctcacgcggatgcctttgacagttaggcaacaaaatagagatcttgtgttcaggctaagggaaaattaagatggaaataaagatataacttgcaaagagaaaaatttgaccataacacccgttatctagtaggctacacgccagcaacattatacaggcaaagcccgctgatatacacaggtatagttctccagcgacgcttccagcatcaattgaaattattgtatttgtggtttcccacgggtcaccgctctgttgtagctagagaaccaaagacgtacagaaaagtttaaaagggctgaggtatctgacttcagacagaggacaaatatagacagacaaatccagagcttggccacaaaagggaacgcttttgtgtagagtgagacttcccgtcatccatctcgagagtatgtcgactaaccttgatagacagcgacctaggcagacctcaaccaccatcatcttccagtcaatctcgaagtaagctgcagagctatgtgttgcatggtagtgatctcagacacactgccaacttcatcacatgtcaatacggagcttctcgtctcgtccagcgggagttaacaactccggggtcacacgactatcttcaatgattgaatattttaccgagtgtttctatttgcttcgggaatctcctaatggagtctatagtcttctctcaagaaagtccatcaagttagctcctgaaaaaccgcagcgcagcttgtctgacgtctaggtgtgataattgttattcctatctacttcctaattttgactacatgggccacagtgactgggtgcagaatgtttctaggtataatccatgttctgatattgcagtgccaagtcttcagaccaaatagatcccaccgtaccctttattagtggcctgttctataattccaggtgaacgtagcactgaataaccggtgagtcgcggctagaatggactaggactagctctgggacaatagcattatcgaaaacctctaatcatcagccacccatcttcccatcgaacaaaacgggcctttgcaaatctaccggcagtacaccatcacgatgttaatgcggctagcagggagcggcgatactgcgggaaccttatgacgacagagtgtgtggcttgat

SEQ ID NO: 11765 - DNA, 468 bp, Emericella nidulans
gcgactgtatccgacgtatcttgaaggctcctcaccggctatggtgagtgcttactgccacacagctgttttttcatggcctcgaactacgctaacgtctgtgactacgtataggtgcatatagacaactctttgggtaactgttctacccaggatatcccacctggcccgtggggtgttattatccaaccaccgaagctcctgtacccgatctcgtagaacagaagcggcctgggctcagaaccacgtatctgcaatgtgtacaccccaacctgatgagagatcatgactgatacccagatagttcgagaccccttatgtgatgtcagtgcgggacaaaatgatgccacattatattccgcctcatgcattcctggacaatgccttcttttagagttatccggagtgggtattaagtactgaaccactgccctatcggtctatagttattggctgcgtgaacccccg

SEQ ID NO: 11766 - DNA, 458 bp, Emericella nidulans
ggagaggacagagcccagagcagcgaggaaaggagctgccaggccgaaaccaagggcacggggcggcagagggccgagcgcgagcagcacaggcggaaaccagaggaggacgcggtagcgcccagacgcgagccaaggccagccgacaaacacccgaagcagaggcagcgagagtgcacgtgacagcatgagcagccagacaaggacggcgagaagcaaaacaggagggacagaagaccaacaagcagacacaagcaagcaggccagcagcgttcgaagcacggaccgataggcctgagacccgggcacacggcaaaggaaggcgcgacgcagggccaaacaacaagggaccgacagaggacggaacaaccatgcaggaacaggagcgaaatacagctcaaatgcgggacaggacgaggcaccagttcggacgccagcggagcggccagaagacgagg

SEQ ID NO: 11767 - DNA, 522 bp, Emericella nidulans
cccccgtgtgtcgctcgcctgacaatctccactcaacagcgctccctggctgtttttgagacgtgcttacctatgtcttccgcgagatgggcgcgaaagacatatgcctagcgaaagtattcccacatcgcgtatacggcagggctagatccacaactctcattgcaccggggcgcagcttccttacactaacggaagacatatgtaccaccagcttaggcaggacctcttctatctacctctcgaccgcagtgacgttctgagcaatatacaccatcccacatcccagcattagatagccatttatataataaactggatggaagctagcttcacttccaggacctggctaataggctcgagccgtatctgggatgggatccagcgttatcgagattctagcccttggtgttgagaactatgtcacattcaatagcgagctgttggtaggcaaattggagaatggtacttattgcttaaagcagcattcttggtcccaagaactttcttgcattgctcttg

SEQ ID NO: 11768 - DNA, 489 bp, Emericella nidulans
tcgtgatgcggcgcgggagactggaacagaaggtggctgatgatatgcgcactctgcctggaaagaggagaccaatgatgcgtctacgctgctatcaattcctactaataggctaaaggtgctagctcgagcactgtctggacgtctaaggtaccaacagacgcatcaatgagcggaagcggaacctggacttctgcgatcagagcttcgacaccgatacgagcactggtcgcaccgaggtgtatcaccagcgttccatgtgtttggcgaactggcgaactgatggccataacccctacgtcgaccaatgagatttgaacacttgacggctgccgtgactcccctgcagatgataccactgacaagtgcgaccgtggtactcggagctcggcgcttaccgatgatggaggacccatgttgcgaagtacccagaacttacagccctagccgtgtcgcagaacgttttcgagctgcggacccaaagacgca

SEQ ID NO: 11769 - DNA, 2609 bp, Emericella nidulans
gggggatgagcaatgtgctcaaagatcggacggcgccgttcccaaagcacaggctttggatcgcgcggatctagaatcgctgctgtaggcctcttcgctgcactcttatactctaatatgggttgctgattatcattagctatccgtccagctgcgtacacgcttatcctatgccgctgctaggatcgagaaggcgcggcaatcgcagtcgcaataccagtcgccaacgggcttgctgcagaaaaatagctcgactccaatcctcagcgtggagactttgtctcgaactgggcaaccgtcactgggggaacctggagatcagttcgaagctgggtcgccagatgggactactgtttccgccccagatgctccagcagcatctagtcgccatccctttgaaggtcccatacgccagactctcaacgcaacgattgatgtaaattcacagacgcagccagatctgaacaaacatgcagagtatcatccagagctgcggcctccacggctggccccaccagcggacattgacccaggtcgtgtgaaccgccaacgacgtcgcccaaacccgaacaatcctagcaacccttcacgttatgcacctttccctctccatagacgtggccgctcgcaacaggagcttgtggctgacacggaggtcacccgagtgcccgaaacaccgccgctttgtccgtctaacgataacggtatcccttttcacggatggtctgataattcgcagagctcctcaatggagcaagatgctatcgagaccttgcttttcatgtctagcccaggaacatccgggtaccattcaaactcccagaattctcagcgcaatcaagatgtcaggaatatagatgatagcgcttcgcagagcgtgaagtggcacggctcacttaatggcacccaatccgacagacagtctggccttactgggaccgtcgagactcgaactggggatgaaattgatctcatgctagatcagatgaacagcgacagtgatgatgacgctgattataccttcagacgctctatcagggtcgaagcaggctcgagagccaatgatgcagttgggagcaatgtccagcatgggacataggatgcaaagattatcctgagtacgctaaacttctttctgaaaccttgcacgattcttcggaagtatgaagagctgttcctccgcgcgacctaggcaagatggactgtcagtggctgcatgctttgagagctaattgcggctaagaatccctttcacaatccgcccgggagtgcattaccccggacagactccgggacacatgaatagacccacggagccagccacaatgcatagccctaaaggtacagaaggaggtccacctatatgctactgctggagtagaaatacccgcagtcgctccagctcccccagagtctcacagagctacgtcgcagattgaatacttcttttcatcttgaggcacggcttccgtcacctgggcagttctacctaccaattcctcccaaaggactcgagagattacctaccatctatccgtaccctcaatccaggaacttgcaacaagtcaattggcagcaaatttcaaaaatgagcaacttgcaaccctcttcatccgagccatctattttcgaggtcggcgctttcctccccggggggcacaacaccgaccccgcgctcccggaaaatagccccacggcgggcttcaagctaaaccacttcatgctccgcatccgcgaccccaagcgctcgctccacttctacatgaatcttatgggcatgcgcacagtgttcaccatgaacacaggcccttggacaatctactatctcgggtacccatcgactccccaagaccgcgccgacctccccgcctggtccgccaaagtcggcggggacaatagaacccttacgtcaacgctagggctacttgaactataccatgtccatggttctgagaaaccgatctctgaagggggatatgagatttctactggcaatgaaccaccgaatctggggttcggccacttaggatttacagtgcctgacgtccctaaggctcttgagagattgaggggcgcgggcgtgcgcgttatcaaggagcttagtgtttcgacaagggaaagtatccctcttagtaagtgggaggaggagcgcggaatcggggttggcgagattcatccaaattataaggctgtcttcgatcagattgcttttgtcgctgatccggtaggattcttgttctctttccgttcctccttttggttatactgaactttgctgatagagtgaattaggatggatatactgtagagcttgtaccacagacgatgaactaaaatggttgattggcagctacgagcagttgcgcttatctgtttgtcaggctggttccttctgggatgccaccaaataatctatgtattgagaaagcttagtttaagctcctggaataggcgccttcagcatgtattaacagcagcatattagagtaacacccataaaccgctcattactgagcaagccaactcttatattaatcgcaatcagccaaggaagggcgctgcataaagtacatcgatctaaggatccctttagtagggttattcgccga

SEQ ID NO: 11770 - DNA, 1575 bp, Emericella nidulans
aatttgtcggtaatggcccaattgcatcactctttttcgacgaagaccgcgagattgcaacaactgcgtcactccccagcgccctcgcaaacagtaaccccatatgccctagtccgccgatacccactattcctacgcgtttcccgggtccagcgccaaagcgtcgtagcggcgcgaatacagtaacaccaccgcagagcaacggcgcggcctccgcactactcaattgctcagggatgcggaaaacaaagtggccaggccgcgccaccgattcgcatacccaccataggctttgctcccatcggggaaacggctattgtaggttcccaccatcttcgggcagtaggattcttcaccgtcggcgcaggcttcgcagtctggacgtaggcaggaggagcattgtgcgcctatgccgacgcggtcgccgggttggatgttttgcttattattgacggcgcgcccgatgcgcgttgctgtgccgattatctcgtgcccgacaacgcagggatagtctgctggggcccagccagagcggatggtgtggatgtcactgccgcagatgccacagtgggttatttggacttcaatgtcggtttcctcgaaaggtttgggagtgaaggctccgtacgtaaggggggatttagggccgtgcgcgacccagcctgtgaatgtgtctggcattgtccctagagaatcagaaggtctagagcaacattgtagaggaaataacaaatgcggagaggtggaggcgttaagtagatttggggtcaaccgaagtttacttgtgccgaggttggcggttcatgccgtgacttcactcattaccacagtactagtggagtgggtgatcttgacaaactatttcaaaataataaacattgaagaaacgaagatgggtatatgacggttgacgctacttcatgcccagtaactcccccagctcatcgctcgtcagtgtgctgcgtcgccgatctcctgtcttcttccgagcaactttacttccacgactcctctttcggctctcttgctcttggcgtgctttctctgccgcgcgagcctcactttcagccgccgccagtttctgaggcacgctcatccgggtaggggcctttagatacgatggttaggtaggtttgacatggggcagcctacgagacttaccggacgtggccctttgggctcaactcgtttccttgatggccgtcgagttacagcatcagattgatgagctttaatcggcatcgtgtcgtcctcctgttgttttttcgatggagacttgcggtctttctcggtaaaagatacctccttccgcggcggatgcttcgccgacgctgtattatcggtccgctctttcagggctcggctggaagtctcctgaggctcatctggtgcgggctcggcgtcatcgttcggctctgtctctgtcgcctccactccaaagtattcatcttcttcatcctcttggtcctcgaaaataggcgacggcatagccacgtcattgtctcggacttgcgaatatcttgggtcgacatgatcattgagtttcagtccatgcggactcttctgcacggacag

SEQ ID NO: 11771 - DNA, 939 bp, Emericella nidulans
cactggcgcaacaatgccgcctgtataatggcacccccaagtgacacccggtgtctcgatgcaattgggagacatcagagccagcacatcgcccttcttgaaaccccatttcttcttcatagcactgccgaatcttgccgactgtgtgcggagatcgttgtacgtatatgaagcttttgatgcgccatcctggaatattacttgtgagtgttagtaggaacacaaatgccgtatgtgatgaaacggggaagataccgtgactctctggaaaggaggggtcctggcgctcgaagaggagctgccagacgccgacttgagggtttggtgtctgctgcatggtgctcgatgacaaaatcgaagtgtctggcagttcatcgtgctgggcttaagtgttgaatgaaaggagaaagtacttggagaacttccccgcatccagtatcccactctcggttgcttgctcaaagccgaggaactgtcgtcctccacccacactaacagattcttggaggctatcaagtcttattttcctttttttaaactgactaatcagtctcaaaacttactagagtcattgaaacccaggtacctgtggccatgcattgcttactagaatgtactaatagtttgcctatatgcaccagaccctgcatgtcgatcatcacctgacatggcttctttgcggagaatctggagaattaacactcaactttcctcaacttcttcactttcctcgagctaccttcgattcatttgatcatgaaatggctcactcccaatggagtgcccgactggcccctgcccaaaacctatctaagaggcttgatgtttcgaagtgaccagatttacgagaacgacagatgaacggactttgtatccaactcattctcgtatgtttgcctataactcagcaatgttcaccgctcaccattggacaaggcc

SEQ ID NO: 11772 - DNA, 1606 bp, Emericella nidulans
cctacctgtggttcgaaatctgcccaccatccttttacatcttgtttgtcgaccttggaatcgtcaattttgagaatgattgggccactctctgcatgggaactggcgagacatatgaggtagtcggctcttatgcagtgagagatagttcagcgtctcaccatatcgcggtccttctaatggacggaaccggcgtggcatccgcggtcaaaacagcggcagagtgacttagaataaaccagaatgaaaatgatgagtcggtgccatcaggtgggaaacattagatcggtctggccgcctcgttatgaaaagtcattggacgggcaagcgtcgacgtagtgactttatatgtgttgacggtcgttcgtcttcactcggtggaaatcggaaaacagtcgacagtccactccagctaaaatttgttgttgaatgaggaatccacacctgacgggcgcctggttgacaggtgcggctctcccgtgtcactccgtgcctccggccaacgaggcgatggtaagaagctttcaggcgattccttcacctgccaagtcactggacagacaattaaccatgcaggtcaaggaagaacgaggattggaccgatacgagattagtacagctgcgcccccgcttcagctgagccccgctttgcgccaaatgaacatatggcctagcaggtcctttttaagacagctcagctcgagaaccatgattcgaccagactgtccaccagcaacttctcttctcctgtcctcgaactctattcacgcttccccacgtgctttatacctgggatgctttaagagtagcgtgtcaaaagaagcataatctgaaaagcacggagcaaggctcaatcttcatccgacacggcaggcaattgtcttgctggacctcaggagccaggccgagtgctctcccgcggcccttcaatttttttaaatttatgatatatttatattcattgcttgttcacttgccgcctcgtttggcgtgtcagttctagcaccacatcacactgcaacggccgctactctgacttgaccggtcatttcactactgttgaccatccagacacctcttccttacaaccacaacacaacaataaagaggactatctgcggatctctccagccagacatctcgtcacggcaggcccacacagtggagcaaaatcaaggcggaactaaacgagcacagcgcgcaatggcgaaccgctcctactacgatcagaagatgagtacgctcagggacctgggaacatcgtgggagtcttgccgccgtgtacttagcactgttactctggcacagcgcccactgcgcctagctgaactttgcgtcttgtccggactgccgcaggagactcaagcaaaggacattgtggccttgtgcgactcgtttctcacgatcaatgagaaagacgactccgttgatgttgacctgccgactaaggactacttgatcaatgaggcaagggatgaaatctacccgtccggtgtcaccggcgcccatctcagcttgttctccgatcactggaggccatgtcctcccccttacggcggaatatctacagtctgcaccatcccggggtttcagtcgatgaagacat

SEQ ID NO: 11773 - DNA, 1352 bp, Emericella nidulans
tcactcaatgcaaacacaccaagcgctcgtccagcacgagccgggtgaagtcacataagaagtcaccgtcgggaggagacgacgacgatgacgagtctatgctcagcagtgcagaactctccgagtctgagaacggcgatatgcatatagacgaggaggaagaggacgagggcaacgaggatacgaaggtgtactgtacatgtcggacggtcagccatggcgacatggtggcgtgcgataacgatgattgtaaatttgagtggttccattggaagtgcgtcgggttgacgagagagccggttgggaagtggtattgccctgattgcttggctgcgaaagggggtgaatagtttcctcttcagcgccagatatgtttacgagttatgatatcccacgcgtttgttcttgatgtttcggacttagcctcttcatatggaagaatatgctgattaatttggagtacgtattcaacatcatgggttggtatacattataagtaatgctcttcattcctacattgccatcgtatatgtgataagatagacctaattcgtggaaacaacctatccctaatcaatcgcaatgcaacgccatcgctatgcaacaaacacattttaaaaacacgttcagcccagctaaaaagacagcggtcccagctcatgaatccaagtctcaaagtactcgcagttttcaggactaacggcacccccgggcacacacaggttgaaaaccgggcaattgccacaaggaacttcagtcatgccattgcggacgagccggtcgtctgctgcggcgagctcctcgtctggtttgcgggcttgacgcgctttgacttcctctgggtttttgagagacttatagtactccccgttgttcagagcgacgagcttgttgtcgtaacagagcatctcgagcagctgggtgacgctttcttcgccaaggcggacgggcgtgataccactttgattgacggcggctgtgagcatggcgatcgtagggtatcccgtgtatcccgggggatacggtaggtattccttttgcgagccttccttcttaacggtcgttgcagcactgccatcggctgtttttaaacgcttgtgccgcgacttatctgacgcaggcacctcgtaccagctcttcttgctaacggagaactcgatgaacccggagaccacgccaataaagttctcgtcaagtacgccgtcagtgaaccatgcgccgcctgtgacgtcttcgctaggagctagcccggccagcatgtacatcttccggctgggaaacttgacattgtgtacggatttgatgtagttcttaccctcgagggatttgaggcaacggtcgaggatggattt

SEQ ID NO: 11774 - DNA, 3505 bp, Emericella nidulans
tgtcatcgtggcaacaggacgataacagtgacaaagctggagaagtcacgaggcatactcatatttactcacgacgtcgtcttcatcttcgtcctcgtcgccgtcgtcctcgtcctccacccactcctcatcttccccttccgtctcctctttagccaagcaaggcgggtcgaaggccctgatatgaagcttgcactgtggattttgaagctgcaatacttcaaaaaggcgttcaggaaaacgccgctcgcatgcatacaccaagtctctgagaccagtaagctttgccaacagtttagccattggcgcccaagcatcctcatcctggtcctcctgcacaccaatgtggtagaatggtccgcgtaggatatggtcataaaacgtccccgggcgcgtgaattcatcctcatggcgatattccgttaacagattgtccagcaactttgccggcagcgagcttgcggtttcgccatcttcccaaaacagagcgagtcgcccttcaatagtaagatgctgcacgcatccgaatgcagagtttcgtaacagaattatgtaccattctctgatgtcgtggtcgaggccacgacgtgttttgacgcgtattcgaactcggcggaaccgcgcgctgcgagatgcggcgtggcaggatttggttgattcagagaatgcatatatgctgggcttgtgtgagattgcgatgtactcgcaaattagggagagggcttcgagtgggagagaagtgagtgtggtggtcatgctgagtctgatctttgtagtgaggttgaggtagtttgaccgttgcaattccccgcatcagctcttcttcacaactttcaggacactcaagagcaacgaatctttccggatacaatggcccttttatgccgaagatacctacgggatatatacatgaggcaaggttaaacaggctagtccaaaagagcttgaccagagtcggttggatccggcaggcagatctataggccagcgctcgcgtggtacgaagcactgcatacacccttccagaaagtggtattctttgcccacatctaaccctgacatcctgagaatcttgctcgttttatccatgatttcgcgggccgttccacttcccgaagtcccggtagtgagcctgagacgccatgacgccatacagacgtcttccttcgtggagactacgatagatctacaataagcccgacccattgccattcaatcttttcaaaaagacgttgtgacgggcttggtggaagtatcagacatggcttctgcgatagtcaccggtgccacaggtacttttagctctcttctttcctaagcttcgctaactgtctaggcatcaccggtagtgccattgtgcaccatctccagaaagacgcttcgtataagaaaatctacgccctctctaggagtgacccaggctacaaagaccccaagctccaacatgccgcaatcgatctccaaggctccgcagacgatatggcaaagaccctctcgggaatatctgccgaatacgtttatttctgcgcatacatggcgcacgacgacccagcagaattatgccgtatcaatgggactatgatctcaaactttattcaagcactggagaagacaggcgccatcagcaagctcaagcggtttattctgacttgcggctttaagcagtatagcgtgcatctcggcaacgccaaacagccatttcacgaagaagaccctgtcctagagggcgaggttggcggcgaaacgtggccgccaaacttttacttcacccagcagcgcatcctcgccgaagccgcagcccgcagtgaaggtcaatgggactgggtcgtcactcttccgcaagacgtcctgggtttcgcccgcggaaacttcatgaacgaagcaaccgcagtggggctgtattgtacagtctccaaggtcttacctggctctgagcttccttttccaggatgcaaggcaggatactttgcattcaatacgtggacatccgcaaacctgcatgcgaaattctgcctctgggctgcaacagccaaaggcgcgggaaacaacatattcaacgtcataaacggcgacacggagtcgtggcaggacctctggccgcgcctcgctaggcgcttcggctgcaagatccccaatcccatgttccctcacggagggacagcagatacgaaaggatacaagaattacgaatcatccacagttcgtatgccaaataagcatcctctaagcacccgcgtctcggacctgggcgtctcctcagacccctcgaaggaggaacccccgactctcttctgccagatcaaccctgagaaatgggctgcgcgggaggatgtcaacaaagcctgggctcaagtgcgagataaatacggccttgatcagaaggcctgggagaaggcgacctgggacttcttaacttttgctcttgggagagattggagttgcgtggggacaatgagtaaggccagaaagctgggatggagcgggtatgcagatacctgggatgagctcgttgatgttttcgagacgcttgagaaagagggcattctgccacctcttgagcgattgaaaagtgatttctaacggtaactacttatgagaacctacatttctgtcacacatactatagcgataccaacgcatttgttctactggcgacgctcagagagacatttgccactaatcctaggaaatcaagtgagaaaacttcctcgccgcaagaagtcgtttggcaccaattcttcttgtgacagtctatgtgttactggccaacactgtcgcacatgtctgatgtttacactttacagaaccaagtgctcacccaggaactgctctggtgagcatgggcgtcgaccttctttgccaataatatgtagcctttctcacggctagtccgccatacatagcaatcactagcctataatgagatatttcaaaccagtatcctctgtttgcagcttcaagtcttgagcttcaggtatagttatcgaccgaccagtcacaacccgccgcttgccaatcgatctgggtgtctcctgcaaacaggccaaacacccccacaacgccaaaaatctccacgataagttcacaattcaggcactcccaagctggtctctacagcatcatagatttcacaattttttgcatgttccgccgaatcttcaaaatggccaccgaatccgtttccaagaagccgcgtattgattctcccaccattgggacgcacaagtactctatccctctcctccccgctcccacttcagcccagcgcaatagctaatttaataaagcggtcactttcacgccgacgaagccttggccgtgtatctcctccggctcctcccagcctactcacaatcgcccctcatccgcacgcgcgaccccgccctactccaaacctgccacaccgtcgtcgacgttggcggtgaatacgatgccgccacaaatcgctacgaccaccaccagcgcaccttcaactccacatttcccggatacaagacgaaactgt

SEQ ID NO: 11775 - DNA, 325 bp, Emericella nidulans
agaccgcgaagcacgcgggggcaaagcgcagagaacggagaacgacgcacacacgaacagggacggaacggaaagcgaccaaagacgggaccacgccagaacgggccggcgaacacaatcgcgattgagaggacaagaaagcccgggacagacgcagcggaagcaaccgccggagcagaaacgaccgacccggcggcaacagcgaccaagccacaagcgcccaaagggcacgaaaaggcgggcggaccaacgagcgagaacccgcccgccgcggcgccggcggcacagccgacgacacccaggcaaagaacaaccgaggggacgc

SEQ ID NO: 11776 - DNA, 561 bp, Emericella nidulans
ttgtagttgaagatcggacggatactatatcgcgtccctactgaacatgattatcaactctgttggatgctatttaggaacaggatggacgcttctgcactggcgcacatatatgctagtactactcattgatggtctatgacgcgcagcattcactgaacttggtgctattgctgacgacatgaactggacgtgaagaatgaccatcgtactcttccagataatcacgatggaccttatgctttcagtcattttgaaaccttactacatttcttactcatgtctcttactgctagactggaagctgtggctacacactgtatcatacctctgccttgggactttcctcgctccctagaggcgaatctgattgggtcacccatcttgagactaactgacccattgataggcccacgacgacaagaacgctgaccatttggctactggcaccgacgaagatcaaccctgaccttgccaactttcgatggctaactgagctggcattgggctggatgaatccatcctcatcctcgtactcatgatcagatctaagctctatct

SEQ ID NO: 11777 - DNA, 659 bp, Emericella nidulans
  unsure (1)..(659): unsure at all n locations
ataccacaaccttggattaccatcaaaaagtatctgatagattgatctcacctcgttcgggccaattttttaatgtcgcctgcagaagttacgatttcctattatgaccggctgtggagcaattcgaaacggggggatgcacataccatatttcttatggagctcccccagatgatgcacaaacgagtgcttccaggaaatgtcaatgtatgcccggtagaagcgcgtgagagcagcaagtgggggaccaggaaaccgggccagggggtgccaatagaaggtgtagcagacgtaggacagggaataagaaatcagcgctccagccagcgccaacagcgaagtgtatgcatccattccaacggatcaagccgacagccccgtacgattcaacgcagagagaattagatgtctcgagctccattttcgctacttgatctggggggagggaaatttcagcggtgcttattaaacggtctagcggactggcagataccagataggatagcccgcatatggcctagtccctgacgcatgaaggaacggcacatattcagacgggctaggattgtgaatggaatcaatgtggaccgcagttcctctgctaggaaatccgncaatatcccgtttgcgcggtggtacaggattgcttgagtcgtaga

SEQ ID NO: 11778 - DNA, 1075 bp, Emericella nidulans
tgcagccccatcaagacttcgccacgcctcaacaagttccgtcttcaaccgctcatatatgcctctggacttctcctgcaagatatagaaacacccgtgcatgagagtcatccctgttgtatccgcgccgccaaacatgagcgcctggctctcctcatatagacttcccttgctgggctgggtttttgtccggtatgcctcgggtcgcaggagctcgtggtagatcgtggtgttgtgaggcagtttttccagctgggaagggtcagaagtgaggtcttcgatctgggctttgaggagctgtggccagtcccgtgttagccgccttcactcaagtggacagggagaggtacagtttggaggtcgaccagccctgccgttgcagggctgaggatcttcgacagtttcggggggcagttcatgatcatctctttgtagaaaccaaagtgcttgaaagccgggaatacggtcatggaggcgtccatggccaggaggaggggcgattcatattttggcgcgtgaactgcattgacagagtttgcgaagcagagatctggtgtactttatcaacaccggtagatatatcctcctccgcatggaagggagaatgtagaccaaaatcatgggtgggtggacgcacaggttattacatcaaccgacatacagcgaaacgcatagaacaggtcgacagcctcctcgctgttctggccgagagtcttgcacagatcaaggacctgctctccaaaccacttgttaatcaaaccatagtggccgtcttaggtgaaacagcgactggatactgactatgccctctacgatcttctgagcgtcttgcacggctttgcgggaaaaccgtcgcgagagaatatccttcctctctttagcttccgcatagcgtagatacccaaacgaagagcggtcctcgccgaagctgtggtagagccgttcctccttgtcccagcgattggctgggttaaagatctcgaggtatgccgctggggagcggaagtgcagctgcgcgtgcctgcatcagtacaaacccatggcattaccagtaaaaaagtatctgatagattga

SEQ ID NO: 11779 - DNA, 2026 bp, Emericella nidulans
tgatccaaatgctcttcccacacggactttttgacaactggactctaaccggggatgtcctctgcgactcattaccgaggctgcgtccctcttgaacacgatttcttctttcacgagagacaacgcttcactcaagaccgacgctgccgagtgttttaccatcgctgctgagatatttgctttggggttgggaatctgcgtccgcgcaatgcagtacatcagttcgcgccaattgactgactccgagaccgagcaagatctgattactgcgaacagtgccggcttgcttgaacttcttctgcaaatgcaccagagagccaaaagcgagttcatcatgcagacgaaacgcattgattctcttctggataagctgcacagtatcaccattggcactaatgttacccatgtcaacacatacaacgatcccgagcctcatggacagacttagcattgcacagagtacatcttgcagctggacaattggaatgatcataatctggctgtctggtctcatttcccttttcgccctagccgtgggattcggggctggcttactctattactttgtgaaagcaaaataccttcacgcccagtatatagtatgacctgatacccataacgattactacgacgggatgagttgatatagaaaaatgagtagagcctatggcacagtgacgaggcaggtatggattacattcacaaacatttctatagtataccatggccgtgggctctttaagggaacagcgcaggggctcttcccattctacactactcctgtagccgcagcggtaaatcacaaagccgcaggctgtgcttgtctcctggttcccatttcacggttctgggcactgtccattggaagtgatcgtcgccttgatagataatatcaacgggtttcataccgtagtccatttctcatgcgttgcttctcacgctcaaaacagtcatggtgattgtgacttttcgggctcttcggttgtttgtatttctggatttccgaaatatctccaagtggtaatcgtcgaggttgcagctctgcccgttcgaaatcaataaacattacccgacgattgctcgaccttattgccggtatcgggtcaccttgaaacacattgagttcgtgaattgcctacaaggatttcacggccttctgaacttgctgacagtgataggaatcgcgctgctttgcaagggttctgccggcataactgataaaaatgagctgcacaatctcggcaataccatcataagagaatgaacggcgaagtcgtaggctaccaagtagtactggaacatatacttcttggattggagtaagatgcaaataaataagctcctcatgtttcaagcttgcaacaaactcgactggcgtgcctttccctacaaaggtatatccatgggaccgcagtgtagttcttaaaagtgccccgcgactcccgtgcacatgcagcgactcgcaccctagccgtgtatcaatctgctgattgtcgctgaagaattgctggtccagccggcgaataacttctactggggtcaacagatgtcggtccaccccatgagccgaagcatttggacaccgccgatccaactgccctcccttagccaagcccagaagacactgttggaagcaatattcccgggacttacctttcgagcctgagcttaggggttcttttgacatgaaatggggatctggcggattagcaagccgtcgctgtcagggtggccggcttgagatattagcatcaagatcattgccagcatcgatatcaggacttagagcactggtatcctgcaaaggggatagtacgcaccacgagcagagtttgactttgtcttaactggagacacatggtgatattggtttttgactctgcgtcggtggtttgaaatcaggagaggaaatatccttctctaatatcttgtcgtaaagaccgtcatacaccatacttccaaatacgcagattccgggctgctaggactgtccaagcgatgtctctggttggtacttgtaaggcac

SEQ ID NO: 11780 - DNA, 285 bp, Emericella nidulans
agggccaaggcaacggcgcgtagaaggcggcgacaccggcaggcagccgaagagggaagcacccggagggggcaggggacaaccgcaacgcaaagcacaggccgcggaacgggattggccattgggacaaccggatggccgacgcggccgccgagggaggagcgggcctaagaaaggaggacgaagcaaactcaaccccgcggggcaggcgaagccactggacagtaggccccgacaaccgaagtcagatacgaacccgcgcggcggacacgggccagcccgaac

SEQ ID NO: 11781 - DNA, 415 bp, Emericella nidulans
gtggaggctacatacaatgtcggacggatggttacctgcacctgagcggaggactgagaggccgatgtgcgaccctcactggaatcccacaacaactctacatttgggggcaaattcgcccctcttcaagtccatgtagccccgtcaagaatcttagacgatgcggtgctcaagcagacaagctctccctgctggctgtctgaaaccttcatacacggtaaaagcacattctggacggggacccccgtagtgacccccgtaacagccctcctgaagcccttgcgggggagaagggtggttcacatgcccccgaggcatgcacccactggcacactagggtaagtggaccgattgaaggttagatctttggaaacaagggcattacccctggcttggggccggtgaatcttttgcc

SEQ ID NO: 11782 - DNA, 117 bp, Emericella nidulans
tcaatcgggcggtagaagtgattgggcttaggtggcgtactctgagacactgtgcgacagacataatatccatgtacaacatggatcactcgatactctacaccataatcgccacgg

SEQ ID NO: 11783 - DNA, 533 bp, Emericella nidulans
acgcgctacatctgagcttctgcgtcgcctgatcggtggcacctggctgactgcttaacgtgcccggacagtttcgactgtgcggctatgcccctgttacgcctgtcgaacactaggggagagctccaccatgaggtcctgctacatgagatggtagtagtcaatccctagaacgggtcgacgacattgttaacttctgggccactgcccttgatagctaggagcacttgcctacctctaaccttcctgagggtacagaacccgagtcaaattaagaggatcttgcggatgatatggcctatcgacattttgagtaagactacgctgcctggcaggtgaactacagttccaggtatgaagcctaggtctgcctgaggcttaaccagtagtacctgcaaaagcgacacgctcgagttccatctttccacacgaccgcctgatctatcgccagtgcgattcaggtcgctacgcctactgacgatctttgcgacagagttaccccttacccatggcttaagggtgaaacctgacta

SEQ ID NO: 11784 - DNA, 396 bp, Emericella nidulans
aacctctgtgctgatgtccgtcctaggctgccactcgacggtgcgctactcaatggtgacccccatgtcggctggtcgttcatactagcatacgcctgctttgcggatgctactgttcttagtattcacggcattgtgctgacacctctgggaacgggccgatgactctatacctctactgcggagtgcagcaacggtctgtttgggaaccagaccttccattacaaacccgggcggatcttgctccaattatgaaagctctggggcgatacatcttgtggcaatactgaatacctagacatgacctactgcgcttgatgcatacattatgcatctgatgaccttcgagatctgtcccacggtgtatgtgaagccatcttcatgaacaatcacatc

SEQ ID NO: 11785 - DNA, 464 bp, Emericella nidulans
ggatctgcagatgttaggcgccttggactgccgcacgccgccgtagaagcctaacactattattgacggacattacaaacgcgacatgggtacacatcattagatgactaactgagaattactacctgcgagctcttgtgcatcaacccacctttaatacaccgacattgactgtgcaatatgcagatagtgcgcaaacagcacatcctgtccatatatttctaattcccagagataagccatcataccctatcataccctgacggaatcgatgtctacaagaacagtacactgacactcatatacccatcatcctgcctgggcctaggatgaccgagacctctatgccacacccgtgggactagaacgagccatgctgtgtcgccagcaagccctctgattgcgactcaactgacactagggagtatggacctacttaccattatcccttcatgagagcgggc

SEQ ID NO: 11786 - DNA, 442 bp, Emericella nidulans
attgtagatccccgtccggtgatccagaccaaatgctccatcaaacccacgaaaaccatccctgctttccctcggattgtctactgcaccgtatctctccaaatgacggtctgtgtgctcacaggcttgcgatccaattccatcctatgcatgccgatccatcttgtccattacatgtccatccacagactgatgactattccatttctaatcaatcatggaatcctactatggtatataaatgatatatctcctccataccattgtataccgttgtgatgcaactaggaccggttcattcacgaaccaacagaactctcaccgtatgatatattactgccattactatgacggcgccagcatgatctgtacgacaatggccatccagacagtgagctattagccttacgaagaaggagactctcctctcacttcaaagagc

SEQ ID NO: 11787 - DNA, 100 bp, Emericella nidulans
ctgattaccacatccgcagcattcagcgcttgccggcgatcagtgcatttcctgacctcttagtctacatcttggtaagtcgaggccagaatgtgtcagg

SEQ ID NO: 11788 - DNA, 665 bp, Emericella nidulans
atacttgctaacaagccaacaggcagaccatctgcggtgagcacggcctcgatggctccggtgtgtgagtacaatccgtccagcatccgctgaaaacacgacaccttaacagaacctgacacaacccagttacaatggtacctccgaccttcaactcgagcgtatgaacgtctacttcaatgaggtcagtggatgagatatcaggtagcagtttggtgtgtctgacttcgtccaggccagcggtaacaagtacgttccccgtgccgtcctcgtcgatctcgagcccggtactatggatgccgtccgcgccggtcccttcggcgagctcttccgttccgacaacttttttttcggccagtccggtgctggtaacaactgggccaagggtcactacactgagggtgctgagcttgttgacaacgtggtcgatgttgtccgtcgtgaggccgagggtagcgactgcctccagggtttccagatcacccactctctcggtggtggtaccggtgccggtatgggtactcttttgatctccaagattcgtgaggagttccccgaccgcatgatggccaccttctccgtcgttcccattaccaaggtctccgacaccgttgttgagccttacaacgccaccctttccgttcaccagctcgtaagcactccga

SEQ ID NO: 11789 - DNA, 120 bp, Emericella nidulans
aatctcgactcatgtgacagtaaaagcagatgcgatatcgataagtcatctatcgagaagattacaatcacaaccagggtatcaagcaacggaaaagcactatagggtggcactggccgt

SEQ ID NO: 11790 - DNA, 108 bp, Emericella nidulans
aggtctgagaacatggacatgctctaccgatgcactcatcagatacccaagttgtggagcgtcgagtattcactatactagccaacaggctgcatggacatggcgatt

SEQ ID NO: 11791 - DNA, 413 bp, Emericella nidulans
ccgacgatgagctggaggtatagtagcgcgcctactacgctggcgtgggcaagctgattgcattcacagacatggcctatgaggctgtgcgtgatgtggtggtgacatgccctgtggccgatgttgatctatgcaccaactgctttcatgtgcctctaatcgtgctagtatacgattgccgcacgcaatgcggccggagggtgatatacgctgcttgacgtccgagttacttatgccgcgagcgtatgcctagtatggtggtggaacggtgcactagggccatagttgattctcaagactagggtcattgtgacgaaggtattgctgcactctactgctttgttccctcagatgctctaggaataatgacgtctatgcttgcttcgatcgcttcaggagaagcagattttcga

SEQ ID NO: 11792 - DNA, 512 bp, Emericella nidulans
tccacgggacctggtgacgtgccatgcaggttaggctgtcaatgtgtgcttggagatgctcagatacactgtatacttgctcaatgacactgaccttggcgaacaatacgatcgcttcttccactttaaatgccttgtaggctacacggtgcagagggaatggtaccaatcagagcgtggcgcttggtgagtcgatagtctggccacacatattgacctgcttttactggagcaacgcgtgctagtgtactatggagccggggacatgcacaagacgggcacatagtgcgctggtctggaacttcctatactgcgtttccagcacaatggaggaagaggataccatgctgggtaccataacgtgttacacgagactgcgaatagcagtagtattctgtacatgaggatataatcgactgccaggagggttaccggtcggtgacggtctatccgctggcacctgagtgtagcgatccttatctcatgcacactttaccgtcgataaagccacg

SEQ ID NO: 11793 - DNA, 3607 bp, Emericella nidulans
atttacacttccgttctcaaattcgcactgccaaaaccttggccaggcctttctgccatttctctttgagagcttgtgggagatcagggcattggtctcattgtgctgctgagatgtcgtctaagaatctgggagcaagctacaaatcgcgatgcagagatttataactgagttcaaagatatatagtttttttggccaattgatctggatagcgtatcctcagagacaggttactctcctatcaaccattgtgctctcccttgacccgaatcaccctcgagagaaacaatcaatgcaccgaaacgaatcacaatctctatttgtacgtgcctctatctgatctacgaatagacaaccgcagctcactcacgaagctctctttcagcatccgtatccgcccaacctcatctggggtttaagccagaaccaccagcgctgtcgcgcagttcaccaaatctacttaaaacgtcaaacatgagacatctatggcctgtagtgtgcaactaaagcacggagagataatagtagggccattaaatgctgactatgaattgcctaacgatggttgttgcataccggcgtgctctgtgagtaagcctttgggttgacaaagccaatcaactcacttaccattggcgctcaagtctctgactggtggttcaggctgatatcctaacagaatgggtattgcatatctgcctgaaactggcactctccgggaccagagttggccgcgctaggtttacggctgtctttggcgaccccaagagattacaagctagaaaggtactgtcctacgtatggcgcacaggcttttaccccttgaattgccttggtctaaaggtatatattcctaagtcgctccttacgtggacgggcaacgagggacaaggaaggtacggccataggcacgaactggcctacagagtttgggtgtgacttcacgcttgaactcttttctccacgtcttattgctctatctcactcttaaagcgccatattcctccctaagggtctttcttttcgttcctagaagccgtattattctttaatacctaagagccaccccctgtcacctagagcacgtcacgccgtcctattcatgcctcttcctccaatcactatcggctcctggggtaggaactttgctgtatgcattgctgagtgctaacgaacaggtttagacaaccttgatcccgcctccaacatcctcggccgcgttttcgatcgagaccctgtgctccggtttatgctctgtaacctttccgacgatcagtacaacgcgtacctgcaagcgtactggcgcggcctctgccgaaccgcccttcttaacggcgcaattatcctggaagctgacgggtggaaatcggtcgcagtcatactcccacctggcagaaatgtcgacagcccatggacaatcattcccgctgcgtttggattctctggggtgctttggcgcattggtatttctgggtgtattgtgagtatggcagctgcaatgaggacactttctgacagataatagcgtatgcttggtgattatagccggcccgtcaacgcggcgaagaagagagtacttgggaatcggcagcactactacgtctttgcgattgggaccgagtacgagcaccaagggaagggtacgaatgcctacccaaagacctaaagcctaatatattggcagattgtaagactgtctgactcttgcagggctggcgcgagctttgatagaatcccagaaagaaacggcgtggtgcaccgaggtcccgatatggctggaggcaacgacagagtactcgcgggatctatacctgtctctcggattccaagaggtcgagcagataacgatcggcaaaggaaaagtcaaccgggatggattcatgcaaaaggacgggaaagggtaacgctgtgggcgatggtctggtggccgcagtcttctcagcgggatgtcgctatggttgtctgaatagatgcgctactctgattccttacagtagagatgtttatttttaacttgctagtgctaagtatcattagtgaccatttctcttcaatgttgcatgactggggagtcatcgtcatagctcatcccctaggatacctcattgtaggtcccgtccacttgtgacgccctcgagccacccagtcaacgcaagagcagagcataataaatcctagcacaggaccggagaagttcatgttctccggcgtgaccggcaacgtgggtggaaaaggcagaaagaccgcaaaataggttgcaaacagaatggcaaccaagttcagggtaagcccccatcgtcccaggctatatgcccctgacggcacatcacccttcagcctgccccaaaccaggaaggacaatgggaacagataggagatatatagcccgagcgcgctcagactcataatgccattaaaggccgccgtcgaccccatctgcatgaaggatagcacaaagatccagccagtcaccaaccccaacgcccgcagcgggattttcagccgcctatcgaccttgacaaagaagtcagaaaatggcagcccgttatctctcgcaaacgcccacatcagcctggtcaccgaggcgaggccgttgaagaatgcgatccaccccgatgacatgcctgtggctatgagcatgaaagtcgcggctttggagccggtcactcgatacgtgatctcgataattgggtatcccgtcgatgtcagcaatgctgaggcgtaggcttctggacttggtcccatgaagtaaaggatcgcgatggcatagccgagggccataatcccgtttaacagagttccccagaccatcgatcttggaattgtcaggcgcgcattgtgcacttcctcggacatgtgaataatgccatcaacccctgcacatgcctatcaacacttgcttttcatagaagtatagaacaagggtgttagcagacacctaccacttagaggcgtgataacgcccaaaaggcccaccgaaaagacaacgcccgcgtccttccacccactgaacccactcaagaaggtatcccagacaaagttattcgcgtcttcaatgctattgtgactttcattcgagctcaccgccgaacgacccaggacgccgatgatcatcgggagtatgacgatgtgcatgatgccggccacggtctcaatgacgccgagacaccgccgcgcaaagatattcactacaattgggggtatggagacggcccacatcagtaatgtgctgcgccagccgtgaattgtgtatgtgggatgagcaagtttgatcatcccttcgatctgattgccgattaagaagggcgctatggagacaagggaggaccaagagaagacctgccagcacgatcagctgttatcaatgatatggacgccagaagaggggagagaggtaaaggttttacggttatccatcctggtagctcgtgttaatctctgtttacatcacagaaggctggaccggtcgtaccttggaagaaactgaagaatctgggatgccacggtgcaaggacatatgtccagtgatactgcgcgcctgcggtaggatgtacagaggcaagttccgccagactcatcgcaatcgccatattacccacaatactg

SEQ ID NO: 11794 - DNA, 3081 bp, Emericella nidulans
cctctcaccaggcctgaggggctgagtactgtagctgctactaaactcgttacgatgcccgaacttaatgcactttgaggactaggagctggatcagctgtgttttggggtcagcagttaaaaagagaggccttagccagctgtttattacggcgctaataaataccttagtatgcaccgatccccatgactacaatcaaccggaagcaaatgaggacttattagcactgaatgcatctctcgactcttttcatgatgtgattttatcactttagaccccctattcgtgaggatgatactgtctgcccccaacagtgctaacctcgagcagtcattatgttgccgctgccaaatcatttcagtgggtgagctcaaaccgacttttgcaaccgaagagatgaataaacgcatccgggtccttatcctgcacctggttaccacactgtgcgcgggatgaccagtgtgtgtctgcgtgggacaacgtccagttgggcaatcgaaagtggcaggatcatggagacgggtgagttggctgagaaatagacaaacgacgccatttaagactgatggcttagaggagataaggtacaaagggcatatttcccctgcagtatgcatagaatgctcctcgcgccaatgaacaccgtgcaaaggcttaagtcaaaatcgcagacgcaacatccgacatttcttctccagtaagtacacagtatgattaatacagtaaaaatgtctttgccagctccagactgtcaaaagtctctgggaaaagtcggtccactgtcagggctggttagtttctttaccaattgcatatagcaccaggaccaacgccaggagcaggaaatcgaaaccctatccttgtctattaaaagcatattgtctccagtgggaatctagccaccgtaaagggaactccgtttagagacgcccataaagggagacgaaattaggcccgccagcagatcctccaactcggatatatcctctattccctccagacccagcacggtttcctcaatcttcctttgcatctcctccggaatcagccccttggtgaatgtgcgaaacttgtcgacgatttcccgattcgaaagaggtagatcgaagccctttgctgcggcgacgaatttcgagacttcggttccatcattaaatttgaccctggctcgttgggacatggcattcccagtctcctccgcctagagccattcgatcttaccaatcaactcctagatttcgtcccgtttcagcaggctgtcttggaactactcggtcaggacctgaccgtcgatgagctgcacaggggctgcatacgcgcagctcatctgcgccccagtcaccgtcagtggacgttgagcgggccagccaccatgtttgtatgctgactcggacatttcaaacgtaatctttttgatcttagacagatccttcatcttgtcgggatattccttttgcaacgcagccattgtgtcaatactactgtgcgtgcccgccatcgcagcatacggcttcacccggatgttttccagttggcgcgtctccccgagccccttcacaagctcttattctgggaagggcggctccttgccagacccctgactgaacatagtgagaaacccgccatacggctcctcacatacgttcttgatcccgggtaaccccccgctgcgagcagagccgcaaagagaccatttcgtgccgcgaatccgtgctgcatgagctttatatcgctgctgaactgggcagacataagaccacaggcctgtgtgcagactatcccaatcgcatcctagattcgatgtgcggagaggttgatcaattttcccacagccgccacagcctgtgcgtggccgaatacgacgcccgagtgcaagccccgtgagagcatatggctgccgtatagacaaagtccaacacgaggaccagtttcgtaacctacaattgctgacaggaggagtgagtctcccaatgtcactgtccctttggcctttgcattcgccgcgccggcaaacagcgctgggaggacaatggcattcgaatggacgggggcgagcgaatgccagtcgtcgatctcaaaaccttgaatttgcatgctgttgagcaaagctgccggtagcgggccgactctctgtctccattatcatctgctttcaaccctcgatggctggtagcaaagaaggagcgcactttggcataaccctagaccggacaactcccctcagcctccatgtccagaataatgcccgtcgccttctcagtccagggcagatgggcggccaccatcgcgcaacccagttcgtcgagggtcaggtatttgacacgcttttgaatcttttcaggaatatcgtgggctgtgaggctactaacccacgagagaaactggcgcgtgacgcctggctcattcatgtctgccattatggagcactgccactgctgatttcggctggcagaaatgactgaacagatagacttgtaatttaccaccacaagaagaatctgatctgggttcgtgctcctagtgcttatatggcaagaaaggtggatcaagcgacgccctttggcgcctctaaccccgttaacaccgtcgtgcttcggcgatatgcagctatgcatttatcatattatataccccgattgatttattgtagggtagttctgccggtttctcctctcttcagcatggttcgctatctttggctgacgaaggttgggatcgaacgtcgcaaaacatatgctacatgtaaactcgacactattatgcatcaactagaacgtatcgttggtcgaccagcagggttcgcccatttcctaaaggcctccatcaagtgagatgctatctagcctagtgattataggtgtagtagctgggcggaagtatggaagtatgtgtgtcgtcgcgcgtgctgcatgggctggcttactgggctcttttaatgtcttatggcagaatcccagggatagcctctacttaccacaggttttttgccaaacctccaaattccaggccatctccaaaatctctttccttaaacatgtacaatcagagcagagtactccttcaacatctcctagtgaacg

SEQ ID NO: 11795 - DNA, 556 bp, Emericella nidulans
  unsure (1)..(556): unsure at all n locations
aagccttgtgctctcagactcctgatccgtgcccggaccgaagcgcaggccctgacctcgttaacggaggtcatgaccaagcccgtgtttataaatggcaacaatgccaaaccgagtgtgaccggcgtttcattccataacacagccaagcgccgtctgcgcgctggattgcatggaattcgcctcatccatcataatcatgtcgaacgaccctagcacacgagcctccatcaacaggacccgagccatatgtaatacttgctttgtagcccccatacttgattaggctggaatccactcctaacccgattatctatcgccaagtcgattctgctccatcaacctcaatgactctatatactcacgtagacacgcacccatccgtctatgttccgctgacattatgcatggtccgggccagtattggngactgttgcccgtaccggaggaccgacaagaaagggggtgctgttgctgaaccgacgcagcattgtgttggcagtccatgtcatactgcacattcactatcagatgacaatcggactcagtatattac

SEQ ID NO: 11796 - DNA, 2683 bp, Emericella nidulans
gagatgttgatcagaatacccgggtccgtagggtcataagctcccggaaacgcgacaaggggtgttgggtctccgtttcctccaccggtgacggggacctgcccacaggagagatagaactgcgcgccaccttcagtgccggcgccgtggagcgcaatgtgctcaacacggaggaggtagtcgccatcaggtagagatgaagggatcgtgaagttgacatttgttgcgcctatgacaagattagttactgttacctgcgtcaaggagggaggtggcaggggcgaaccatcacttggccacgtaagtccatcatcagtgactgttgggccgtcctcatagatcttgaaccagacctgtccgtcgccgtcgaagtcgctcgcgtcaccgggtgctttggccatgtacgcgagtaggggaccggggtggccgatgtttgtgcgcacagtaaagccaatctcctcgcctgctttcacaggcagagtctcagtcgcgttgccgttggtgctggcgtccttgttgcatcggatgtcaaggctagtgacatcctcgaccgggccattgccgtaggagccggtccagtcgcggacgtatttccagtcaccggttgcggcaccatcctgaacaagggcagggaatacgtctatgtacagggccggagtcagtatctgaccagacggtttagtcgcagagaaaggtaagagggcttacagtgagcggaggcagttagggccagggaggccgtagtgaagagaaggccagatttcatgttggttaaaagatcactttccagaagcgatatgaagtagagatcgaatgaaagggaaaagagaattgaatgaatagagaaagaatggttttgatctcagctgtgagagaaatgggtcaagtacttataggccttttctactctctgaagaccctgaagcgccggctttgccatttgccgtgcgttccaacaatatcaaaagcgaaccgccgatccgtcaggattggttcatataattgaaaccgctcggtctgttgtgacagcgacgaccaattggtttcatgtctgaataatgacatctcacaccagcgcgtttcaggtgctgccatggttctctcggccttgcagagtcagttcaggctccatagactcccaacttttatagatatcatacagcatcccatcacacttctcctccatttattcatatactccaatcgaagagctggtcccctcagcctctcccagctggcgcaagatattgcgttatatcgcctcttatgctaacatctcataagccgttcatcggtcgtgctagactctaaaacagcattataagtaggagttcgccaagcagaacacgaagacggagcaacctcgttgtacaacatgctcaagagtattgagcgaggattatcatcatgaatcactaagaacccctttcccattgcggctataccccctgccgatcaaacagggtccgcgccggatacattgagtgttcactgccaggcgcccttggtgttcagtattgacttcatgctagcaataatggagtaccatggcctgatcaattgaagtgaactcttatgctcaaacctatgcgcaacgaagaattcagaatgtcttgtccgttgcgcgtcgcccacgcgatgctgtttattccttagctaagccgcgggatagcagagccggatgagtattgcatctaattggcttattttggtaaaagcgtccaatttcgctaagcgtggtcggctttatttgcggggtacctaggtacgagttggggtacgagttggggaacctccgcatcgaatctgtcctagcgcgcgccacgagaggttgctgggacgggttaaagccatactggggacagctcacgtactgaaacaaccatctccatccgacaaggagtgtcctgttttcatacttattatgcgattatccggcctttgtaggctatagggtcggctttaaccacagaagatatatcccatgataatgaatcaaggaaccaaagcctgcagtcattactttaggtgctcgtatgattaaccctaagcttgcgagtcagtctccgcaacgccattgccggtgcaggcgggggatttcttcatacagtacggccaagccggacggagaaaagaagctcatttccaggctctatggctacaatggcctgggcgtatggtgatgctagatataatcttgcaaagtagccgttcatctttgtacttccctgaagccagagttgacatctccagctagccagccagcaagcaagaacgtcagcaagatgatcttctcaacgcttctctcgctagccctgctagcgacgaccgctactgcccgcaagggctttgcgaccaccaaaggcgacaagttccaattggacgggaaggacttttacttcgctggtagcaatgcctactatttccctttcaacaacgtgaattcctctttcttccagcggcctcaatcagctcactgacgatcccagaaccaaacggacgtggaactcggcctctccgcggccaagaaagcaggactcttagttttccgcacctggggcttcaacgacaagaacgtgacctatatcgaagacggactcccccagtacggcggcgagggcgccggcaccacagaagtcgtcttccagtggtggcagaacggaacgtgcacgattgacctgga

SEQ ID NO: 11797 - DNA, 118 bp, Emericella nidulans
acctgtcgatcagctatagccatgcgcgctgtgtgcctacacgacaacactcgtcacgatgggagacgctaatccgatccacctagcgtctagcgctgccgcagctccgacgagttcc

SEQ ID NO: 11798 - DNA, 120 bp, Emericella nidulans
cttcacttcatgcgattaacacgcatagagtcctattcctacttcgctatctagcccagtcttctaccttagtgtacacagatcatcgtctcgccgcatatcttctcacgtcacttcctc

SEQ ID NO: 11799 - DNA, 104 bp, Emericella nidulans
caagccctacactcaagcacgtccatgaatgacatgcatcacactatggactcacgcgagtgagattgttgtatgttggcgcgataccgagagttcgttacatg

SEQ ID NO: 11800 - DNA, 144 bp, Emericella nidulans
cctgcttacagccttttctaagaatggagtcagaagggcaatttccagcgactacctcacagtatcaaaatgtctcctactccagagggaacgacccagagaaggcccctagatgctctctgctcaaaagtttagagtcccaca

SEQ ID NO: 11801 - DNA, 1048 bp, Emericella nidulans
tgttcaataccaaagctcacctgaaagtatatggtcgtgcagtcatggcgaatcgtctctaagaggatacgtcaaacccttaactctaatcgcttagcaaccacgcgccatcgtatggagagtagtcaaagtcctcagggcaagcgccgctagcagcttatgacggtatgaactgacctggtttgagtttattctgagtctaagcgtcttgttctccgaagcgttgttgagcatgtggacgaaggacgaggttgtattgggcgacttcgcaaaccctgagaggaactgtggatatcaggcacagtgtcgtaaaaggaattttatagcatcccgtttcctaagcttctcagccgcaacaaatcttcggtcagcgatgaggttccgcgttcaggcagcgtgccctgaaagtcctttggcaatacccagcagagaccacattcttcgtattgtctaagccttacttaaggcgtctgagcactcgatggtctgaataccaacgttggcggccttgaaattgagcatcgtacggttggtacttagaggactgctcacatacacttccgtgcggtacagcctaggttttagaaggatgaatagcccacatcacccgtaggtctttgctgctaaggatcaaataggtggtgccaatccacaaggcgtatggatcaggagtaaatacggaccaacggcctcggcagctgaacgggtcttaactcccctctcatcctgcgctgtgcaggatactagcgatagagatgatatagttccctatccgaatgcggtcagtagagagactaagtccaggattaggactcacgcttacgagtagtttagatggtagcctttctgaattttgcctcaggttaagtcagcaggaaagtgcattgtcacaacaatatatgtaatattagtcaatactgactcgggactctcaaccacgatcattctaggcagtagtatgtactaatctatgttggccctattcccctggttgagtccagctgaagtctaggtaaattcaacgtcaagtccacgatgcgctgaagag

SEQ ID NO: 11802 - DNA, 2849 bp, Emericella nidulans
tgcacatccttatcaaggcagacgtcgtgatatagcgctcgggtgttcaccaccccacccattgaggagcctacaaagttgcccagttccgatagatgaatgtgctcaaatatctccattggatcggaaatgccggcactgtagaaagcctccgctacacagcagagcagcacaagggcaacggggtcaacttgctgcacgatttccgctggaatcccgtaccgttctggcgaccagcctgtcggcagttggccggcaacacctggaggagacatgatggatttgggaacgcggattgttgcgccgtgctgtagctgaactagacacaagccgtttttgagtgtgctgacttgcaccatatcgccgtgccgttgctgcagagcttcggcattttcccgtgtagtctcaaatgacggcaagtcttgttcaagcacgatctcctggaaaacctctcgattgtcagatggcagtgaacgtatgcctgcattcgataggatccgctcgccgtatcgttttggaatatcagcatctgcaacgggcttcccatcttccccatccacccatccgacgtaattgacgttgtcaacatgccgtatgagattcattagccatgccgtctccacgtatcctgcaggagaaagacacccgcgcgactccatttcccaccgaatccgcgcgcttccccatgggcccagctcagcgaagccgacaacaaccactgcatcagcaggcacgagatctgggtgtagcagtgggtcatactcagggagtgatgggaacccgagatggagcgagactctttggtccactggttcttgagtacttcctgcgcgtcggcaacggtattctcgttcgtcctcctgtgctagagctcgggcagtgtcagcgcgctcacgaaggcttgcacgggcagcagcaagctgagcagaggcatcgcgccaacacgagagatttccagaaaagtccgccatgacaggggcatcttcgcagcgggtggctaactgcggagttaataacagtgagatgaggtctcccatctcatcaacagagaatgtcagcacgcggccttgtttctctgccgtctcagcaacaaggtcgttggccgccatcaagcccgttgaccgggtccagccgatgctgacgccacatattgagagctcttccttccatgactctgaatggaaccgctgtattaatgtctcaagcccgcgtttggactccgcgtagagaccgtcaccacccaagatgccatggttaggagacacaggcagcacgacttgggttggtcggcaggaaatacctctacgccttttttgagataccacgaaccctacaagacgtagtacattcaccagcatcagtcgaaacgctgcttcattactggcatccagtccgtcgatttcagctcccacctggcttgtggcagcaaaggggaggatcgcatctagatccagccccaagtcatcgtaaatgtagccaatcagacgctcacagtccacaacgctggcctgattgaaaggcactagatgtaactgcgatccgcgatttccacacttactatacagctccttgaagaaggcagcggcaggcaatggctcgcggctcgtggttacaatgaccctggcaccacctgttaacaagcgacggacgatatgttggccgatcgatcctggtcccgcccctgttataaggtatgtgtggttggcaaaagaaaccccttgttgactggcatgtaccagactgttgatgaatactgatgtgaggtcttccccattagattgtatggtgcatcgaatgttgtttgcctggatccagctgctgaagaactccacaaagcaagaaggctcccgttcatgttcctcgcattgaatctcccccttaagggtcaccaccgtccgtggcatcatggtcgccaaacgccctagccggacgacaggagggagagaaatggcctggatgaggtccggcacaaggggtttcgcgagtgaatgtgcccgagcaatctcaacaaggccttcctcagcgcgctggacaaagtgctcacgcattttgtctgtccattgtacattactattttggcagattgtcagaagctcctggcgcgccgagttccaccagtcgcggtaccagcgcgtctttcgtgcgtcgaagcgacgcgaaatctggctgaggaagtcgtccgaaaattcggcagtccagcagtccagcttctgctgtaggtctgcaagatctagaccatcctgtttcgtagttggggtccgtatccctaggtactcgcgaagagcctcgtactgctttcgtgcaagatccttagacccgagcgagtctgcaggggctatagcttgagcgccttggtcgtcactccgtgcagcttgctgtgagatagctttccgcaagaaaagacccaatgactgcccgtaggcctcggtcaaaccgtcccaatactgatatgccgcctccaaggaggtgagtcgggagtgaggctcagccgcaagtgcggtcaccaagactgcagtttgccgatgaaatccaaggccccagatttcggtcaaacgctcacgcacattcgacactgtcatgcgggccggcatcttcgccgtgaaaactctctgcagaagagaaaccgacgtgggtcctagcgagacctcgcccagggcagcatccaagtccgctagggagacgtcctgcgcgcgatcagggagagaggtctggaactcattggccagctcgccaatcagttcattctgtagtgtggactttgccgcacacagctctctgattgagcgactgcggtcaatcctcggttccgacctgtggagcttacggtcgaccagagccctaatgatgaa

SEQ ID NO: 11803 - DNA, 120 bp, Emericella nidulans
cccaaactattgtcggcttatctgagtgatcagattgggcatgtggggcacctccacatggtgtttcctgcacaacactgcatcctgagtagtagatgagttaggtgttcctgtggaaga

SEQ ID NO: 11804 - DNA, 123 bp, Emericella nidulans
gtacaattcgagactaacataggcgtcaggatagcctgatacggcttacgtggtatcgtaggccggtaggccgccggagacctgattgatgtcgtccgtggccaatggccatagacgcggttg

SEQ ID NO: 11805 - DNA, 3384 bp, Emericella nidulans
aaagttagtacaacagacagcttaaaaagggcactttagccgtacggtgtttgctgcatccttgaaggatatacgtcccgccgagggcttgatactgaaaacaccttgaaacgaagccggcattgatacggagccaccaatatcagtaccgattccgaatgcgcttcccctcaacgcctgcattgcaccctcacctaagaattgtcagttcagcgacaccgcaataaatgcggagaacgaaatcagtatttgccagacctcctgatgaaccacccgttgaaagattctggttgcaggggttgaacgcatatccgagtatgttgttgtttgtttcaggggcctttactggtcagcagcttcgaagcctgaggaaaccatgagataccccattttgacctacccacaggctttgcatcagagttgtctatcctccgtacttttgttcagctgtgtttgtggccggtaagttgcgagtctgttgtgtgacttacctttccaataggaactgcgccgaggacgtgaaattcgcggaccaattcactgtcgacattctttgcttttcccgtatccatttctccctcgaaagtaccgatccaaccaataaaccccatcgaggtatcgagtcctttaatgtggaactggtcctttagtgtgagtgggatgccatgcagcggaccaataagctttttgtgtttgttgaagtagtcgtcgagctcttgggcccgctcaatggcttcattgaatctgatctccaacagaagattactctaaaagaagtttcagagatcttggccttgatggacgggggacaaactcactaattgatgagcataggcggccctcttgcaaaaggccttgactacctccactgctgtgagtgtcccatctcccatcctggccacgagctcggggacatccatgtcagtgacgtatcgggacttcgcgtccagcaacccgtccatgtaatccccaacaatgctgttacgagaccttccgtcttccagcacttgaggctctaaaatccattcccgcgggattttggccatgttggcttcgcgctttgcgctcgcaatctgctgccaccgggctggccagctggaaaagatttcctgaattttccacatatcatacgtccagtccaacagtgtcaaggctgacacaaagagggcgacggtgagaatgagagtgcgaaatttcgctgccattgtcaatgggctttatatcattcgaagctccccttatttatggggaagagtcgtccaaggctctcgccgcctcttcgaattgaatgcgtcctacgacagtcagggagtgctgaaatgccccgatccacagagccacagtgaatgagcggcgactaaagtactcagacctcaggacccaagcacgcgaacctttttgtgaaagtttgaaaatgtctgtatagctgctttaaaccgggaaaattattgggccaatgacctgcgcctcttaaaatccaaccgatgaaagattacttttccattagtacggcaaccaatcagcggtcaatcttacgatctcattacatcggctcgcacgagcattcgggctcgaaagacagcattcccaggagatcacgatagtcggtcacccaactccagccgctgctgaatgtccacaaggcgtggagtgatcagcgtatcacgtctctcgcatcatctttcagctctcttggagcccggtgcgtgagttgcggtgtgcgactctctcctcagcttcaatttgatcagaagacagccgttacagaattttggggcgtcgagaccgagaggggcttgattcgcatacgtagccggcgataaatttgtaggcggatgcatgaaacagacatccggtatcgatacgcaccaattgctattgtgtttactttgtcctagtggatcagtgaaattatttggagtccccccagttcaggtttggatgccttgtccgcagctacttgactggcgaacgctgctcctctcacttcatcagtaggatgcaccgtatttaatctgcaaagcgaggctcccgtcgcgcctagcaaacataaaacagttcaccaatgccattagataattagattcgcaaaatgcagattcagactgcaagtttcagatgacaaaatgagtcgacgagaaacggtgtgatgggctgagcttatgcatgcatgcttgccacatgcacttttccacacgactcatacactaataatattcctttaggccctcaaaaaggtacgaatctggatgaaaaagcggctaagcaaggcctaacaccgaagatccacggcagacatgctttaggcttttagcatctctggcctaataatctagaaacaaggggtcgccctagctgctgccttgttaggtacgcgcgaaagaggcgttaagaatcagattatcgcaaacaccaagatgatagaatgttaccagtgcatctgcactttgcgacgtgttttaataggtccagtacgttgttccgaagtagtccaggcaaaaacaatgcttccactgtcgaaatccagaactccagacgccagaactgcagaaagtacccccacccccagcctggatgagcccgctgtcctcccctgaagaacagaattgaataccgatacccgtccgaaactccgtgcctgccgcttctaaatagagaaacagatcttcgagcccagtccagcccttcagtcacgattcatccattattccattccgttcgtgtcgtttcgtaatctaagcccctcatggcatgccgttccattttatctgaagcccaggtcaatcgaattccaaactccatcaggttcatccccgctcccgctcactctgctttttaccccccgtagcttggataaccttatcgacctcccctctcagctccggcatcgcactcctcatctcccgcgcaagcacatcccggaagtctgcaaaggcctcctttttccccttgagatcctggtttccgcgctgcacgagctcgacgaactcgcgcgtgtagatgtccgggttccgcgccgcatcgacgtagtcaattatctcgggtggaagggcaatggagtggagagcggggtcgttgggattcgtgctttggtattggtttggggccgtcgtggatgctgttgggtcgtcgcgcgtgtgtaaggagagggtttgcagggcagtcgtgaggtttttgctgtggtagcgcagctggttagattatagtaggtaacataaaatagagtatgagaaaatggcgcgtacgtacatcttgcgaacaagttcctgctgcgtctctgggccgagatagccatgaacggcagattccatttcgaagaggtgctggatgatatctttgaaatcggctaatcaattcatacttgcgttagtgggcgcttattat

SEQ ID NO: 11806 - DNA, 394 bp, Emericella nidulans
tgacagaacgtggacactgcacagatccgacgcgggctgacacgcgaatcgatctattcgtttagccaaagatggccccccagtcaccatttcgaagcctgggacgcgtagactagacatagtactgagagctgtggggacccaatggcctgaactatatcatacggccgctgaacttctgggcgcggtgacactgtatacaggaggcttctagatgaggtgccgaagtgtatcggatacctaggatgggaccggatgattcaacgggctatagcggtcttgcggcacgtctcccagagcgaatgcctcatagactatacagtcgtatgcctgtataagtgttctgtggaatacactagggcggtggtatccggtctcgagcgagcatgtaggc

SEQ ID NO: 11807 - DNA, 176 bp, Emericella nidulans
ccaaacgggggcagcataccggcgttatgcacgtcaacgacactcgcggaaccgctgatggacgtcacgtcacagacggccgtgtagtagcaaacgctccagaaccggatcagaatgggagtaccgcggtcgcgacagatgaaccgaacgggggccagcgcggcgccggtgataga

SEQ ID NO: 11808 - DNA, 860 bp, Emericella nidulans
  unsure (1)..(860): unsure at all n locations
cgtcggtgagggctttacctgcggccggagtaagaacggggtgcaccttggtcttggcataggtgatgtaggccgtcaaaaactcaaccggctgtagattcatgaagtcagcaatggataggtccgaatatcagcccgcgttgacttaccaaaacctcgcgctcactcgcgttctccggtctatcctcgagatacatgttgacaatgtgctttgcaagccgtcgatcttccgattcgtccacgcggtcaagaacaagatatacaaggtcaaaacgagacagaagggtaggtggcaaatcaatattctgcggtaccggcaggttcgggttgtatctgctgccaattgggtttgctgaggcgagaatacttgtcctggcattcaaagtggtgatgatacctgccttggcaatagataccgtctgctgttccatgacttcgtgcaagacagaccgggttgattcgttcatcttgtcaaattcgtcaatgcagcaaacacctccatcagacagtaccaaagcaccagactccagaaccatttggcgggtttcggggtcacgagtaacgtaagcagtaagaccaacggctgatgaacccttgcactgngtgtatacacctcgcggcgcaatcttgtgcacatatcggagcagttgagattccgatgtgaaggggtcaccacaaaggaggacgttgatatcgccacggtaacgtggattatcacccttttgggaagacttggttgggccaccaaatagctggagcaagatcacctctttacatcgtccatctcgtaaatactaggcgcagtgatcgagcaagaagctcatacaagtcaagttttgtaatgttccgaggatcttttt

SEQ ID NO: 11809 - DNA, 2062 bp, Emericella nidulans
cgggctatcagtgtgaagccctagggctgagcctgtgagcctcagggtctaaaggtgctcttcattgatcgttttcagacgcgtttcagaaaacgcaggggccaacatatcgccatcgcatcatgcatttggcgaaagcattgccattctgcgattcttcgataatttccactgtcgcagtgagccagggcagaccatggattccgcgtggcaacgaagagacactggtttgggcaatcgatcaggtattggatgacgatcggtagaggaagtatcagtttggcgagccagatcgttaatgaatgcgtatcaggcgttgttatatagtcgaattgaaatttccgtcatagatggatgcttcgttggctttcggggtgctaatcgcggttaacagcaaacgacagttaggctcccatgagtgatttgaggttgctcaacctaggcatcgagcacgcgattccatcgacaattgagagtgatattcccttcaaagccagaaatgacccaattatatccagatcgacagcaaggcaggtacagcgaaaattggggccaggaaggggattcgcgaaactcttctctggaggaatgcccattctactcggaccccttcatggcgtttatcattgagtgattgacgcgatgaagtttgaagttttctattcttccattggtgaatccgttgcgtttgtgttggtctagactccaagattggccttggagctatcgtcaattcgacgtctgataaaccaatcggtgcgaatgaggccatcacaaaatcgcgaagacgcagtagaccatcctgcaactcagcttcgagattcaaacagcaagtatagtcgccgtaatggcgaattacaaatcgcggagtacatcgaattcgcatcacgggcttccagcatcatcacaagagtcaagtggctgatcgcatctcgctgaagtacttcgtatcgctagctgcccgttcgatccataaccgggaaggaagagggaattgagtcagttctgtcgctcaaaccgctgctacccacgaacaattgtgatgtcgcctgctgatggctgacccctgggattgccgtttgcttcgtcactctcaaccatgaattaccggcttcatccgtccatgcctcgggacttcttcgtccgcatgatctggcagctgaagcgacgcatagtcaatcatattcaagaggaacgtcggtttcgtgcacggtgcggtcagatatccagctatagcagtgttagataagatcccaagtgaggtaaaggatcaggctgctgcgactggaaatattggcccgcctcaaccacgaatcccaacgggcataggcagtatagctcgaaactaacctggaatgaagcaacccctcgatttattcgagatcagcgaaccagtcgcaggaggtgagctctatgaagtgaaacttgtgctatgaaatcatccgacgacgcccgcagagaagggaaggcatagaaacatgggtcgcgtagaatagagtctggcgcgctgagacaaattttgcccacgcttcaccgcgcagacgagagggagttaacgccgttagcgacgggtggaaaatgaatccgaagaagggcggcggagtgcagatgggaagaattggaagcatttagccagccacagcaatggtcatgttcttgctgggccactagacccttcccagactcccaactggtcgatattgatggctaaacccggaactatattccgttcacggtatagcaggacattatccagaccaagactctggcaagaacaatgcgattcctgtgcactaatgtctgagcgggcatatatatttgcactagacatcatgtgctttgctaggtataacaatcatttggctagataaaaccttataagtgagacaaaaaacactctctagaagactggcttaagtgttcctccattctattctctataaccagactagatagatgctcaaatgctagtttaatcaagctttttacgttcgagaaccgtaaaaaggcttcgatccggttcctgtttaagaccgagcaggggttttccgggacaactctg

SEQ ID NO: 11810 - DNA, 115 bp, Emericella nidulans
cgcaataagcattggcgtccacgaaacaacatccaagcccaacagccccgacccggggagggggcaactccagcacatcgcacgccagagcgattgccattgagcccgcagacag

SEQ ID NO: 11811 - DNA, 660 bp, Emericella nidulans
atcgatcccagatgttcctatagtcaaatagctttgagaatataatagaccggtcaagacgcgctcactcaaaaacgtgttttcaccgtttttagctcaatgggaagcaatcctcctgcgggctgcgaccttttgttcgcggctctgcgaactcgagcgaggcggttctttatcttcttctgttgaagttgagcaccagagtgcagaattctcggattgggatcaatcatattgcaaatccaagccttgctccggtcatttccattgactttgtatggaaacagctgccggctaacggagcttatggaatataaaccggcacgatgaggagtgcttgagggataggccgaacagtattcaatcagggcctcttccgttcttaatagagaactaccaagggaggaatcataccgccagcactccgggctgcttggcagctaagcaagacgtcaatttggcgtatctttttcattcttctaccgtacctctatcaaagtacggcttcggagttgacccggctgtgagagatcttaccttgggacgatagagagagcctctcactgtgaactatgacaacctgattagggtggggcaggggcctgcctgaggttctgcgcagatgggagtgcagtatcctctgagatctgtagcgcgctggac

SEQ ID NO: 11812 - DNA, 1097 bp, Emericella nidulans
catccgttgccatagtgggaaccgtacatgtagccagacactcactactcgatttattttaggtggcaagtctagaccgacagatagacacgagatagacgatcagagaaaaggtctactccgtatcgttacgttttctaccaagttttcagtatcgacaaccaaatcaagtatcgacaaccaatttgacaaccgaatcagtgatcctcataatgggaaggcagaaactcaaaactcaaatagaaatatcgctattagatcctattcaggatgcctaccctcgcttgtgagcccagatcttccgtctcgccgcttcaggttccctaggaacatcgaggcgctcgagagcagttcacactccaaattccaatcagatggttcatattgcccctaatggatggtgagaggcggggacatagccgcatcgcccgagatgcccagcaagctgggcatccacgagagctgaccagataacgccgttcttcatcttggatttagttgtgtgatgaggaaaaaattcgaccatgagaatcactcgccgccttttgtgtgtgcggccggatcattctttctccgcgcaccgaccaggtcggggatgctagtcctgatccgtattagcgtgcaacttcccgcgggcaaccaacgtcaccttgtccggctccgacatacggcggagactcctcctcctacttatacttcgtcttttcttttttcccctcatcaattcttcaggagataccctcagaagtcaagtatcaccatgttaggccgctgtggtcgccaggcttcgcgcctcctcccgcgtcctgtcaccgcccgcccgccttcattgcaatggcagcgtatggtgtcatcgtccagagacggccagcaatcggtacggcaccgcagaacaagcaatttagaagatctgtgactaattgatcgatagttgctcactgcgccccttgaacaagctgacccatcagtgtacaacattctccagaaagtgggagctccttccccctccgccagctctacaggtagctaacctaattgcaggagaaaaaacgccagcagcatttcatcaacctcatttccttcagagaacttcacat

SEQ ID NO: 11813 - DNA, 126 bp, Emericella nidulans
gtcacatccgcgttaatgcggactacggtagacgtctacagcgatattccatccgatcgctacaagtctatcatatctatcacctctatactcccgagtaccgactgacttactctcaattgcaat

SEQ ID NO: 11814 - DNA, 212 bp, Emericella nidulans
atcaatagcacaaatatgactggttacatattgcgctttcttctcttctgtcttaccaaggcactacacctgcatcacgtcctatacatgacgaacctattgttccagcgtgcccaacaagcatactgcctagcatcaggggaatgcaatcgatccacgcccgtcgcctgtgatcgataaacgatccagcatgaaatgtagtggaatcccat

SEQ ID NO: 11815 - DNA, 1987 bp, Emericella nidulans
gccaaattcgaggcggtggtcgacactaacgggaggcttggcactggaaaagaaagtgcccggccagagttcctcatcatccggagcaggtcgaccgtttcctccacaccaacttccgaacgcccactcttcaggaacaatggcccattgtgagcgggcctccaggcccatcatccaatgcctttcgaaatcctcaattagaggcatatccagcgtccagctgcagacgcgcgccttccagaccacagctgctgtccaggaggaagcccagaccgaagcgaagagccagcccttctacaaagcgcccgacccagctcttgtgtcaagcccgcgtttggagcgaaggttgatgcgccagggtattctaccgatcgggtctcgtcgacgtcgtgccgcgttgcaaacaacagacagtttgcctttcgaacagctaccatatcaatgcttccaggaggcacggaaggttctgattgcggaccgggaggagaagttgaaggaaattgcaacaaccagtgagaagatcgctaagattcaggcgctgccggaagaagagcaaacaaaacactccacctatgctcgactgcgcgcgctggaggtacatcttgatagacttaaggttctcgcggacatcaatgaccccctcgtgaagaagaagtttgaggatgggcagggtaagttgctgcggccttcgtcctagtaaccaacatactgactgtgtaggtgacatgagcaaacctatctaccgctacctcgccgatcagaaatggagagagtatcgccgcaagattctcgttcaacgaattacccagatgaaggtcattcctgatgtccttccccattgcgacccgatagtcgacactaaactgtacttcggccgaaaagctgtaccacctggagagtttgtaaactctcaggttagcagtgtccctcccaaactcgacatccaggtattcgacggtgaaaacaggctggtaacaattgccgtcgtggattcggatgttcccaacgtcgaaaaggacagcttcgactatatgatgcactaccttgccgtcaacatcccaatctctgctctgaacaccaaggttgacctctctcagctgtcgacggagtctcaggttgttctaccttggcttccccctgttgctcagaagggcagcccgtaccaccgcttgtcccttttcgtcatggagcagaaagacaacaagcctttggactttgcggccgtcaaggccaaggagactgaccgccttaacaagcttctccgcactttacaagcacggtaccacctcaagcccattggagcgcacctgttccgaacaatctgggatgacgacacccgcgatgtcatgaaggagattggcttccctcttgcagacatggaactccggcgcaagagaagcgaggccctgccttataagaggagaaacccttccaccttccggtaattcgtctctttatctcgcattcgttttagatgtattgtacaaccatatgtatgaatatagtacctccaagttaagccaattccaactccaaactcccataatgcatatttgtacaaatcaccacagcactcattccgcagcctcaacaggcttcaaggtatttgtcacccactgtaccttggacaacggccaaatccttgcaataaccttcccattaatcaatcccatcggcaatgggccaaaggtcctcgaatccctcgaccacggcaggttgtctccgcacacgtaaacatgtccttccggtacctaccctcacagtcagcatatgcaccctcgacttaaaaatataggaacatatgtgaagaacatactctgatcatctctccactccccccaacatcagtactgagcgggtgatcccgacaaacaaaatcccccggtaaaccgataaccctctttgcgccaagcaagcccaagaagctcgggtgatagaaacgcaccacatcgccctaccgcaattccgcgccagtgatttgtgcagc

SEQ ID NO: 11816 - DNA, 140 bp, Emericella nidulans
  unsure (1)..(140): unsure at all n locations
agcgttttcgggtgggtaatgttggcggcggtccctgcgtcaagggtcctctcatgcacgatccggtgctcgtgtcttgtcgttttacaggccctccaangccagatatacctgttcacgtgtctattctactttccctc

SEQ ID NO: 11817 - DNA, 2374 bp, Emericella nidulans
tccccccgtgtggttgccgaagtccacccatagcgaatgacagatttgagtaattcgatgacgaagcggacgcaggaccactgcctttcccatccagatgagtagagcttcccgaccgtgagtggccattcgcatcgttcaatcccgtattcgctaatggcgttggcatcggccgaacatttctctgaggtggaacatcttgagtgctgcccatcggagttgccaaggcgtagttggggagtagcaggatcgccggagggccgttgaggctggggtgcatccgacataataggaacgccattgccggcaacaggacgactcgtagcagagggcggaattcccaatgtgagcttgggaggccgggggctgttcgagctcccgcgattgcccgggaccggagccttgaggagggggacgggagaggacgacatggcgagactgttttgcctctcaccgggcaagaacaactcgtttggatccgtgatggtagccagatcggcggttgcttcgctgcgactgatgtttggactgagaagaaaagcaaaataggagaggggagtcgggacaaagagtcgtggggcagacagtggttgccggcagtgagtgaggggtcagttaaggacacaggatgaggtagactagaccactactatgcagaggatgcacaagagggtaatgcggacagcccagataaggatgaggggcggtgggaggggaatggtatgaaacgagagggggatcaaagaagggtaacgagttccgagtaagcgaatgaccgaagagagacaagtaggatagggagatgtagatggcggcacgacggacggcgagagaccgtcgaagcgatcgatggaataaacgatcggacgagagcgcagaggggacgagagaggaggaagagtcggggagggcgagaggtgaggcgagaacgagggtcgggggccgttcagtcaggcggttaatatggcgtccacgttggctgcaggcctctgtatcttatgcaagacgaccaactggctcagctgggcgcttaattgagatctgtcaaatgtattggaagagtctcactcgtggttcaaggaaagacttgaagagtgttgcagggtactctgaaggggttgtcctgaggccgctcaagtcggtatccagtcaggctaggcatccatcaaaattctgacgatgatttcattctaagtcttagtctttcactgatcccacttgacattttatgacagcagcagctgagacaccaagcctgagctcagaggaacttgtttcactgctggagtcgcaattgtggctttactccccttcccccactgactgcgcctcattctccagcacggtgatgatcaaacatgtcagatttagagcagagtatacagactacgcaatagaaagaagagataataatagatgcatctggagatgtcggaggttcagtttaggaaactttaagttctattttttgcgtagggtagaaagtaatactgactttcagaatgggaggctcgactgagttggaggacacttcagccttgtgaggccaagcattccctcgctccggccgatctctctatcttcgctggaaacctcacgaccaactttactacgtctgttcccaggtgacctcacgatggagtctgaccagacttcggcttcagaggtagaactctcgcccccgaccgacatctgacgtccagatcctgacagtggaaactccatcaaccgggagagcctcgtcattgatcgcagaaagcctcccagtctcgtctctcaattggtaccagatccaatgctaattcatcggccaggtctctcttccttatcgaaccggtgcctgaagatcgcccatccctcacgataccaattactaccaaatacttttacgtacctgaggctctcatctatcgggcttcggccccatagctcactcgctacggacaagtgactgatggcagtcgggaatcctccgagtactctgtacttcgtaggacacaatgctcaggactgagcagacgcgcggcgaaggacgatcctcctacgcagatctccacatgatccgatcagtcgtggacttttacggagtagtccttagcctcttacgtgacaaccctgccttgatagttgagcgagccagacacctcggcagccaagaaaagaaaggtggattcgagttgtgttggcactcagcaaccacactcttgacggtatgaggcccgaaaaaagaaagaccagacgctgcagaaatcagcttcatacctcaaaaattctagactcaaggaatcgaacaaagttacctggccttgtttcaagccattatgtcaattcagcagcccctgattcatagattaaacgcagactcgagttgtgg

SEQ ID NO: 11818 - DNA, 118 bp, Emericella nidulans
tggcagccgcgcttaagtagcctatctgagagtcacaggtcttgggctctacgtgggatatccctcccgatttgagtgcactgctagcatacgtgttggctgcttcatatgctggtgc

SEQ ID NO: 11819 - DNA, 491 bp, Emericella nidulans
ccaccccgttcgtcgtagttcctacgtatccagcgcgcaatctcgaatgcaagcccttcacatcagcagctttttgtcctccaaggattacatattcctgcgggagataatgttgacccaggacagcacaggcgcttgagtctcgatggagaattccacttattgtctgacggccctaacgagcggttgagtgagcgtctaacgcaccggatccataacaggctccccatttgaaacctgtgggcaggcagacttgaacctatcataccgagcatcctggtgatcaatcgatctgggccttgcaacgttgctgccggctaggatcgtcaactgatagatagggattggcacaaggcaggcatagatccaaactgtatctcaagaggcgagttccaaacactatgcacagctttgacggatgaaactcggtcataacattggtctatgaaagcagccctcctctcgccgctgtatctgcgataccccatttt

SEQ ID NO: 11820 - DNA, 571 bp, Emericella nidulans
caactgtcttttatcatactttccggcggtcgccgtgcatgtgtcaatcgaacgcattatcaaaactgtattttctcgacagcggagtgatacacagatctaggtacgcggcttgcatctgattggatagatcctcactgtgccgccacatacggatcgctagaaccttacaaccgattatcgcgactctcttctcttaccctagaatgcactgagccaggacgtaaacagcgtacattggaacttcattccgcataatcatccgggatcataggttcctaccaaaatgtcctgtatggcgtgaaaccctcgaaatgccatgagctcaactttgctggaaagcatttctacaccatccgccgtgctagcgaactgttttcctgagacaaaccaaatgcgaaccatagacaacataggaccatcttggaaccagccagtgatcgtgaaaacctgggttacaaccagttaacaaacggtgaagtgcgggtcctcggatgtgactttaaactcgatcatacgtcctgcaagctaacttaagcatgctgtcagcttggcgcactatacacggttt

SEQ ID NO: 11821 - DNA, 1700 bp, Emericella nidulans
caactttattcgcgccaaaaccagcgagccggaccccacagacgtcgcaggtaacttggagctcctgctccagaacaaggctggcgaatgggtcggccccgagacacaatcgccctggcttcgaccatccccgacaggtttccgcaagctccttaagtggctcagcgaccgctataaccgccctaagatatacgtcaccgagaacgggaccagtctgaagggtgagaacgacttgccgcttgagcagctgctgaaggacgatttccgcgtaaagtactttgaggactatattcatgctatggctgaggcgtacacctacgacaatgttaatgttagggcttacatggcttggagcttgatggagtgagttcctggcctcgccaccgacattcatttcgttgaactatcgaaaaatgctgactccctgctatctagcaactttgaatgggccgaaggttacgagacccgcttcggcgtcacgtacgtcgactacgaaaataaccagaagagatatcccaaggcaagcgcgaaggccatgtcagagatctttgcgaagtatatccagaatgagtgagattgtcgcttgtgtctctctttgttaatatagtcactctagattggttattggttagttatatatgattgaatgaatgtttctttggctttactatacgcgtatattactcgacagcagcagggcagtgcgatttcataagccaactgtccgtctagcaaaagcagcgcaggagcgcaggcagataaaaatgcattgcaccttcactagacgattcaggtgaacgtcgctctttctcattttgaattaaccttcatcgcgccttcctggttagaaaaacagagcttatggataccgcagtgatctctcgccatctaggttgctccgcctgcgactttagatctcaacatacatcttcggcccaatctattgttagtgaaccaggtatagacatttaccagtcggcctgggatgctcttggtaaggagtttccgtacatattgatcagctattgatcagcttttgacaataaagcttggctctatgaaccgttcatttcccttcaagctgaagttcgcataaaaatctatgtcttaagtattcaaaaaatgaatcgcataggaattgattgtgaaaatctgaatgaaaccgctgagagccatcttaaagcgcataacgaaaatcctttgattccatatccgtcatatccttgaacccatccaaaacggccctatcctgcctcatgatgctctcctcagcagtcatcttccggtcccgccttacattctcgatcttcataacggcgtacgcaacaccagcgagcaaaatcatacccgcgtaacagatcagcaacccggtcaaagcggagaaatatcggggagcttcgtttgcaaagaaaatgttcgaccccgcaacgttcccgctcgcgtatagcgtgaaccagaggccgttggcaatagagcgcttcgtgtgtccggctatgttagtggagaggagattccaggagataataacgggggcaccaatgatgtattgcagccaagtgcagccgacgagggtccagcggtgagagagatctgtaaagcggatgtctaggagtctgcgaagggatgagggagacgatagcagcacaatgcagcgtgagtcgcggacatatgtggagacgagactgcatatgggacgacga

SEQ ID NO: 11822 - DNA, 1994 bp, Emericella nidulans
ttgtgagaacggcatttgttggtccaaaatatattttgaaacataaatctgatggtactaaaaaatcgcgttactaagctcagtagaaaacggatttggttacttagcattgtgcaggcccatattcggcgtctttgttttgctgtttatttaaagagtatgttataggtttattctttaccgccagatatagctgaagccgttgttcgatataggagtgatgtcattggaatgacgggttcatactctaatgagcgaaagaacaacaatatcgctaagaatactgccagttaaatgatcgccgctccctatgtctcaaggtatcgactttgtcaacactttatctatctccagctttttgtatcatgtagtctggtggtccacgggccagatgctggtctatctcaaccggagtggcttgactggggcgagctagcactgcaagctgcaagaaatcatggctaaattaagattctggagtaaataatttatctgcatcagctatgcaagagacgatagttgatactcaagaataaggaactaagtagcaaacaaataagctgcgagtccagatactcgggctgattatttactatggctctaattacggagacacgcgatcgatcgccggaaacaacaaggcgccctaggtgctttatgggcaggacaaagagaacgcatccgtcgcactctgaagggaacggcgtctgaaagcaggagaatcagtatattaggagtcggatctcctcagtctctcttctggcctttctcactcttcctagaatgagcaacgctcctgagcacaatagccagaagtgctctctttgcgtggattatgcaacctggctcgacctacgctgcaaagcaaaaacaaaacaactaatctcgtgattgtcgcgccggcagtgtcagactcagaccaacctaggcacgtactgtagaggccagcttgcaaccgtccggattaacgttcgccgagtgggttgcccttttggggagtcggaaagaaccagatcagacttcagtcccataccagcccgcccctaacttcagtccacctgccttctaacaattcgctccctggcacaccgacgtgcgcgcttttatcatcaacacaccactatcttttgcagtaagtgcaatgcctgactttgcttctgaacgatcacgtcgcgctgtttgtcgctttgtggcccgtcactaacccacatcccgcacaaccagtctcattgactatccatcataaaaatggccaagaagggaggcaaaggaaagaagggaaagaagagcggctctaccgctactgctgctgccgcgaccaacaaggccgccgagcctgtggctgctgcgtaagtcacacctgtgtacaatatttcaattcgcgcgaacttcattgtttgtgtgtttgcgtcatcgcagtcgtcgccgtccgaattcaaattggctgactttggatttttgcttttttcttgcagcgttcccgacacgtccgttgaagagaacgtcgcaaagagcgaaaccgaagttgagcaagctcctacagaaacggttgaggcgcccacttccacccctgctaccgctgccccggagaccaccaccgagaccgctacttctgcgccagaagctccaccgattgctgccgccgccactgagaacaaagacgaggttccagtccccgccgcaaaagatgctccgatagaggaggcggtggaagcggtaccgaaaaccgaggcaaaggaggatgagctgaaagagactggtatgggagagctcacaagccccaggctgttcttgtcgcacggcttactgacacctgctttgtagcagtcgcgccggagacaacggctgaagaaccaaaggtgacgactgagaccgagactgagaccgcgactgctccgctcaccaatcccgaaattgtcgccgcgaccactacccttcccgaaagacttaaggagtcggagaccacgaggaaacgagtacaagagaccctggag

SEQ ID NO: 11823 - DNA, 433 bp, Emericella nidulans
tgtgtgaagatcatcgcactctttgtcggactacctctgtaacaatactcgcaaaccctctcatgtctagaatgtggccattcatattaatgattcggccacgggcatctgccggctggcagacgatcttctgtcggacgccaaacagggttcaactcgggcagctcgactggacatttgcatgggcgacttgagcaataccgcgatcgggtctcgagaacgacgcatggtcccatcggtatgcacctgcacttggattgaccgcaagtcatattcaggccctcgtagcgatgctcactcaataacgtagcttcttccatgtacgcagtagtactttgatacgccaagaggctatccatgtaagcacaacatgggtatgaggactgaccactgggcgagatcgatgttccaaccattcaccaatggtgacgct

SEQ ID NO: 11824 - DNA, 520 bp, Emericella nidulans
gatccctaagtactgttactgtatcttctctggacgccagtgcccccgactgccccagatgggtgtgacgattgcacattgcgcgcctaccccacataagctgctctatggcttgactgccatttctgaccggccacccctgacctcttgtatcaaggtctatggatagactcttgctgtgatccactgtccgtcagaatacctaccctcaacgcctaggcaattttacttataaccatgacacgaaagtatcttctttgcgaaatactctcttaggccagccgatatggcaaattgttcgacgtatactaccatggtgtatttgccccctcctcgaattgactgctttgatagatgcctcactcttctgacaaccctttgtgagcataatgggcgatgatgcgtgcggagatccatagacttcgcgagtgtacaccatactgcgtatatgcttcgttatcctcgcatatctagctagagttgccactttagcccctgtaatatgccactctaacacggg

SEQ ID NO: 11825 - DNA, 485 bp, Emericella nidulans
gaaagctccatcacacacttgcatgactcattagcccatgcgctgccttcattatacgttatccgtgtactgggttctaggtctaccctgaccctgcgatctattgctaatgttgactcgggggtgctgcggactataatggcctcaatcggcgtgataaacacagcttaccccgtaccaaaacttgccggacaaatctgccctaatagcgtataaatactacgcactaattacaccctagagacactgaatgatttctttcccttattcactgccttgacctatcctttaccaacacctgcaccgcgtagttacacctgtcctcagctgacgtatccacaacttactcaccatcacctttgttgccccgaatctccacatggcccactgtctgcgcagcagaatctgctccatcctagctcgccatgcctgcagcctcatgccacaatcgcagcgctgtgatcccacgacagaccttagccgac

SEQ ID NO: 11826 - DNA, 1781 bp, Emericella nidulans
gtcctggtcctgcccaaaagatgtttcttcttgtgagcctgcggaaagcattggcagatggcggaggaagggcgcaatgccatcttcagaagttggggcgccgctggaagacacctcttcagacacggtcacgggcgatttgatcgattcaagaggtggcgaaacctcggccctgaaagatggaacgtgcagtgggggggaggggacctcctcctcggactgataaggcggagagagatcttgctgcgtgttgttgtcataaatataattaatctgaccagtcaacgggttgtagacggagaacagccctggctgaccagcaacaggctgaaccactggctgcacaccctgctgaagctgctgctgatagaaacccatactgggtacggacatctgggagtagtcctgctgctgttgagcaagactcgcacccaggctcaaaccctggaactgttgggcagcagcggtgacactgagcagttgctgttgcaaacgctgttgctgggcagcaaggaagaggttggtagacatcagttccgcatacagattgtcgtccatggggacgtcagtaggaaaatcaatagccggaggtgcgaggacctgctccggcaaggtatacataggatgacccgcgttggtgtcgagtccttggttcatcatcaatgagtgtcgtgggaatccagttcccgtcgcagtttgggggacgttgcgttcggcagtgcgattgaggaaatggccataccggtctccttctagaccgaggtgctgccggcgctggttgttagaggggacggtagctgacttgggcgcagttctcaaacccgccaaaagatgggagcgactggtccgtggggtagcaaccgtcgcagaagcctgcgactcatcaatggtcgagatatgtggcgggggcacattcaagcgcttgacattgggagccttcctccgggatccgaagccggatccaggagcaccgagcgacgggccattattgaaagatgagttgtaagtcatctgagcaagaccgccagcgtccatactcatgctttttgttttgaaacagaaccttgtatgtgcaatagactgatataaatagtcgtggtatctcaatatgtaacgcgacgtagcgtggccgataattgggcaagattggccaattatgagattaagtctttttggacacgagcacgtatcaaccgaaatttatcgacacgataaggaatatgcaacgaatgaagacggtaggggtctgtgtgggcttctataagattagcagaaccctcgcatacagagaaaatgctcagcctactcgcaaaaaggagtgaatccccgggaaaagctgacagacaggtgtatgattagcgtgatgtatgcgtctaggtgcagttggtgcgatgcagctggactggaggtagatagtgaaggatagacggcggtacgcagactgagcggtgattgaaagcggcggtcggggtcagcaattaaacctgaactgtagtaaaataagtttccaagagatgctccgcaacctcggaatgggtggaaataattcttctgaattgaaagctcgagagcttattcctcgagtcaaaagaagcagtcgggcgaaatggcgagaagagccgcttcagttatcctgtaaggggcggcgggattgacgtcgttctctttaactttgatgtaatcttttttttttcgtgcttatgccgtctttccacgagcctaaggcaatgtagagtttcgggtgaagaagcgtgggagactcagaacctagtatccggtat

SEQ ID NO: 11827 - DNA, 532 bp, Emericella nidulans
gatcctgtgctggactttgcgacacctcggccttattgaccgaccttacggatcggaggctacgagcggcccctcgtctctgggcagaatgggcatgcgccaacctgtccgtcgctctccatacagggcatttcatcctttttcgggagctctaagatccgttgcacctgcatctcggcgcttcatgataggatacggtgctgccattcacggacaccggccttaacaaccttgcagagatcccgctgcgcattatctatcatgcctgtggctgcagagactgagatcatgtcccatgtatagataatggttgctactgcattccaggggccgctggtctcgcccaggtcctgttattgcatcggagctagcgctatgggagcggctggcagatcctgatactgaacacttgcaattgtctattgattcagcttgctcgatcgtgaacgtctaaaaccattacgcatttgctgtgcataacggctgattttccccctcgctatctctgtgtatactagcgcctacagcactt

SEQ ID NO: 11828 - DNA, 3785 bp, Emericella nidulans
taaaaaccaacttttattttttttcaaagagagatcaacacatgcgcaaagcaagccgggcacttattgttcacaaatataaagatcgtcagtcgagcgcttagtttcgccacgagtcaacgtgcagaggccatcatgatctgagaaaacgtgtgatacatcaattaaagtgaagtgcggcttaactgtgatagctattgctctctagagtcgacgagatcttggttgttgcttgtggtaaagtctgccatggatcgcgtttgcgttgtatcaatgtgtattgaatcgcatattgatcttatgtagggtcatcgggggcacagcctcgataaaaaaagagcctcgagggcttcgtgtcgcgaccatggaatagaaaccacctagtgcattgttgtcgtcagatcctaagctcgggagacattatgttgctcgagactgtctacaggaccaaaaaaatgggtacagctcactttggagactggtaactacggaatcgtagggaacaggatcatgtcaaagaagagttgcagggcaataggcaatcgcagacgatagcccttctttgaaggataagctgtagtcgacccagttgacaagacaatagccgccagcgttgagccctaactagagaataaccagctttcctcgccactttgcttgggcggtctctgtttgccagactggcgctgtggcagcactgatgccgtttccgatgctgcaatatcagttaatctgtcttattctaccaaatgtctggaacaaatcgctctaggacactccggcccacgaacatctgggccagattgtaggatgacgccttgagaacagtcccgatagccatgattgtacacccaagaaggatggcgttcttgcgccctagtctctcgcctgcagtgaaggcaagcattgcaccgaagaaacagccaacatcgtatatatcagtgaccgttgaaggatctttgtcttcgagggttcaaccagatcatgaacctggagcaagtctggcgtgacgaccaccccacctacgcaaccagatattagctttctggcagtcccaatgtcacaagcgctggcatgtcatactgaagacaccttggtcatatccgaacaacgtcatatcagttgcgcaagccaactgtatttccacgagagtagtagcacttccccggcagaaatggaaaagagagaaacaaaaggaaggaagactgaaatgaaggaagaaaaaaaaaaagatgacatgtgttagggctcacggcttacagagacccagaatgtgagccaccctccagtaaacccaaagtagggcttcgtcggcgccatgatgcaggtcggttgatggcagacgaggctaacagctcctgagtgttggatgtcacacacaataaggctaaagcccctacatagagtccctatatagtcacgacgctgatgtgaccccctccgtacaaccccagatcaccaatggttccaccctgctgctgagcctgcacggggtaatgctagcccctcctgagcccgggtacgagagagattcttctcctctctgtatttccgttccgatttctcttcgacagggtgcctagacttgtcaagtggaggagcagcatgcgaggctggagaaggccatggttggaccagcatctgcctccatatccacggactatactggctctggtctggcctgtcctagtcgttcccctgatccacttgaagccaaagaggaacagccgtcgaattgcaaggtccactgctgttctcttgtatgctcggcacttctccgtaaacattcaattccgggtttgccatagacgtttgaagatggggacgaaccgtgaagcgcaatgtgcgttgtgcagtctctaaggaaacgagtcccaggcttggtcaaaacggtaggcacgacctcatccttggggcagatgccggaatatgctgtggatatgtagatatctaaacttacaggtgcgtaacttagtatataccgcacgtagctgtcatttttacacagtctccctggaactttgctgacctaaacaatctttgtttactctgcagactagccttacgctccctagagctagtgcctaactatatggatgaaaccaagacggacacggaactcatttcttcatacgaacactctacccgtccactatctgtaccttgatggccttggcagctgtattgcttgcggtagcaaacgcttcaaggccgtcctccagcttgtatcggtgagacactaacggcttcaggtcgacgagccccgcgttgaccaggctgattgccttggggtagatgtcatgatagcggtactggaaccgcaggtcgatctccttggccgacatgtgcatgaaggggatattctggaagtccttgccgacgcggatgacgaacaccgtgcctccgaaccgggttgcctgcattgagatcgtcagaggattttcttcagaaacgccgtcgcagtcccaaaacctacatagatccctgcatgaacactgctctccaccccagtgcattcaagaaccagtcgcgcctcctgtccgagccgctggacgatacgcccagccagctcttgtggagactcctgtttctggaccagcaccggctgcacgcgcggcacgagctctttggccttggcgagacggttgctgtcgatatcggtgatgacaattggtgctgccccggctgcattggccgccaggagggtgacgaggccgattggcccggcaccacagatgaccagcgggtcggccagacgcagcccggaccggtcaatgccagccagggcaaccgttagcggctcgagaagggcgccctcttcaaaggagacgtggtcggggagacgatgcagccaggcctctgggtgggcgtggtaccgtcgcagagtgccgtggtggggaggcgtcgaaaagaagacgacgtctgggcaggcgtggtacttgcctgtacggcaaaagtcacaggtaggcttggagcagggtacgccacattccatggccacccgatcgcctgtcgtcatgcgcttcagcgcgggtccttctcaattcccagaaaatcagcaagaggtggctcttaccaggcttaaatcgggtgaccgcgtcgcccacctgcaggacgactccggcactctcgtgccccaggccattatcccccgtcacgaccatagggccaatacggccatgtttccagaaatgcacgtctgagccgcagataccagttgcacggacatggatcaggcacccgtcgggagcaagccgggggatctcacagtcgaccacccggagatcgtggacgggacttgtatggatggcgatattcttgggcttcttttgaaggatctccatggcgacagactggctttcagtaaactctgaagcttggattagtgcctcgaactatataggcaaggcaccggtctcggttacgtggtcgagggtcggttcctacggggcatccccgagccagcacatctagactctacttggagtacatgagagtgacggatacaattagagtgcttcgacgcatctaatccagtatcaaccctggtgaggggtgtttcggggtactgccgcagtgcgcaagacgagttccgaggagaacgagctgccttagggcaaaaaaagcacaataaccatagacattccccagttttcccactcactatccacagcagtgcaccatcaggccatgctctgatacctcttctgttcgccgtccactggagtataagaagtgggtcactgagtcatgagaaagtctgctggtcaacggagatagccccg

SEQ ID NO: 11829 - DNA, 103 bp, Emericella nidulans
  unsure (1)..(103): unsure at all n locations
agcccttcttgacatatnagaaccagcatttaaagagcgtgttggagtgcacttgatgaaaaggcttgcgtccaaatgattcacagagtgaataacggaccct

SEQ ID NO: 11830 - DNA, 1813 bp, Emericella nidulans
agatgcctttggctgcaatagccccctctaaggccatatatctaaggctgcgacatcggatgcactacattcatttgagtcagtagccgcgaacacttcgacaatcctccagactcatgcttgttgacctcctgtaactgcttttacgctctaccccggtcaaactcgatcctaggacaccaatatctctctgtgacaaatcacttaagtgattgcctgctttatccagacatcctttaccttcgagtcaggaagtgtccctggttgtccatctcgcttgaacattctgatctgtgatctgctacctctacctccaaccattactgtcctataccgtattctcaatgtcaaatatggcgccgggtccaatcgttacgtgatccgccgttcttatgatggagcggttcagtgtaccgtgtttgaggagcggaaagccaggcatcgcaccctatctgttcttgaagtttatggcaagcctaaatgactggcgccaaccattctctcctgtgaatgcgcataattatgttgttttcgctcgggggcttgacattgtcgactttgctgagtccgatcgtctccagtgtggatatcatactgcagtatgttagcattgggttagataagactctcgtggacaaggcgtactcaatattattggcacggcattcgagaaccacagtatctgtcctctgatcatgcaaccaacagtaatggatcaaggagcttatgtttctcttcagctgttttggctcgagaaaattcttatcccccatcaagcatcgtatgccacggtcgaaccctccagcatcacctagtacacgaccaacagggtcctccaggacccaaaacagctcacagtaccctgttggggccgagtcccagcagaccataacgggaaatgaactctggctgcacatgcggtcttcgaggaaactctcatgctcgtctattgatgccggacgcgggagagctgtatcttgtggtcttgtcctcagccattcatggactagcctcaagtcattcgcttgctcagagtcgaggcagaggtcaggtcccggtgcggagccattcgattcccctggtggtctgtttcttggggcttcatccgtggtgggcaagacaggtactcgaagggtcagatagtccttgccactttgaatgtgcctgacataaaacacctccccttgcttgtatgcttttgggcgtagtgggtgaagaatgtctccagtatatgtatattgtaaagcttgcggcggatagtatggaggcatgaaacagcccgatgtattagggccggcaccgaagggaaaccctactccgagcgaatcaagtgaaccagatggggctgggtatgactttccggggttcggcatcaccgagctgatgctgaagagatggaccctagggtcaagctcccagaatgctttctggctgatgaacatctggggcagctctattgtatccttcttcaagccaacagaagagtccttacttgcaaagacgcccaaccgttctaccttgactatttgatctttccggctcaggataccgcgcggttcgatgatcagatgccatgatccggtcggattgggtccagtcgaaggatggggtggctcggagggatctggcgtaggctctggctcctgaaaataccagaagaatgtgacccataacaccattgctgcaattctcgtcgacgcgctgcccggtttcaggtcctcacaggaaggcagggacaaagaggacagatacagcgtatcattctccagggtaggggtggtaacgcgcgcgtttcgggttcctgctgtttgga

SEQ ID NO: 11831 - DNA, 492 bp, Emericella nidulans
  unsure (1)..(492): unsure at all n locations
catcacnnntcagtcganngtcagtcngccccctggcntnncaaaccgccccatccccgagatcanagcccctaccatcctgggggcactgtccagcatccctttccagaacatatacaagtcgtccaccgtacagcttctttcggacccannaaagtnnccgagtacagtcngtaccctatcaaacctggcttacnnggggccaccctccatgaatacgtgcctcantcgtgtngatacggcanntttcgaaaatccccatcgggaaatggtacagccccttcnngaatcctccccacgcccactttcgatacaccgnnttctttgtaaggggcttcaaaatcccttggcggaaggaagaaaaccgaagcgtcataccgttgnnngccggcgagggagaacttcccgcgtccgtcgaagaaagggannaagtaatagaaaatcaagtaccgggacctcaaacgcgtttggggcgggccgacccaggcgttc

SEQ ID NO: 11832 - DNA, 148 bp, Emericella nidulans
  unsure (1)..(148): unsure at all n locations
agtttgctatccgccatcatccgcttcctctctcttcgatcctatatctcctcttatgntcactttttcttttacagctaccatgtcggatccatnatttcgacgtttaggagtacccgttcgtcagtgtagttagagagatgtttct

SEQ ID NO: 11833 - DNA, 137 bp, Emericella nidulans
gttagcgtggaaagcgaccaaggcctgaacatattcctggacatccaagcgctagactcaagcacatgtataaatgaccgtcaggacactatgtcgtgtctcgagagagtgggccgtatgtttcaggataagctacc

SEQ ID NO: 11834 - DNA, 384 bp, Emericella nidulans
  unsure (1)..(384): unsure at all n locations
ccccccggaaaacccccgggaagaaccaataacccccataacaaccaaaaaagggccccccaaaggnnaaaaagggaaaaaaaacaacaaaaacccaccccccccccaaaatagaacaagctaccatcaactaccgccaagcaagccaaccacacaccgcacactataacggatacgaacgtgctcaacccaccgcacgaaacttggagcaaatgctgggacaaatcaggaataggcacgaacgaaccttgagcaattccggcggacaccattgacgtaaacacgaacttcgcccagcgaccgaagagtctgaagcgacaaaagaggggacagattcaaccaggagcaggagtaaccgggccgacaaggggcaatggagaagaa

SEQ ID NO: 11835 - DNA, 99 bp, Emericella nidulans
cacacgcacacacgcacgcacacactcacgcacactctcacacacacacactgcgcgcacatcacgggcacacgcacacacacgctcacagcctcacac

SEQ ID NO: 11836 - DNA, 3737 bp, Emericella nidulans
tgtgagcatcagagttcttttgcgcgcccgctctctcttcctcaattcttcgctgtttgtcttcgtcgtcacaatggccggtgctgtgagtttctctggcagatactttgatgcgacggagagcaatcgatactcataggtcacaccgtctagctcgctacgtctatctaccagcacgtcttcacatccctcggttgtccgcggatgacacgattgctgtatttccgacattgctgaccagagtaattgcaaccacgtataggacactcatccgccgaaatgctgtctacctgacatctatcttcgtcggtgctttcgctttcgaagtgtgcgtgtcaccgtccgacatatccatgcgtccttccgcatgctaactatatcttctaatagtgccttcgacaccaccaccaacaagctctgggacacctggaaccgtggcgtacgtacttgaatggccccgtgccggtcatacattgctaaccggctgcttctttatagcgtcaatggaaggacatcaagcaccagtatctcaccaaggctgacgaagaggatgacgagtaaatacggctcggaggtcgactaccaaaccgaaaatgctacgataacttggggacgcctaggcctgatcatatacaccgatacgtgggggcggatgtgctatagtacgggtgcttgtatcaaatagaactttgaattttgtgacctgacattaatctaccctctcgatttctgagccgtagatgtagcagtctttaatgtttgtcgccgtggttatttcatgctttatatcgcggaggagtggtgcgatagacgccaagcccggccgcctttcacagttgggatggataatgtcattccgaaacggggctgctgaggtattcttacacagacaaagctcttggatatctcttccatcccatctgacaagaaggttgacaacagctttagagcggcggagaactccattaataaaaccctgcaggtactccagcgcccattctccgccgtgagctagttttcttcagccagctccctcttccccaccgtggcattgatgcacttaacgcccaccgattgatccttaggaatttttctccacaccgatttctcagtctgcgttattcttgtgactgtgtatatatatacggtgggaatcctcagatactgctgcgccgactacttccttccgatcgaacccctcttcagagctcttcgtttcaggtccgccacatcaagctttggccgctctctgtcgacaaccgctccccctctttcctgagccgtacggccgtggtggtcctaggaccagtgcaataaatgatgcttacagaatgtgaaaggattcttggtcatggccttctacgacttccggcggagcacaactaccgctacggccccgcggcggagaaagccctgctggagctcctcttccgttccatgaccggccacaacgacgaacgtcttcgtcagctattcccgaatggaccaccagctggactgtggaagttggccgaggctcaaggcgcagttgaaggcgccgaatacacagaagccgcgcgcggtaaacgttgcgggcatatccttcgagctggggaggcaacatatcgatgcaacacttgcggagtagacgagacctgcgtctttgcagtaggtgctttgattcttccgatcataccaaccatcagtaccagatttatgtgtcaccggggaacagcggctgttgcgactgcgggaatgaagaggcgtggcggatcccccggcactgcgcgattcatacagacaatggggaacgtaaagggaaggagcgcgtacgtgcccgtctcccagaggattgggtgaataatatcaggttgaccatttcccgcgcgcttgattacttcgccgatgtgatatcgtgctctccggaacaacttcgtctgccgaagacagaagaagggattaggcaagatgaagtggcgtctcgtctgcatgccggatggtacggcgagggagatgctccagaagaggaaccggaattcgcactctgcctttggaatgatgagaagcacacgatgcaagacgtcactaaccaagtgagccgagcctgccgggaaaggactagctatgggaaggcgaaagcccacgaaacgaacgatattgggagaagcgttgtcaaatatgggaaagacctcaaaacactgttaggggtgtcgaagatcattgaacaaatcaagatcaccactacaatccgatcctcccgcgacacgttccgtgagcagatgtgcggaactattgttgaatggctggcggatatcgccgggtgtagtatcctcgatgacaaccagatactccgtcagctagtctgtgaggagctcctgggaccctggagacgcggcagtggcgctttcaacgccgacattggtcgacaaggcattgacgaccattctggaatggatttattagaaagattacgtgctattggcaccgtcatggtacgtgtgacgccgcaaggccagggtgttgccccggacgaagacgacgacgatgacgagatagagaatgagaatgacgaggcaaatgaggatgaaggtgaagttgacgaggaatttgtcgaggctcaagacgatgctgatgacggagacgacgagatggaacttgagctcactcggttgcgcgaagacattgcagacgatgatgtagacatggtgatgggcggtacagaggacgttttgcaaatggcccaaaccatttttggcttcaactctccactccaaggacaacaaactgagcgacaggagcggcaggaggagcagcagcagcagcaagagtcagtccagacaagcaatcctccccaggtttcctctggcggacaacacagtgaaaaccgtgacgcccaaggagtttcacacaaccaggggaacatgctgcatacgccaattcctaaaactcctcgtggcgtgcgccgtttcccttcgacaacgacgccgggctactggcaagttcgcccctccgctcctgtgaccggcgaaaatgtgcctctttatgaggatttatggcagcgcacccgacttgattggatgattctatttgacctgagattgtggaaaaaggcccgtactgatcttcgcgatctttatctcagcactgtggtgaacgtgccacagttcaagagggtcatgggtctacgtctatctaccctatatagcgcgctggcacagctatatttgatcgctgatagggaaccagatcattcgatcctcaacctgagtgtgcagcttctaaccaccccctcaatcaccgaagagattgtacagcgtggcaacttcttgactaaggtcatggcgatcttatacactttccttacgaccaggcaggtgggcgaaccgtacgaagtcaataccactgcaacgctgtctttcgatgcgggctccgtaaacaatcgacgccttatccatttcttcaacgatctacggttcttattgcagtcagagtatgtacagaaacgtgtgcggactgaggaacaatacgttcttcaattcctcgatttaatcaagcttactcagggcatctgccctaacgtgcgcgctgtcggtgagcacgtggagtacgagaatgatgcctggattagtgcgtcaatcctgatgcgggagatcaatcgactgtgcatcgttttccgtgaatcgttcaagaaaccagagcttgatgggggtcagaatttgctacgggctatcacagtggctacgatttctaccatagtt

SEQ ID NO: 11837 - DNA, 710 bp, Emericella nidulans
aaagataggagcgtcagaacaaatgtgtactcttttgaaatctctggcaaaatcgcgaaagaagtgtcaccgacgaggccgcgagtgacgcttgttagagcatcttggttgaccggcagtccaagtttcggtgcaactacgaacgtcagcgtggtgcaggaagagaaaccctaggttcatacgcacatggaatcaggatgcggtccgtgaatgaatacatagcccagacatttggggcccagtaagcatggcataagcctctggagaatgggaacagccgatctttcagctggagcagttggccccagtaaacaaatggtccgaacgcaagcccgaacaccgtaattatactgaggcctagcttgaaagcatttccaaatcgaggccgaaaaacagatttcgggtccaggcagtatgctcgcagcaggtagataaagtatgcaggggcaaggtagagatagatgtgctttaggcagagtagaacggcgaaggcgattccgctatacagcaatttcgactgcttccgagcccagacgatagacagtaccagaatgccgtacaggaagccattgtattgaaaatgaatatgatcgatgatgaacaatccgggtgatagcagtatcgacaagctggcggcatgggcaaggtgtttagtaggttgcggatcggatctgataaatctgtgcggactgtgagtaggcttccagata

SEQ ID NO: 11838 - DNA, 2628 bp, Emericella nidulans
caatatccccacgagcactcgcgctttcgaccaccgcgctccccctcgccatctacatcggcatctaatcctcccgccgcacctacagcgccgttaaggccagcggactttccctcaatggactcttcgcgcaacactctacctcgtccttccttaaccttgccgccgccggatgtcggcttcgccagtatgcctccgaccacaggcccggcaacccaacaactaccaccgcctccttcgcaatggcaaagctctaactccgacgatgccatgcatcactggctccgagccaaggctgaagaggaccggagaagcaggaagaggagaagacgcgccaagagagcttacgtttggagcagcggagggtcgaggcgagcatgcttcgggattctttacttgcgggcatccctccgcaaattattccgcttgtctttgctgggatatgccataatggattgcctcaaccggtagtggagttggcgcacgagtatctatcccaggtttccactgcacgtgggtcgaaccctcaagttgctccccaagctccgtctcatgcgcattcactgtccagttcccactctcagcggccttctatgcatgttcgacaggactcccgttcgggccttcagcactcagcaccgccccctccacctccacctaatatacttttgtcccagaatgcgccctcgaatattaatacgccgtctacccctcagatgcccgggagacgctcgttaccccctgcccctccggattctagagccgggccaaatccatggattaaccaaggaggcgcggcccaggcccaagcgggccaaataaccatgggcaatgtacagtatgcgcctggctcgtcggttcctgtccccgttgcgcaggtctcgcgaagacctgattcccagtcacgccgatcacccccgtcattatatttccatcattgggttccccctactcagtcacaatcaggtgccgcacccggaaaggctcaccaagaggcaccagctcatggtacctctcgtcgttcagagcaccatgcgtctccaggacgaaaaaggaaggcttccggtcctcaccagcctgccccagtaccgtcctctcgctcctctgaatcacttataggagcatcacagacttcgcagccagcgtctccaaagaatggtggacaaccgggaccgttgacgcgccaccatcgacttagcgatacatcatttgctcacggagatcaccatctacgaaacgtcaaagtagagcaggttgggacaatgagcccatctcaggttgccccagccttgcctggatatacgcttgcgacgaccggtgaaccaacagatcagaagcgcagcggagattcgccaccagtaaaagatgttgaaagagatttcccgcagacatttcaagatcttcgcgcttcgagcgtagaggctaagcctcatgattctgttcatgaaggtagctcccagcagtcctccacatcggaagctccggtagctccctcgcagccacgcgatgctcctggcggctaacctgttgagtccttctttctcggactctaatcacctgaaagcatacgggcataccagtgttatgcccacctgcgcgatcggattgccgcatccgaccctggggacgatataatgaatatttaagtctaatttttgcacgtcagctaggctcagtccctgtcgtgctgtttgtattaaactggctgatgcatattctctggtagctggtataccggggttgtacaaaactactagttgtacataaatagcattgaacagagatataaatgttctctgcagactgcaagtttgttagacatagattttttatggttttttgagcacgggtggcagcaaagacaacgaattataatgatcggattaggctatattaggtttggttctagtactgataggtgtggtagtagacgtgaagaaggataaggcaagggatggacgagcccgaacatatgagatggaagttggagaaacagggagggcatcggaaaagaacggggcccatacaatcagatcacggtgctaacacaaacacgtgcattcaagggggagccctagatgggtatggtacggaatgaaatgaaaaaggtaaaggggtatcagaatcagaattagggctggacagccttggcttgtaagttttaggctcacaccacacgcacacacacattgagccacacatgaataggtaagtaggtatataagaaaagtcatatcgtgtacagaaagacaaggagggcaaattagtccgtgtaagaaggggtatagaggtaaaaaaaagaaaggtgaagggagggtatagtatagtgaagtagacaaacagaaagataaaagagtacaccacataggtgtcggaggacaatacaaaggggtcggacctaggtttgccatgttcaactgcacggcatctggaaagtctcatcgcaagctgattattgttgcggcattaggaggtaaaggtgtccctcaatctcggctcgaccttctcacggcaaacagcagtggtatctgttgggaggccgttgaatgtgaggagtcaaagggcatgaacagatcccaatgtatcttcctgccgcaggatggaattttatgtgaatgttacataacg

SEQ ID NO: 11839 - DNA, 141 bp, Emericella nidulans
tataatgacaagcgcgaaatgtgatcacgtcatgacaggaatgacatgataccaggactcgacgcgaaggagaaggtgcgccttcgaatgtccaaggacaggccgttactcacagtgtcatttgatacgacaatgcaatgc

SEQ ID NO: 11840 - DNA, 1763 bp, Emericella nidulans
taactgccatttttactattgctgactcaattgcgattctctcaagaaggactgttgaagaggccgctgaagaagatgcgaagaaattcccccgcgtcgcctcttctctcttctccatctactttcactccacctcatatattaaccttggcccggcttgagcgggatgatctcgtcattgggattagatcgcgtccttcttgtcccgaagcaagggttctaaacggaaaacgatccatacctgcattaattggacccagaccagctcaatgcaggtgtttaccgacgtagtcggacgaaatcagccaacccagtcctgaaaggcggggttgaggctggacaagagataaatatgatggactccctctgagatcgaccatgcggagcctagcggattggccttaccgcgaagtcgatcgccatgagactgttgccagtctggacggctgccttgctagcagcccaggctgctggtgttgctcttacccacaagctcaatggcttcacgatcactgagcatccggacgctgagaaacgcgaattgttgcagaaatacgttcgtatcattcttcttgtgtgctttaaggggtcgttttaacagatgagtaggtaacctgggatgacaagtccctcttcatcaacggagagagaatcatgatctttggcgctgagatccatccgtggaggtaaacaatctgacccgttccgtctagacgcatgtactgacctgaaaagactcccagtaccttcgttatggagagacatcctccagaaagtcaaagcgctcgggttcaactgcgtttcgttctacgtcgactgggctctcctcgaaggaaagccaggagagtacagagctgaagggagctttgcttgggaaccgtttttcgacgccgcgtccgatttgggtatctatctgattgctcgtcccggtccttatatcaatgcagaggcatctgggggcggattcccgggatggctgcagagacttaatggcacaatccgttcatcggatcaaagttacttggatgctacggagaagtgagtttcaagccctttcgatcataggaatgtctgtactcatccacaatagctatgtatcgcacattggcggtctcattgccaagtaccagatcactaatggcggacctgtgattctctaccagcctgataacgagtatagcgggggctgctgtgggcaggaatttcccaatccggattacttccagtatgtgatcgaccaggcccgcacgggcggggatcgtggtgcctacgatcagcaacgatgcttggcctggtgggcataatgctcctgggactgggaagggcgaggtagatatttacggccatgataactatccgtaagttgtgtattgaatgtttctttgagtgaagctaatgatggctaggctcggatttgattgtgtatggatattcaccagaaagaattcaatcgctaacggacataggcgaatcctgatgtgtggcccgaagcaacctgccgaccgactaccgcgacttacaccttgaaattagtccctcaacgccgtatgcgctcgttgaggtaagttctccttctccaaaacagatggctgaaggctaactagctcagtatcaagtcggggcattcgacccatggggaggacccgggttcgaacaatgcgccgctcttacgggctacgagtttgaaagagtattccacaagaacactttcagttttggtgtggggatcctgtcgctgtatatggtaggtcatcagcaacata

SEQ ID NO: 11841 - DNA, 650 bp, Emericella nidulans
  unsure (1)..(650): unsure at all n locations
cgaactgcctctacgacataagggcacttacagggcaccttcgaagggcacgcggcaggctacctgatgtgcagtaaagactttggtggctactgtatcccaagagtgaagtagcagcgcccaaacatgaccgggactgcatgcaactggttccctgactgaggacaacatgtaatgcatacagatttctttcacgcttgacgggacacgatgggactagtaaacgtataccatgaatatgccataattgctaataggaatagttcatcctacttggaacatagtagtaactgatgaccagattagagatgcggcatactaggtgactaacatgcattaatagcgcttaacacataaatggacgctccttgcttctatggaccgaagatcaaacaacggatgtctagactttaatatattaactcatcncctcttggcatcctactagcttctgtctactactgatctgacctacatacgacatgatgcgacccatgtacactatattcctattatcgctaagaatcaggactcattgctggccaactcgagatgcattcaagcggatctgtttcttggccttactggaaccttcgtctgctcctaagcttgctggcggaatgcatctacacacttatatcgccatcacg

SEQ ID NO: 11842 - DNA, 1930 bp, Emericella nidulans
aggccatgtatagatggtacggtcgggctcgcggggatagctgtcgggaatggagccgtgccagccgtcgacggtggaaggctcgtggtgaggcatgttggtgtagataaataagtgatgaataagaaggaagttgatgatggaagcgacgaagtatgtaaattggtataattggtatcttgtgatggaggaccgtgggcgggctgatgtcatggcggggacagtcctgccctggctgcggggcaggtggggtgtaggtatactcagagtagtatagatcgcatgcctttcgccatagcatacccacctacgacttcctgttcctgaaccaattcgacagctatacgaaggtgtgctctatgattcttggcttaagacttgaagccggtggctggctagctcagcctgctcctgcgcatattccgtacagtatactatatgtcaagtctaagccaactactaattactaggatacagaagagatattcagtatacattcaatagccatggatcgccgacagggctcagacttgtctagacattttgcactgagatacctgggcccatatgcatgacgtcgaagagaagggtagcgcatttatgtcgatatttcgctggcacccgatcttgaacccatcctcgaaagaggacgcaggtatcctagacgtccacatgcagagaaataagacttgtggaagagatgaaaagctgaatgcgcaacaagcacagattcgaccgcgagctcggccccaatagggtgtggatggcaagcataaaagaaacgccgcatcccactgttacccttgatcaggaagccggcctcccttgcagttaggaatatttgagctatgaacaggtcctgcggcagatcatgggtggaaggagttgattgaataaatgtgagtagatgccttgtcagagactgagagaagcggaagatataggttcgaattccctggtggagggaggtttctgctgcaattcgagcacagagacccgagtctttattgcgagcggttgggcgcgcagtccgctctttgtgctcaatcagctgacgaagtaggtggatgttgatttattggggtataaatggcagctttatagaggagtcactagagtgaacttaatgcccccataggctctaatatatgtatgtcgcaagatggtaaatacatgaatctagggtatatatacatatcataatatcaggctgtacaaatgcacattatgcagttcaaccgtgtcggcgtacgtccagaacggcgtgattcgagtgttcgcatactgaacactggaaatcaacctatcggtatctgcgtatttgattatataatcgtggataaaaagaaagttattactgtattttaacggtgcagtcaaaagagtgtcgccaagcggcgtgaccacctatgacgggtcgagcgcctatgtgttgcggcgagttacggcggtctcgaaagcgcagaagatattgaaaccggtcgtcgccgatccgacagactgaaactgtcggtagacgtgcgccacgggtactgtatccggtcacggtcattccgttgaggtggtgcagcatgggtaacatctccaacgatatactccggattaacgaatgtcgggaacgagtcctgctcagtggagctcgtgtcttgccgcgtaggctggacgatttcaaccagcttacgcaggactccgcactcaagtttgagctttatgctgtatacggccgccttgagtgtcgtttgaaggtaccacatcccccggtattccaggacaagaagggtgacatccatggcgatgatgatcaagttgattgcgaggagctcgtacagaacgcgcgtacggcgggcgttcttctcaggccgcagccgaagagcttcgccgtttccagatgtagattgacgagatgaaaatctcctgtgcgcagaaccag

SEQ ID NO: 11843 - DNA, 871 bp, Emericella nidulans
agtgcggtagctgaatgtatatcttttctatagccaattgatctctagcaatctcccagacgttgcagtatctcggccggagaaagaccggctctccatcaagggcgcaaatggtcaagaaaggttgtcctcaataaattagtgggtcaagggattgctctcgatttgctgccgtagtaggaatctagaggcccctcgtcccatcgaactcatagcccacatatcccacactctcaacatgttagtattggtgtatcatgccttcagagactagctggacagtaactctgctcattcttattccactgttggaccaacaagacccggcttcccatatttccggtcctcccccgcccccgagcctctagcacgtggaccacctctgcgtcgctcggccacccccggaaccctaattccccgcagtaatgctggcaagccccaaatactcaaaacccaggaagtcaattttgaggatcgggatgcggacaaacgcaaatttgaccaggggaatatattgggagttagtactttcgcaagtcggcatggggggggcttcatgtggcccttccgccccctaaactaaccccactcgaattaatactccggaaacaaccggagctaaatgggctatgcgggactctattgctttttgggcctcaaaattatgaacccctcccttcggcaccggtagaatcacttcccccaacgttttccccccaacactgcgtttttggggaaccttcctaccgggggcaacaacttcttttgaaaattgggcagggtgcacccgggggtaaaaaattggggaccctcccgaggggtttcccccaaaaccgggtcttttttttttgggggggaaaaaataccaatt

SEQ ID NO: 11844 - DNA, 444 bp, Emericella nidulans
cagcccaggaccaaggacctcccccccagcgctcagaccccgaacggccccccaagcaaggagagcatttgaaaagcccagcgcgacgcacccccccgaccaacccaaactacaaggcgacagcccaacccagcaagcagatcgatggagccaccggcacacccccacaggaaaaccactgatacgcacagacaccgaccaggacgaggacgacaccgaaacaaacggcacaacgagacaagcacacgacggagaaacccaacacggcagagcagaccaaacacgccgcgacaacataccaacagcccgggaacaacgcacccgacaggacggggagccagaacaccacaacacccaagggcccgcgcacagcaagaacgccatgccgcggccgcccaaggaccccccgggaccctgagcccagagggccggccccccaggccc

SEQ ID NO: 11845 - DNA, 889 bp, Emericella nidulans
tggaattgcgggttggccattcctgactgaccgttgggttgatttgagtacgagttcgttggtggaggcatgtattgcggggtgacagaggacggaggagcctgtgcaggttgagcgggaggaggtggtggtgacggtcgtctcttcttctccttctcaacagatgctcctggccgaagctgccatgaccatcctttgccatctcgttctgcatgcatgaagaggtggccgttgccattgaggttgtgccgtacactggacgtccagccctcggtttcacatttgaagcgaaaataagggtatttgagcttcagggccctatagatctgcttcagcgtcatgggtgtgctagcctctgtgagggcgtcaaaaatgagaaccgcatagttatacggcggcttcgccaagtcttcaggcgtgtacgcagattctggaggatagttgggagagggagaacgagacggcttgcgcttcttgacaggcggcggcttgacatattcttgcggctgatgctccatggggaattgccccccttctgttgaagggataggaatgtccatcattccgtccttcttcctcttcgtgtactttcgtttctcgggtttcgagttcggcgactcgccctctgcagggacaggaggcgcaagtcctccagtcgtagccgtagtctttcccgccttgggtttgctctgcggaggaggcgtaacgccgccattcgcctcgcgtctggcagccaatttctgttcccgtgccagctcggctctttctcgttttgacataatcccatcttttggcggccgaccaggaccgcgacgacgttgtggctgctgagcatctccctcgattgaagacactggtcgagcaggttcttcgacctttgtcttcagga

SEQ ID NO: 11846 - DNA, 111 bp, Emericella nidulans
gcattcgggaaggatatctcagtcatgatcgcggctgactctgttatcgtggacgctgcacggtgcatgggtgaactaggagggcagttggctgactatgaaggagggttc

SEQ ID NO: 11847 - DNA, 244 bp, Emericella nidulans
tagcatagatgtgaacattatgctcctacactgacaggaaccaactgggcatgatccgcagtagtatatagcgcatgtcattactagcgcggacacaacgcgttggtagcacagtagataagctcaggaaaagaccgacacttgggatgtcagaatcactacaacatagcttcagtatgtcattacaatacagcatgcttagttcactacaatagatattgtataatccccctatataattgcg

SEQ ID NO: 11848 - DNA, 121 bp, Emericella nidulans
tcgtgatcttccagctatgaaaatagttatttcgaggtacacatagatatgaaggcatggagttcgcagactccagagcaggagagggatccaacccgagatcggcaaccagatattgatg

SEQ ID NO: 11849 - DNA, 179 bp, Emericella nidulans
gtggcgtgcggcgaggagtgcgacagcgagtggagtgcgtgcggcgtggtgcggagtgcgtgggaggtggggtggtgcgggagtgggaaggagaggatgcggtgctgtggtggcgtggtgtggcgggggacgtggtgttgaggtgaaggagggtagaggagcgtgtggggtggtgtggg

SEQ ID NO: 11850 - DNA, 206 bp, Emericella nidulans
cgatccaggaatctggcggcatacccttcgctcaccgcttgtctcctctaagatcacggatatcgggcacgtcgaacaataacggcaaatacaaacgaagtccagctgaacccgtgtcgcggagaatgctcatacacagcgagagacagcacttagtcgtacagcaagacaagatgcgcgacgcatacagagactggaagcagatt

SEQ ID NO: 11851 - DNA, 100 bp, Emericella nidulans
acatagcctcggcaaagaaccaggctagcgtccatatgcaaagagcaattacaacccacgagccgatctcgacggcatcagcgtcatgcactcggtctgt

SEQ ID NO: 11852 - DNA, 424 bp, Emericella nidulans
tgtacagaggtgaccacaatgcccaaggcctaggaccgacgtaggagttgcaacgcccctgggaacgccgcggcccagggaacgagggcaccacgggagaagacgttacgccttaagcagggaggaaggatcgcgaggcggccagacgcccatccgccgcccggagggaccagagaaggacacaagcgccgcaatgcgcagacacgacgatggcccgaaattcaatgttccagcggagggcgaatcgggcaacgacaagtcacagggaccaccggacggcctccgggccgggatagcgcgctggaaagtcccatgcaaccagcagcccaggcagaaaccccagggcgcatacccaggcctcacaatcagggcgacagccaggatagcgaagacaccaccaggtaccaccgagtaccgacccggc

SEQ ID NO: 11853 - DNA, 614 bp, Emericella nidulans
gacacttacggatccacgatgaaaacccttgacgcctccgtcaggttcaaggctacgccgcctgccttgagcgatacgaggaacacctcgacattaacattattcatgaaataatcgatcgacttctggcgctgtgcaggtgacatggttccatcaagcatgactgtattaaagccagctctacgcaggcgccattccacgagttgcaacatcgaggtgaactgtgaaaaaacgatggacttgagcgtctgcttcttgctgcgtagtttgtagagctcgtagacaagcatttctattttggtcgacgaagtccaatcctccattcgtatcctgttgacgatggagttctttttgatataatcttcatgttgttcaagatccggctggtcgaggtcaatcgagaggggtatatggcatcgcgggcagtcaactacggcacctgcatcaaatgaccggatataatctttgacacagcgccgacaaaagtcatgacggcaccgtgatcggatcgcttcctccgccggttcatcacagatgcagcaaacgagaacgttttgcccgccctcggcatgcttcttaagaatagatcgggatggtcgcaacttgccgatttg

SEQ ID NO: 11854 - DNA, 260 bp, Emericella nidulans
cctgagtctgaaccatacatttcgaagttgccggatgttggccggcaattgatcagaagtccatgagtcaacgatttttgaacctgattggtaccaagattgtccaggcctggatgttcagattttggacgggcccattcgggggtgaaacctggacttgaaggcctaattctggggttaacgggatccatttccggtctcctgaacttaaaaccattcgaacaagatttcccttggcagaaaggaggggttgtattgta

SEQ ID NO: 11855 - DNA, 154 bp, Emericella nidulans
tatcaggtatattacagcatgcagatattttggcaagcagacagatgagtaggagcggatacgtcgtcaatagtcttcgctgtgggataattttcggtaaccttgtcggggacctaaggttcatttactgcagatgggcgcagaagctgtacag

SEQ ID NO: 11856 - DNA, 692 bp, Emericella nidulans
aagcagagtttttaagtgaccatctgcgtgggcgtgccgcgctggaacatgatttttgggcacaataaccctatcaggatgcggtacaagttccccatggaacgaaaggttttccgtatagataaatttattgcaggcagcgacgaagggcttgggtgtcttctgctccccaaagccggacacagttagaccagattcgcgaatactagcagccagccgagtgaagtcactgtcgctagagacgaggcagaaaccgccgaaacggttccaatatagaaggtccatcgcgtcgatgatcatagcggagtcggtcgaatttttgccgttggtgtatgcgaactgctggaatggctggatagactgactaaggagttcttttttccagccctttagagaagtgctagtccagtcaccataagcccgtttcacataaactgtcccatattttgcgacttccgcaaagttgaaccttgccgtcgacagtatggcattgttcgcatcaaccaggaccaccagggttggtgggggattgctggccattacccgggtccatgtttacttttccccctttagtggtaaatgattttgcttagaggaaaattgtttgcttctttcgaccggaggtagaagttattaccactcccggtcctaaattgtttccatcagcctgatatccttgagggaggatttat

SEQ ID NO: 11857 - DNA, 1260 bp, Emericella nidulans
  unsure (1)..(1260): unsure at all n locations
gtggagaaagctcagccaacatggccacgttcagggaatggaagataccatagtaggactccctcggcaatcatcgtcacaatctacttcacctattcggtcttaatatcgtgcagatgggtcaggggaagcttgctcagagatccagattcgtgcaagaataagattcccatgatattgggcgggcagtctagcttaaagtggtatctggagatattgtgttggtagcagctctgtgaagccagacaatctggctcgttctgcatcatgctcctttggctgaatatacctcttcctctacctgccctccaggctgcccatcgaaaacatcccagcgcgcgttggacaattcctggatttcgctagccgaggtatcatcagtgacaaaggcatggagcttccgatcggggataagccagtgaaggaatgcatgaaccgcggcactgaccaagaatccgtacagatagttgatgtagtacagctcggtcgcggcatcagaaacggtgatggacgtgttaacggcgctacgaagcctggcatggtgggaactacgccaataatccactgtataccaaaccagtcagtgttcaagtgaggatcaagcgtttagacggatggaggcttacagcaactggagggcgccagttaaccccagctgtataccagtagatactagctttatcaccacggaaatagatcatcaatgttaaccttttggcgacagactactagataatgcgccgccatgagacccgtcataggagccaagaagacgccataccccgaaagaacagtcaggaaggtcgttgccgtgttgacgagacgccagggattaaccacggggctgaggagcgcaaagatataggcgccccgacggatattgatgtaacctggaaatacagaggcaaggtccaggccgcctgggagcgcatttccgggcagattcgtgcccagttgcgaaacagatagggccagacccgcgaagaagacagccgcccgcgtccccggagagggatctttctgcaatatagaggcgaacagggtcggcggattccagattgcctcgccgcctaggcggttctgcgtcgcagcagtcaccaaaatccctattagagagccaatgatgctgtagaaggggaagggcagggcctggccccaattgcgtcgcggggacgggtcgctagccgcgagtagttcgtttgatttangattttcgccgcgatagacccgatggtggacatcatcccgatagcatgagcc

SEQ ID NO: 11858 - DNA, 139 bp, Emericella nidulans
  unsure (1)..(139): unsure at all n locations
acatgaatcatctaacctgctgttcgatgtcagaagctaactctcataatggcgatgcagnactgggcgtaggtattggggcgggatcgatggagtgaccaaagagccgacgctatcataaaaactgcatcaaggggca

SEQ ID NO: 11859 - DNA, 173 bp, Emericella nidulans
ctcgcgcgcacgcactccccacgcgcactctcgctctcgctctcactcacacgcacgctctcgctctcgcgctcgccacgcgcgcgctcacgcacgcactcacgcgcgcacacgcgcacacgctcacacactcacgcacacacgccagcctctcgcagctccgctcgcgctct

SEQ ID NO: 11860 - DNA, 123 bp, Emericella nidulans
caccacctctctctcctcgcacacgccacacgccaccaccgcctccgcaccctctcgtctctcacgccacctccgcgcacggtcgtctccgcttcctctcaaccacgccctctccacacctcc

SEQ ID NO: 11861 - DNA, 2764 bp, Emericella nidulans
taaagaagggtgaatgccgtcacattggactgggtctgaaagggaagctgtacttgaaggtgcggtctacgtccacctcgtagagagagcttgaaagctgtgggaatacacttgacgagaaagcatcttgtagctgcgactttccaaaatgcagttgcatcggtcttgccctgttgccgctgcaggaatcgaatatattcagcaaaaagaggacgagaaactaccgactcatccttgtatctcttctcgacctcgtccagcatcagtgcgaaactccaaccatcatagatggagtggtgagctgtccagacaaagtatccgtctaatgtcaggccataccggcttagcgctgttccgtagcccataggcctttctctatcctgcgccaggtattcttcaagtgtcgacgcttgtgaccactcaatggactgtctcaaggtaacctggcaggtaccctgggtctcagtggagataatcacggtacggagaatggcatttgcctcaacaacctttgcccaggcgtcgcggaaacggtccaggtcaatattgggcggtagcaagaaaggtgcttggaggacatacgcactggaatgactgctagtcaacgcaaggagcccttcctgcagggaggtggaagggtagacatcctcaactagatcaatctgcacatgtggaatatgcttttggacaatcgagcgtgcactttcctcgccacctaccaggctgaaaggtgcatcgtacttgtgcgccacggcagacgcaccgtaagctgcaaccacaattcttgccatgtcatcaagcttggggtaattgaagatatccgcaactgagagggacaagccctgcgcacgggcagcggcagccagcttcatggcttcaatcgaatctccgcctacccggaagaagttgtcattggaaccgatgtcagacaccccgaaaagatccttccagagacctgcaattgtttcttccattggtgtctcgagagccttcctgctgccgctcgcgagggagtactgctgaagctctgtcttggataggccgttgcagagctgcttcagcactttccggtctgtcttgccagatgcagacttgggcatagtgaccaatggaaaccacaaatgggggaccatatacggtggcaggcgctgggcgaggattgcctcgatctcgaacatcgtctctcgaagcttgccgttcatggcgcgaaggaagctgttcttgttctggaattcctcgctaccctcaacggcctcgaattcgaggaatgcagacaaaatttggcgtccgttggcatgttctggcttgagtgcatcaaccgccacttgcaggacctggggatactctgttttgatacagtgctcgacctctcccagttcaatgcgctgtcccgtcaccttgacctgggtatccttgcgtcccacgattgttaacgtgccgtcggaattgtatcgacccagatcacctgttttatacaaagtctgctcacccggataaccataatcggccacccagcttggcgctgatatataacttgctgcggttctggtagggtcgttcaagtagcctcgaccaacggtatgcccatggactacgatttcaccaatagccccaaccggcacgagtctatcatggttatctgcctcaacaatccacaagacggctccgacagggtatccaataacatccggcttgaacccgctggagctgagcggattataacagcagtacacgcagcattcggccggtccataccccccaatcagatcgacgtggtccttccacgtattgatactatcctgtggaatcggttcaccaccaagcatcagagtcgtcagggacggaacatccgcgggcccaaacaagcgagcaagtgtgggcgtcatgaacatattgttaaccttcatctcgcgcatggattgcaccatactgctcattcggtcttcctcagacgggatacagacgcacccaccgtgatataatgtggtaaatgcttcgagaatgatggcgtcgaaggtatacgaggagaattggaaaatgcgggagtgcggcccgtagttcatcacttttccgtggtgctcgatggaggagcaggctgctctgtggtgcacaacggctccctttggttttcccgtgctgccggaagtaaactgaacatacatgatgtccccaggggttacggctgttgatggagggatatcgtcctcatcggcgtgaggaagctcatccagtatcttgggtgagacgacaaccaacgatgaaataaggtccttgcaacgatcctgggtttgtggtgaaacaatcaggaacttcgccttgctgtcctcgagaaggcccttgagacgatcatccggatgtttggggtccagaagcacgaatcctcctccagccttcaggactgccacaagagcaatgattgtatagagtgatttctcaaaacacaatgggatacagtcatcgggcgaaactccctgctttatcaagtgtcgcgcaagacgagacgatgccctgtcaaggtctcgatatgtgtatgcagcctcccatgactcgagagccagagcgtgaggacgtttcctggcattctgatggatgacttcgtgcatgcagcggtctaccgcaaacggcagctccttattccaatctcgtagagatgctctatcgagagggctgagcatgtttacatcggctaggaccgtctcagggttcgaaagaagctccatgatgacagtactgtaggtattagcgagatggactgcttgcccgc

SEQ ID NO: 11862 - DNA, 144 bp, Emericella nidulans
cagcagcgccgacaccaggtcaaaattcatatcccggaagggtggctgcggtagctccgcccctggaagctgctgtggaagagccagaggcagccgtcagtggagcagccgaagtagcagatttatcgcagccttgaacagcgg

SEQ ID NO: 11863 - DNA, 100 bp, Emericella nidulans
tccctgtagtgtactccgtttcatggcctcgacgggtttgaatcatgtgtagatgcgagcgtcatgagcgcattgttggacacgggggagacggtttgat

SEQ ID NO: 11864 - DNA, 1012 bp, Emericella nidulans
  unsure (1)..(1012): unsure at all n locations
accgagccgcactggcgggacaacagtggtcgggggcggacggggtacgccgcatggaggcgtaccgcccaggtgcactgcggtataccatatgtactactcgacctggacctgcagataggcagcctaaccattgtggcctatggaccatgagtcctgtagactagtgatactacgagcgaaaaaaaatactcagactagcaggcaactatgcattattatgcaaaagccattcgattagaccgcgagtgtaacggagttgcacacgctcaacgaagagacacccagagatgctcacacaatgtcataaccgagtgtaccgatcgtataactcgcaataagacttagatggctggtgactcactgggttctgagacgcgcagacacccagagcaactagcgggatgctacttacatcactgagcggcaccggatctgagagactctgcaatgccagaccgctgatggcacaacgccacacgttcatcacccattgacgactcctgaggtttacagtgactactcgattgatgacgagccgctcaataatatactgtttactacgcagtatgaagcccagagactaggcaagctcaagcaacaccagcgtagctatagcgtggttgagggacgggcttgatacgatattaggctgagacttaacttgcccagggacgatacacccaagactctagagactgtaattgggagcacattcatgccggtcgactatacctaaatgttgtgtaaccttattccacgaaggtccaattcccaatttggagaaggaggtatgcactttttcccaaaggaaaaccgcatttgtaacccccttgccggaaatggtaaaaaaactttgcaactaaagcgtaaagggtttttcgccgggggtttcaattgaactttgttaggccccgggtaaaaaaaaggtttcctccnnncccaaacaattgactggtaatttggcgccccccgcggaaaaaaaaaaattttttttcttttttcccccccc

SEQ ID NO: 11865 - DNA, 572 bp, Emericella nidulans
ctttgcgtggaggggtagctgcgggcgcagggggtggtggagcgacttgaatagtaggcgcaggggggagctccgcgggcgttatgtgtgttggcgcactcgaccgtcccagcaggctgccgaatatcgaacgacctacgccgtgggattttccgttcgctacgggtgtaggaccttgtcctcgtgtcgatgcaaaaggggtctggcgggtctctttgcttgcattcttctcccgctccgacattttcttaatgaacgtcttcgcctctttctcatccgcgaaggatagacccgcggggcaatcgtcaagctcgaaagtgtggaagaacgtccggtcttgattgtactggaagttctcgtatatctcctggtcccaaatgacaccccttccagcaggctaaaaaagagacacgagacgtcaaaatgtgatcctcgaaaccatcatttatcacttaccgatacatccaccaacttcaaccaataggtgcgcccgaccaagtcatttgccaggacgacggcgccttgcaatcctgtgtaagtccatttgtgcggaatctggtatgccacaaaca

SEQ ID NO: 11866 - DNA, 2749 bp, Emericella nidulans
ggttcccagtccacaggggcaaaattgacagcttcgttgaagttgaaaccatgattgaatccagcatggtaagcctgagggaatgtaatgacaaattgaccggccctttggtcaagcgcatagacattgactccggctttccgcaactggtccggtggcatcaaagtgacgagctggaataacaggtctggttgaccttcgaaaagttcagggaccgcttgtcgcattgcttcctcgaatgcttcagcgtcagctcctggaatcccataccaagtcttggtagctccgaaatgttgataatttgcagagtaagcgtaatgatcctcgttatgccagcaaaaggttgagaagcacatgccgacgtagacccaggggactgtcatgcctgagatatcggatttgatatgacggaacagagactccccgtgaaacggaagattattcagattccagggatcttttgaatatggatcgagcggatttctctcgaccgtcgggaagccactgccatgggtagtcgaatgaatgtccgcaccgtattcaacttcaaccgtctccgtcaagctttcaaccagtctccagaactctcgttcaacgtcgtcttcagactctcgccgacgagtattaagaacggggtcaaaaggcattttggaggcgaaataattctttttgaaattgttggccttttcttggaattgcttcaaggagtaaacaccaccttcctcaaatccaaattctcccgtgccaactaaacacttggggcaatgccaatcgaactcgggaatatgatgcaaaggagggtctaagcaatatctgtggaagccttggtcgcagctgtcgcataccaagatcgaggaccggtcttcagatttgccacaagtctcacatttctgtaactagtcagcgatttgcccgcctagcatgagcttttgctagaacatacatcaccaaattttctggcgtcacttttccttgagcgtgaaggggcgggtcgaaggagagtcatctgtgagcctgcaactgtcggcaaaggggtatctgcaagcatttgttagatagagatctcggtataattataattgtagcataccctttttgagcctcttgcttcttcgtccgttggcatccagttctcccgtatccgcttgagacccactttcggtactaatagcacgctttactgaaccatgaccattggaaactggcgttgagtctttctggtactcagaaacgcttttcggcgtagcgatttcatggtcaggatcccgtttcattgctggcgcgctattcaccgcgatgaacgagggtgatttgtttacagcagtaaatccgccagcatttacaggcgtaaacccagacgcaattggtcgaggtggtgtaggatctaccagaggtgtggaattcttggcgggagtcgctgccgcgtcatgaggggcgctttgcgaggctgcggaagggccatggggtgtcgcagagcgtgtctcagcctctagaggggtgggattcttgggcataggcgaatggttgggcgacggggtatagggaccaccatgctccatttcaagctgctgttgtacaccaggtttcgccacgcggaggtactcctcgtaaggctggagccacctttgataagagttcttaagtgaggtcgagagagaggacatgattttgccgctgtatcctaggtcgcgaccaatttctgcccactttttcatcttgcacacctgctcgaaaccgccgcgaacctcgacagcttttttcaatcgaaacaggtccaggggccgcttatcgacgcttgggaaacgattaagattggtgccgtgctgtttgtgaaacttggcaagttggtcgagatagttcaagtttgcacgggttcctgggtctgggttagaactgagctgcggagtaccaccggcagcaagcaacgctgaacgcgggggcatacctccttcgaccgaattaagctcctgtcgacgggttttgaaatggaatttctggaaacggttcatgttagcccagaatggaagtaaaaactattgcaagggatgaagttcccggcagcaataacgtagagaaatggcaggcttgcgacggccatacctcggtatcaatagcaaatgttggctgccaattctctggaggaattatcctgcagataccatatttcttcccttccggcgcaatcttgcgaatgtatgcctcggggtctctgaattcctcctcggttggacggaaagtaggtgcctcttgcaggccgtgaggacggactcgactcgtcggctcgcgcggagcagtgggctggcctcgtctttcgacagtcgataaatcgaggggtgcggagcgccgagtgctcaagggcacattgtgagaatgagatggatgggtgctcgaagaacgggcgggctgacgactcgctggcggttgcgtgcctatcgaagggccccccattgcagccggagccaccatgtcttgggtgcgatagctggacaattaggatcgaacggggtgcgcgcgggcgtttatcgcggacggaaggaagccagcgtcctatgcgaaaaacccatggggagactggcgagcaatgagacgaatgactccagtcgcgcgacgaaattgggaaaacgaagtgtctgagcgagagctgcagatggataaggaagtgctgggggggaggtaggaggggaggagtggaggagggaagataacagtgaaggaataatgataaaagtgaaggcgatgcctgtggaga

SEQ ID NO: 11867 - DNA, 105 bp, Emericella nidulans
ccctgtttgggtgccgctttgggcgcgcctgtcgttctgtgctctttttctctttgcggccgcttcttcgctggtggttgggtttccctctgctggccccgcttg

SEQ ID NO: 11868 - DNA, 970 bp, Emericella nidulans
ctcgcataggtcgaggctgaatacaatgcgaacggcacgggctatctctcgcagacacaaacctcaagttgggtgaccgagcggccctctgatacttttcttgacagtatcaacgccaccttccacaagaagcttccaaaggatcgccctatcctattctaccaatacacgacatcggccatggctcctaatccgcagaataagaatgttatatccggttacgttagtctcatccagcctgagggtcacgggtacattcgactagcgagcgccgaccatcgtgatgctccgctaatctttgcaaattactggaataccgacgcagatctggccttggagttgtatggatacaagcagctccgccgcgcaatggcctcagacatcctctcaccaatcgtgcagggtgagctgtttccagggccggaggtccagagcgatgaggatctgactcaagcaatgtttgccagtgcatggccattccaccaccccagtggaacgtgctctctggggaaagtcattgactcccacttccagattcccggccttatcggcttgcgcgtggtggattcgagtgttttgccctctcaaccgacctctcatatgtcagggccggtctatgcgattgctgagctggcgtctcaaatcattcgggcggactggcattgatctgtttcacggtgttcttctccgttatcacttgaagccaatattgagtccggattgaacttccgatagctttgcatggttagtttaggcagtaccagaatgtattgtgtccgccacgtaaaactgtattccatgcagatgactcttagccaaaattctggcccgtaggacagattcatgaggcattcgcttcttcgaatttacctctcaagcttcactgacactagttacagtcactagcttgttaatatggctctctcgcctcctctcggaggagaacccctctctctgaaggcaagacgcc

SEQ ID NO: 11869 - DNA, 2212 bp, Emericella nidulans
attcctgggcacagcagaagactgacctggattttcatttgatattcaacgactggcgcgacagatctacgatcctttctacgtcgagatcgcaaccacccctccgtcataatttggagtattgggaacgaagtcgcagagcaatcggccgacgatacagccgcagccattgcgacctacctccgggatattgtaagagaagaagacaacacccgaccagtcacggcgtcgatgaacagtgcatggcccaattcgtccttcgcgggtgtggttgatctcatcagccttaattaccaaggcgaaggtttacgatacggcccggcctattcacacctagagggaaacagaagggacccgcagtacagtgagttccatgtaacgcatcccgacaaactcatcctggggagcgaggtcgcctggtcgctcagcacccgtggaacgttcctattccccgttacaaactacaccagtgcgcctgttaatgacacctccggtggaaactcgaccacgctcgagatttccgcatatgaactctactcatccgaccccggctcatcacccgaccgcgtcttcgccactcaggacgagcaccccttcgtcgatggcgggtttgtctgggccggatgggactacctgggtgagccgtatccatactatgacggcgcaagaagcgcatactcagggataattgaccttgcggggttcaagaaggagcgcttctacctgtaccaggcacggtggcagccggatgtccgtatggcgcatattgtgccgcattggagctggccggaaagagttggacaggttacgccggttcatgtctttacctctggtgacgaggcagagctctttgtcaatggggtgtcgcaggggaggctcaagagagaccccctgacatatcgatttagatgggacgaggtcgtctatgaacctggcgaggtgcaagtcgtcgcctataagaacggcagcaagtgggcaacagataccgtaaagacagccggcgaaccaacacaactccgtctcactcctgaccgagcccagatagctgctgacggcgaggacctctccttcgtgacgctggaagttctcgacggcaagggcaatgtcgtacctgaagcgaagaacctaatccactttgaagtctctggcccaggagagatagtcgctacagataatggctttcctgctgactacacggctttcccgtcccacgaacggacggcctttcacgggttggctttgtgtatcgtgaaaggggagcttggtacacatggggatattgtgcttaaggcatcaagtaatggggtcggagaggcggaggtggtaatcaaggcttcgcgagggtaggtagggcttaggaagcatcagtaaccacaggtttctctatgtactatgctgtactatgctatagtatgccatgaaacgctaatatatatccttgcgccagcaaaatagcatctgccaaaaatgcccaaggcgaggcatataatttgtatcaggctaccggcatctcacgccgctggtcgcccctcacctgtctgtcacttctcccttcacatcgccgaaagagccagcccccaataaagcccaaaaccggcaccccggtactccccaccactagtgccaaaacccacgccatagtcccccatcccgcactctcccgaataaatcctgccagaaacggacccgcgagactgccgccggcccacgcggaattcgacaacccgtaggccagcgccatcgcgcctcccttcccccaaaccccgggattagcatcttctttctcctgcacgacgtaggagacttccactaggatgattgagaacatagcggctatacagactccaactagagccaaaagtgcgcatagaaggatgatatcatggatgctgtccgtcatcacgaaacgcagacagacaagaaccgggacagttgcgaagaatgccccccctgcgaggtatcggcgggacgaggggtagttgtcgttgatataaccaaatatagggtcgaggatgtgtgggactgtgagggggatgaagactaggccttgggcggtttgtttccagtggaatgtttcctcgacgaagagcgggagaacgctgtcaaaagaagtgagaagtaaagagaggatgaagtaggccagagggcgacgagaatgcgcgatgactcgaggagggtgagcagggctgcctttcgctgctttctctttggt

SEQ ID NO: 11870 - DNA, 1836 bp, Emericella nidulans
gccaaccagatggccattgagccaaaccatgggataagacatagcaccgtcgatctccaacaagaccactttatcactgtcttcttgtgtaaagttcagttgcgccgataccaccccaccccctgcactggaagtcgacccatagctgaaggtatctcggggtcgtcgtctgtataaaatggtctagtgatagcccagtcatgaggcagacgcacgacatcccaactactgtcgtcaaaatcattatgcacatatggaatgtcgccatccggttcggtagatgggcgttcatgttgtgcattggcgttcttgatatagtcgttgccaacgggcaggacccaggactttaatacttgaaaactggaatcgttcgcgtcgggacgaaggtcgtagacaatattgtctgggatctgctcggagtgccagaatttccattggtgattgagacttgctcgttcacgcacgctttgcgagggagctttgttggtgttgcgcactgatagcgcaacggcagatgaggccgcaagggcaaggccccatcctagatatgcgcaagactggagtttcatgaggacaggctttgtccataggcctaggaggttgggacctcagcgagatacgaacggtccctttttaagggtcttagaaagcacagtattctgttgatcccgacggcgcgggatgtatctgccaattgtgctcggccagagccgctggtcccaggattattcttccgccaatggtacctaatatcctccattttattgactccaattctgctgcaaaaataaagcctgacgatcgtcaatatccgcttgcatggcaattttgcatggcgattgttatttagccgaaaccccgccctatacaagcctctgtcgggacgttatttcccggcagcaatgcacgtaatacggggtacgtggcttagaaacggccgtgtatcctgtagacattgaaaggtctaccttgttgtccatcgaattccgtcaatgttccgattccagatgatgccatgaggactgacgctatgagcctggaatgcctctttcaccggccatttcaaccccctgggtgaactcttcggccaaagatcgtatgacattccctgaaaacaccacaatttgcatctcgagtcggtcacataaggcttccaagagcagttcactgaatggaatcagtcagtcaatgttctgttgttgcgatcaatgcgtacacccgctggagagaagagaaaccatctcgtcaggtggtaagggaaaaggaaaatagacgctgcggtttgcagtacggtcctgagtcttcgtgccaaaagaagatgcttgtcgctactcgtcactactcgtcgctacgctgagccttcgagtacttaggtgatgcttagtggtgacttggactctctccgacgccgagcatccgccgagcaccacatcccgccccgccgccacttgtgttactcgttctccccgcacagccccacgaactattccacctgtgcagacgctgtagtcgcaggtccaacacgcaacatcacagcccagtattatcatggcactgactatgtggggtgtcctcgcttgggtatcgaggggctgccttcgaagctggttaattgattgatcctcaattcaaccatccccgatttcagaagtaaaatggcatctccgcaagtccagcacgacggcctgaatgcgacgttcactggaattgagacgcagtgtgacggtacggcagttcatcatttccgcggtatcaagtatgccttcatcctttggctgtttgtgcgtgcacatctggttactgcgttttacggactgtactgttaatgtttttggt

SEQ ID NO: 11871 - DNA, 2627 bp, Emericella nidulans
attaaacttgttgactatcctgatcatctcgctacccggctcgtctgttgtgttctggacgagtgctcaatacttttatgacctgtcccaccacttggatgcttttaaactagacgcagagaaatcaatgccacgcccaatcagaaataaggaccgctggtggtcgatctggtggtcgatccgagtgtgcccagtctgcagtctgcagtctgcagccttcagctcatcgagggacgattattgacacgcgtttgaccactatggcctggctgctgctgattgctccgactttggtgtgtcagagttgattcatcatctttagccttctcttctagacaacaaatgatcgccagcgtagcgggtgttgtcgaacgtaatccagctgcgttgcacccatggaacgacggcatcgttagccgtctgaataagaacttagcttccaccagcggcctgtctaatattagcaccctcggattgcctaaacagtcatatataaaacctcagatatgatgagcgataccttgtgccaacgaatgatcgacacatgctgtcaagaagggtagtctgtttcaaaagctgcatttatgtcgcaccatctcgcctgaaacagtataagcacccgaagcccgctcgtctggatgattgcgaatgggcagatggtatcgaggctgtagactgtaggccgtgggttgtagcacccggcatctgcgcttcgcaatcacgttcaccccccagcatttcagccgcagcctcaagttgtactggacggggaaccgagactccgcctgccttcagccctccttagtaccggccagtgctcgaatagcaactgatccaagcctggacataggcacgtattggacaaacgcatgcagtgattcgtaagtgcgcggggtccttccgcgcgtgctttgagtctcagccttaccggtaccaagcgaccactttctgcttcgccttaattatcattgagtatgggtaatttcaatccgtaaacactctggattaaaatcagtttcgggttctaaaatcctcatgagacatcgattccaaatttggtgggctatgttagtatcaacatgcatttgccgcacctatacgcaccggggcaactgcagcattcggcggtatgccgaatacatagtcattattgatgcacgaaaagcgttgttgttgaattggcttagtccaatttacatgtcatgacgaaacactggcaccggcactacatgcaggcttgagaacccagagaacgagtcaactattcggcgcccgggacacggctgagacgcatgtttttgtttgtttattgcgtcgcataaactacggatccctacctagaagggacctagggtaagtagggctagcgggcgtgatgagagtgccttggagggcagatgcacgcacactaccccggccactctgtaaccgacccagggtaggacaaggcgtcttgcagatcggtcacgcctgccggagcgcaattggcaatgtgaatattacgcatgcgagtttctatgtatgcgttacggagacgacagggaatcgggtcgggtgaggctgagaacgcggaacgacgtaacttgcagctcgagtccagtcgagtctatcagtgcacgctgcaatttggtatgtgggaatggcagactgcccaaacagcaaacagtactcctggggcgaaagcgcaagcggcctgggatttaggcctcgtgcgtgctgtaacggtaattggattggctattattgattgtcccgaagggctgggcttgttgactgcctggcagggattcatgttctgcgcctggttgagctcggcttcgacgaggtgaataatgcacggtatgatgtgtgcgggcgtttgatggaatccgctagagactcgaggagctgagtaaaggtaggttgggtagttcttttctcggactagggctcggccatcagagagactcgactgaaggaacggatttgagttgaagataaaccgtatggattgccagtactaaagttaatgataactgcaccgaatagcattcgaacgggcgttgttctcgtttaaggaaggactgaaataggcgaatatctagcactcgcgcttgactttcaaaatatcaacagtattgacccaacgtattgagatattacggaagtgatctacctaggtactatgattcttcaattacagaacatagctgaagcatgttagcatgatgtcggttcgaatgacgcgtttacttacctccatgggtgctcctcgtcaccgtattggattccctcaatccagttcttcatttgagaagcaatctctccagcctcctcggtttccttcagcccgcagtttaccaatctgccacggtagctgatcgttcgcacggggctgacaattgctgccgtgccagctccaaatacttcaagcaaccttccctcatcggccgcctcggcgacttccgccatcctgatcttacgctcagaaacttgccagcccttcgggaccagtctttccctggcaagcgctagcacagagtctcttgtaacgccctcaaggatggttccatcaagattggcagtcacaagctccttcttgccggtctccttgttcttcagcgcgatgaaaaggttcattgtgccaa

SEQ ID NO: 11872 - DNA, 1227 bp, Emericella nidulans
gaaaatggttctcgcagaaggtcggctctggttcctcgcctggtggaggagcgaagagagcggtggatgctgtgggagtggacgagatatggcggatggtgacctttacatcggtcggaagcaccttggctaacaaatctcccagaacaacatcgaccttggacattgccgcctgagccctgaaggctttaataaattaggatgataggattgtgcgtttctagtgttttaggacttttctttcatgttactgggttgcctcccaccccattcaagcgttcctttgcacggatatcacgtgattcaacatgggatgtttccagccttactctgtgaatgtgcgcattatttccttgctcattgctgaaggctgggtacttcatatctatccccaatctgagtcgagggtctggtaggtgaaaacatatcagttgtctaaaaggccgggaaaacaacattatcctattatacgttacatggtagaatctctaaaagtattcagcagcagcagccagatcatcagcattgagcaatccgactccctcgtttataagcgtcgtccagaggatgttgcgagcccggatcggccacgaaggcgcaccccagtatctggccttgatgcccttctcctttgcgttagagatctgagatcgaagagtatcaagctgctcatcgctcaaaacgctatcaacacccagagtgagttcgccaatcgcagaagtgaagctggtagaagcaatgggtgaaatgagcgacgtgattccctcattcccgctttcatttagagcagcaaggggcccgtcgtagaagtagtcgcggtctgcaacaggtccaaccatgtcatagggagtgttgccagtaccaatcacggtgaccggtccctgaatgagagtttcgttgttcttgacggttgtcaagtagccctttcggcgcagaggctccagagccgcaatgacggcctcaaaggtctcagggccggatgtcttggaatcaacccataaatagagcgtttggtcggtagatgtgtcaaagacaccacttgaaatgttagatggcagtttacattggctttggttggtacgcacttatgtgttggggctgtcaagaatttgctcttggggttctgacgctcaagaacgtcaagaatcggattgatgtagagcgactcgaacgtgcgctcgtcagttaatgatgactcgtcatgaccaacctgttgaatcaatacat

SEQ ID NO: 11873 - DNA, 723 bp, Emericella nidulans
cgatttacagactacaatccatattatatccttttttgggggattagctcaatttcacataatcgcatccctttgtaaaggcatatgtggcacgtctatagcccacagtattaaggccatgatgacttgtcttaatccctattatcttactcattataaaggcgatctaattttatatatgtctatttatgtagtgtggttgttataattttccatctattttatattgtttatatttttatgttattcttatctttttttccattcttagtattttctatcttcttttattttatctatttattattttgattttatatttttgtttcttatactacaatgttttgttatatttatatgatttaaatattttactactttcatttttttatttagttttattgtttaatgttttttatatttgtattcgtatggcctttgatttgtttgatatatatttattgttgtgtcttatggacttattattatataattcttatgtgtatcgtttttttttagtttttattcatttatatttattcaatatttctttattttctatatatatttcttttttctcttttttatatatgtaactcatttttttattaaattgtgtatttttttctcttatttatttgtactttcatgtttagttgattatttatcttttttagtataatttattttgttttatttaatctcttttgtcttatttttata

SEQ ID NO: 11874 - DNA, 2881 bp, Emericella nidulans
cgcgtctgttttcgtctccgccgggcgaatatacagggacccagagaggtttggtataccaggtgcagatagcttgaaagcggctctaccttcatcttcttgcggggcggctccgacaatggacgtgtagaggtccgtatacgcgcggaacttccccctgggaactagaacctcaatgcggtctattcccgtggcgcccgacggatgctgcgttacggacggcaagtcaaacgtaacacgccgccggcgcggggtaagatcatggcagaagaagggtgcatctgtgcgtccccttgggaaaaattcgtctcgtggagttgattctccatgggtataccctgccttgacaatctcccagcggatgtctacaccttcggcattcttgcgtccccctccttggggtgggaggtaggtcactccgatcccgccgtcaccgggttcgcttgctagtgcatccacgatccgctccctgctcgcttcggcagagatggggtccaatgccgtcaaggcaaagtctccaggtagccgcttcctccagtcctccggctttgtaatccaattatacagctcaaggtatgtcccgtctttaaagacgataagcttgttgcggctccagccacctggtattgttaatgacggtcggtacgggttcgactggacagacctgtgtggactccgccgtctatcacggtaaagtgatctgaaatccattttggaacatagtcgaactgctcttgactgaattggagtagaaggtgatcaatgtagactttctgggatgacattttgatgagttgtgaaagtgaagttgacgcggggttgtgaggatatacccgtgccactcgtcattcagtccattctcgcgtcagtgtctacagctactactagcacaactccaatttcttttgtcccgagatcggtaggcccatgatgtctatacctattgcgcaagactctagcggcaaggccgtatagacgggcattcagtccgtgatgtgtttggttagccgtcttttcggacggtacctatattcctaggccacccttaaaccatcctaggtaccaggtaggcactggtctcgtcttctaacggcacgagtcatcaccaaccatgtccaatcccaaatccaagccccgtacaatcctaggcctaatgacaacgggcccctccgccaccacaggagcccgaatcacgtcgctggccgatttccagcagatcttattctctttccaagaacacggctacactgaactcgacaccgcacgcatatactccggaggccaacaagaatctttcacagcgcaagcaggctggaaagagcgcggtctgagcatcgcgacgaaatggtatcccctacaaccagggcaacacagaccagaagttattagggagaagctcgacgagtcattggcagagctgggaacagactgcgtggatatcttctatcttcatgcgccagatcgcgccgtgccgtttgcagagacgctggaagaagtgaacaagctctatcaggaaggaaaattcaaaaagctcgggctgagcaattatacaagttttgaggttgcagaaattgtcatgacttgtcaggcgaggggtctggttcgaccgaccgtttatcaggcgatgtataatgcactcagtatgacccctgctcctttagtactactttggggtagaggactaacgatctcacagttcgcaccatcgaagccgaactcatccctgcttgccgccgctacggactggacattgtagtctacaaccctatcgcggcaggcgttctagcaggagcatacaaatcgccgtctgttcctgaacaagggcggttcagcgcacagagccccacgggacatacgtatcgggaccggtacttcaaggacccgactttcgctgctctgcggatcatcgaagccgcggcgaacaggcacgggttgaccatggcagagtgtgcgttccggtggttgaggcatcactcggcgctgagacttgcggttgacggggatggggacgatggtgttgtgatcggggttagtagccctggagcaacttcgagaggaatcttgcggatcttgagaagggcccgttgccggtggatgtggtggaggcttttgacgaggcttgggggttgacgaagggtagcgtggtgaaatattggcatggagagctggagtatgcttatgatacgcaggaggctctctttgggaggtagggcagaaaaccgccatcgttctacaagcatacaatgactgcgcgcagggggtcagaaggggtaagaatgcggataatgacttgcaccgtagtcaccgcgccgtttccccatacctagagcgccttgagcggctgcgggcctagatctggggaagcaatgcaggagtatagtacaacgcattccagcagagctgctctagctgctcggggctgactcctgttggtaggttgatatgggaaagctttgaaagaccgttgacgggatgtggtacaacgtgaggctcaacctgatggggcccacacaaggcctcacctagtataggcgaagagctgatccttcattcattctccttcgactactgccagctttctaggctgaaccacgcacgacaccacatcccattcaagtatcgttctgattctctaaaccagaaatttctggtggaagtccaagaaacatatttcacgttctcagctgatgtcggagtctatgccccaactcttagaaattctagggcgctgaatcaaaagagacttgtcggtatactagaggttgcccaagtaagccctgcttaccgggtgttccttgccaatgtgcatgatcagaccctaaacttaccacgagtaccccgacttctgaataaaacgcatagcggaatcgcttgataaatt

SEQ ID NO: 11875 - DNA, 1257 bp, Emericella nidulans
  unsure (1)..(1257): unsure at all n locations
cctataaccttatttactacctactaagcgcattagaaagaccttcctggctcctgcgcggcatcacctcaccatagacaccgactgacctcgcctcgaccagcttgtcaacgccagcagacaccgcaatgcacttctcactccacctgtcagccctaaccttactagggagtctgccactcacactcggcgaaaaggagacagatctggggtacttaaagtgtgttgtatgtgccattccatttcccccagttcattcaagaaaaaagagaaattaacggaatcagtccgccgttgttaggacgacctcgttcccttcctgcgattcaagttacaaactcgactgtttctgcgaagcgaatgcccaacttgaggctgcaaacgccaaagaaaatcgaaatggattgaaatcggcttcggctttcactgcgccgcaggttgagctcgcgccggaagtcgaggagctgtgtgcggagaatggtgttcgtatgtctactgatcctctttaacgttctctctttaccgcttctcttttttttgccgtaccctaataaacttgcgtgaggagcggtatgttgacagttactttacgtcgaacagcaaaggaagaaataacaaggtacctctgtgacgataccgcggtccccgcaaccccgcgtagggagagcacgccgatgattcgaatgggccagaaaaaggcagaagagtctgagtctgagtccgattgtggatctgctcatcacacggaacgagacgatgaaaagacggcgtcaatcaggccattagcactaaagcgctccatctatcccggttaacgagacttctgtttccgaaaacaaccgctcgagagggatgccgttgttgccatgaccatgacattgcaagagagtaatgttgtgctgaccccaaggagcaaaaccccatttatcgatcgctcatgtccacacattcacgtggtactgctcgatccacaccccgttacgtttggggtggtatattcaaggcttttaccttttgccttattcgttcaaagcgttgacttccatttctcccctattcccccctccattcgtgatattctcctggggtggtataaccgtttgttgggtgacctataatcttatatatgattaggattatttattatttaattatttattattttanntattttattttttngattattttttagttttttgtcttgttttctccccccccccccccccccccctatttctattatattcttttttg

SEQ ID NO: 11876 - DNA, 149 bp, Emericella nidulans
cgcggccgcgatccgtggcgtaggggccgctgcgggcaggtgcgtgacggcgtttcgctgccgctacctctgccgccgcttccgttctcctcagctcctgcgcctccagccctcttttccttcatgtgtccggtatcgctcggcctcct

SEQ ID NO: 11877 - DNA, 723 bp, Emericella nidulans
taaagcctgcagctatgatacgaactcaatatgcgtgcggtttctgataagtgatatggttaccttttaatctaactgctagccactagcgttctgggtctatcctaagctaggcgaaaagtcatgccacacggctagccacatttctcacagtgctttataattctagtatttcgcacttgacccgtatactgaattgtttattcagtataatttgattatcgggagaaagttaaatgttgacttattgaggtcgggcccaacaggaagacacttctcgcgtctaggaaaaattcgcgaggttttttttctttttgagcactgatacttcctccgactcgtgttcctaattcgcgatgcttgtcattaacacgtacatattccatgacaagaggagaagttgtgcttactgttcaaccgaactcctagacgctcaatatcaccatgcttgctactctcgggagtgccagctatcgtttgacgggcgacccacaggagcgttaacgcacgaaactattctctattttctgcacaggcctcactggaagccttagagatagaaaaagctgtatcacaattgggtctcttcaaggggtttgcaattgaggctttgaactcttgcccgtccttcccaaaagtgcacgaagcgggtttttgcgctatgacgatcccaatcttgggcaacaccttgtggaaaggggggtcttggactttcttgcatgg

SEQ ID NO: 11878 - DNA, 2734 bp, Emericella nidulans
gcttagagatcgctttacaggcattctgggtaaaaattcattgtcgtacacacaattcctgtagtatgctcttatgtgtattcataagtaaggcagacacccccaaaaacaatatgaagtataaacaggcttctcgtgaaatttttcttctaatgtggtcgagaactcaagtccaaaatccagccctgtgggtcagcgggaacatatttaggtagcgcggagtaggatccgcagcacgatttcttcagctccttttctttcctgtttacctggctacaatgcaataacataaaataatactgggatggaactaaaggccctctctagtaattggaagaagctccaggagactttgaagaaggacgtctccacaccccctacacaaaagcgcaaacgatccgatcgcgaaccccagaatgacctggtgaagaaacggaaaagcgccgcagaagcaggaaagcgaaattcgacttcacggactgtgcaagccccgaaaaagcagaaaagaatgtctcaggggactcctgacaagaacgcaagtgcaaacgagacttctaatgcggtagtgtcgagggaaaatgagggccgttctccaaagtcagtattcggataatcttatatctagtcatttcttgcaatctctctcttctctttgattatgttactgactctttacagtgttgagataggcaagtacattgcgatggattgcgaaatggttggaattggcccggatccagacaatgactctgcccttgcccgggtcagtatcgttaattataacggcgaccaagtatacgactcatatgtacggcctaaggagatggtgacggactggaggacacatgttagcgggattcttccaaagcacatggcagaagcgcggtctttggaacaagtacagaaagaggttgcggagattctcgaaggacggatacttgtgggacacgctcttcgaaatgatctagatgcgctacttctcagtcatcccaaacgcgacatcagggataccagtaagcatcctccatatcggaaagtcgctggtggggggtctcctcgactgaaaatcctggcctctgagtttctcggactaaatattcaagccggcgcacattccagcatggaggatgcaaaagctacgatgcttttgtatcggcgggataaggatgagttcgaacgagaacatctgaaaaaatggccggttagagcactgccggaaagcaaagagaatggaggcgatgagaagaaaaagaagaagaagaagaagaagacgcgcaagaggtgagctgaacttgtcctagaattatcctagatataccccattccgagttgtatacagataaggatagaacacttctgccaatttctacccgtagagactaatctggcataacataattttatgaatcacatcatattctgataagctgcaactcgccaaaacgatcggtttgtggttgagaacccgacccgtctttatctagtacactgggccctctgttccgctccgctcccaatttacgcggtgctcgcgcggcgcgtcttaacgatattccagacattaaccttcaacaaatccacgaagaaatccaactgagaactcgacccctcttggcataaatccgccagtatcatcgtccgcacattggcatcctctagattggctgaaaaagaatgtacgccatccaacccaaacagacgacctcggaatcgaaggacacggagtccggtcacgaattcacgccaaacatcctcccctgtcgaatccactacgatggttcagtggagtcgctgaaccgatactggactcctagtacagatgagaaaggtgagcagacgctctgtctccttcactctctctccatatacttaccgatcccagataaagatctccagaccgcatactttcggggccggaggctaagaggtcgacgtgttcagttaccggaagggtacgagggtgcgttgctatatctatattgttgagttggggatgtttctaaccatatagtaggcgtcgtcgtgacgcatacagagcgtgaaataccaaatgctacagacaacgtaactgtgagcaaggaaggtgaaaataataaggcggttaagcttctggaaaaacaggctacttttggtgattatgtggtttggggacatgaagtaatcccagctgcggatgattcattcgttaagggggtggaagagtgggtgaagtttgctgaagtggtgagtgacaggttcctgtcaatgacaccaaaactaactatagggctagatgcattctgataacgggtatgagaagaaggctacatgaacaaattggcttggacacgctccgtaagcactcgatgtctaaatctgagacagtcaagcagcttgaacaagccccaacttcagctttccgccgccgaagaaacaagctagcagtaaaatgctagtagtctcacttagcggatgctgagctctgaatcaccagttttcacgctactgtaacgcctgtggtcacggaggacagtggagatctataccgcaagcccatactcgaagttatggtctgcttcgggcttcacaaccccaacagcctaatgtgagacaaccttgtattgaacatggcttcgaaaccaagtaaggtacaattcatgctcgattaactcggtccattttcgtttttgatgcaggtcgtggccaatataaataaggcttgaccgccctggacattctgccgtaaatagggctt

SEQ ID NO: 11879 - DNA, 3807 bp, Emericella nidulans
  unsure (1)..(3807): unsure at all n locations
ggatgtttgattcgcacatccagtcttaccgtgccagagacacagtattgccagaggcgctgaaaagacacttcacaaatgcgcaactggcagcttctaaaaaagccacgcatcaaccgccagtctcttaggtactcctgtcaatccgataacaattccgctaacgcttttccagtggcattcaaccgcatgtctcggaagacctgacgctccggacggcaccctcctgcccaaaggaacgcatttcagcatgccctccgcggccatcctccaggacaacggcgtggaacccggtgccgaccaattcgatgggttccgatactacaagaagcgcctcaaccccgaggaagccaacaagcaccagttcgccatgaccgacaacaacaacctccattttggccacggcaagtactcatgtcccggccgcttcttcgcctccaacgagatcaagatcatcatggcgcacctgttgaccgactacgaattcaaatacccccggggcgcgacaaggccgcggaatctgacggccgatgagaacctgtatccagatccgtcggcacgtctgctcatgagacgacgggtggtggctccgccgcaggcgtcgatcacgccgcagcttgtctcagcctagaccggtggagagggatgcctcgcctgtggagtagcccaaggtcaattgcggatatgtgattcgtgctcaccagataatgcgcatgtaacgattttactttcctttgtggtgtctaatcaatattacacatagaattaagcctaccagcggccaagctgcatctctcctactagggaatctagaccactgtaatcacggattccttccgagtaggatagctcgctaagagcctacttttccctgatccgctggtcggtctgggggggggctttggcactaaaactagcttaatatagaaatccaggaggcagcacggggctggcggcggcccaaagtaccaacgccactcaggaaccatgtcgcaggacgggctctgctccgtgcagtattcgtctcccctatcatggctccataagagtcatcctctggcagtgttacatcgtccccttcgttgaacgggagatatgacaggccccaacgcttgcctacgcgggcagtgaagtgtttaacagagctaagcgtactcgagcgtgagatatttgccaagtcaacacccaagacgcgattctactcgtctgctcgtaacgccgcacgaatacagtcagcactatctgcgcaccttgagagaccatgttcagccgctaccagcttagtctgggcggatggggctgaaccctaggcacccaatcttcaacgctctttgtactcagtatcgacacaacttgccgtgtcattcgcttttgacgccagagacgaccagcgctaggattcttgctggggctgctcaaggccgttgattctcgtgagcgcaatgcggggtgcctatgctgacgtagcccctccttcagccagctttctatcgcctctctctcccttctgatccttgactcctacctgaccaatatacaacatgtacccgtggagttcgacaggaacgtcaccgttttcgcatcccgacaatgaaggcgcggaatcgggggatatgagcatgggggaagagcagcagcaaccccaccagaggcgccagaaattgtgagtaaaatgtgtcgcaaccgatgagacccccgacttcgagaggaatgtatttagagatcaccaaccgacgttttcgacctaacagcaacaacctgcgcgcatgccagtcctgccgcgcttcgaaagtacgatgcgaccagcctaacccgggcatgccctgtcttcggtgccagaaatcaggcaagccgtgcgtggatgccgccagtcaaccggggaagcgacagcgccaacctatcaacagtatcctggagatggagtcgcgaatcgaaacgatattgtcgtccgcagaattgcaggacagcgctggggacggggagactgcccattccaccgcactccgttcgccttcccagttgtcgcaccacatccaaccgtttcagcacctccccatgggattcgcgataccgttcaatggtgagtctgcgtagatccagtctggaatcgtggcgagttactttcatcgctaacatggccaccttccgtctgcctaggaggaaattccgggacggaagatctgaactcgagcatccgatcatggctgaatgacaacatcaccgacctggatgctcgtaccacagagacaatcttcagtcattatttgaccaacatggtgcccacctttccggtcgtcgtctttgcgacaggcaccacggcggccgacgtccgacggaacaaccctattctttttctagctattctcgacgtggcctcgtcgggattctgtgcgcttgagacgcagcggaaactgcgaaagctgattgttcaagcgtacgtgcattgaatgctgcgaaccgaacagtatactctcggattgctccaggccctgattgtatccggcacatggtatcgcacgattgagcctgtcgagccgggggagcagatggatatctaccagatcagccacacagcagccaatatggccttgatcatgaggctaggggagagtttgaatgccaaatcttgggggggtcccatgtttcctcggcgggagatgaaaaagggtcctggaagcgcctttcaggcggactcgctggaagctcggcgcgtgtggcttgggtgtcattatatttgctcgaagtgagaaagacatacccaagagcgcggcagcgttaacctagtctatgcagtacctccatgtccctccgcgccccaaacatcatgagatggacccgtctgatggacgaatgtctggaggtattggaaaattccccggcggcccttctatcggacaggcttctgtgtcagcatatccggctgcagcatatcactgaagaattcgcgatgcatttgtccgcagaagaggcttcagctcccgcgaaatcccgagcgattcagatccaggtaacccatcgtgctttcaaacgacagctcagcgaatggcgtaggactgttggtgatggttgggatggtaactcctccctgcttgtccttgatcgcctgcccagccactgatgcggattgtctagagtccctcgagttttcgtattatttctcatgcctgtacataaacgaagtagcccactgcacagcgacgagtgatgatgttcccgaagataacgcccagcgcttgacgccaccaccaccgattgtggcaatcgagccgcatgcgattaccgagtttatggatacgatagataatatttttcgggtgttcacctcactggatatgtcgaccattcgagccctacccgcgatgtacctgattcggataatctacacattcatcatcctggtcaaactatactttgcggcagccaaactaccagcgcaggacgccgtgttgcaagtcgacggactgcaggtctctaggcgcttcaatcgcgtgatccagatgaccgcaggatggggcccgttgtggcctgctacgaaactaaccaccgtgttcaccaagatgcggtcgtggtttgaaagcggaggggataacaattgccagaggctgcagcaggccgcggcgtggctcacgggatgggagcttaagcccccgtcccagggccgagacgctcacgccatgaacatgcncgaaggtgtctcggatgatgggataattgtcgcttccgctcacgagggccgggatctgggttcggcgctggcgtcaacgacctggtactttggcttttggacaaccccccttggactgattt

SEQ ID NO: 11880 - DNA, 127 bp, Emericella nidulans
tcctgcgctcgtcagtctcgggcggtccggcatgttaggggagagccctccccatcctcagacaccatccactccgagggagcgcgccgtagcctgttattccgtttcgcggctacgcttggtcctt

SEQ ID NO: 11881 - DNA, 1875 bp, Emericella nidulans
gaagactgactccaacagcggcggtatgatccgctccctctacgccacaatgcttgcaggcggcgccaccatatgctgcgcctcctttgaccccagtcttttctgggatctggttgaaacctggaagccaacttggtactacgccacgccaaccatgcaccagatgattcttgccgagtccgagcaccgcccggacgctcttcgacagagcctgatccggtttatcatcaacgccggcggtggtctccctgctactctggccgtgcaactgcgagaggtcttccagtgcacagtcctgcccagttacggtatgaccgagtgtgcccccatcgtggctccaccgacagactacaagcttgagcgcgaggggacatccggccgacctgttggtcccgacgttgctattctcgacggcgccggtaagcatgcgcctaccggtgtgactggccggatctgcgtacgtggattccctgtattcccaggatacctgaccgagcaaggcgttatcaacaaggatgcctttgatgagaacggttggtttgataccggtgacttgggtcacctcgaccaggacagattcctttatatcacaggacgaagcaaggaggttatcaatcgtggtggagagattatctcgcctatcgaagttgaaaacggcattctctctgcggcccgcgatccctcttccattctttacgggcgtgtcaccgaggcacttgccttctcaacgccacacgatgtcctccaggaagccgtcggtgcggtcatagtcacaccccccggcaaagcgcgacctgatctgaggcagctccatgaggcactgggtgaaaggcttctgcagccaaagtggcccgccctcttggtgtacatggacgagggagtgccgaagtcgaacaacaagctgcagcggatccggttgagtcagagattagggcttcagaccctgactgactccgttcccgtcgctgagagacactttgaagcgaagtgccctccccagggcacgcccttgagcgtctcaatccctcatacgagctgcatgatcgacgggcagcaggccctaacccatatcgcacaggcctctggcaactccgagatcgtgatgcgccacaaccccgttgacgggttcccccaggccattttcttcaactcagagtctcatcctgcaacgactgtggccgagctagcacggtccctccgccagagtgtccacggctacctcatccccagcagcattaaatccctccctggccccattcccactgaccacaatggctacgtcgacgaaaaagccgtcgacgaggccctgcgcgctctcaccgcatctgctgactcgaactctaccgaataccgcgtccgcgagctcttcgcccaagcccttaatcaggtcgtcgacgaagtcaccgcagatacagacttctttgccgctggcggcgacagtctttcggcgggcaagctcatctccacactacgtcgtgagttcggtatccgtctatctggcgacgtcctgtttctccatcccactgttggccatatcacagagatcgtggacgaagcctgcgcgaagaaatcacctgaggcggctatcaaccccgatgatctccccggctgcaagaagacgcacagctcgacaaatcccatcgtcttgatgctgcagctcgtgcctatgttgattttctaccccatgcgtgtcggactgcagtggacgatcttcgtgtttctcatgggcgagacggcgcgacgcttcccgcctgatgacaagctcatgggccgtttgctccacatcgttctaatcggattagcctctcgattggcgattgggttcattgcgccgacgtttgccatcttctttaagtggcttatgatgggccgcta

SEQ ID NO: 11882 - DNA, 2414 bp, Emericella nidulans
ggggggtatatttccccctctttatataaaacaccccccccccccgcgggggtggttttttttttttctccccccaccccccccctttttttatttttaaaacccccccctcccccccccccccctgaggaaaaccccctgtttttgccccacaaaaaaaaagggtggaaaatttccctccaataaagtgctgggaccaaataaaaccaacaatttggtctaaaataggaagaacgaggcttagttaaaccaagttaaaaaaggttaaaagggttggggtgtaggttccccaaggcatttcaaccgggtgggtaataaggttccatactttgaatcaagcgggttttcaaagaccatggccgttcccattagctggattgaagctacgcaaccctttttgatctcttggaggagaaatcagtagcttaatggactggacccatgggcatgaaggacttagaattattgtgtggtgtgtcgtgaagctctgtgtaaaaggctaccagttggcatcacctgttttctcttctgagttgctgcttctcagtgcatgcatagcgggcttcaatctctgcatcgcgttgggactgtgggcgttggtcggtatttctccctttcttgtaccttttaggtatatttttggacgtggatcacagtacgatgaaagaataggatttactgcccctgtgttttcatatgacgatcaatccacccctcgagcccgccggcacggtcgtacagtatctcaatctcagctttaacattcaggatcagcatgcgctgcaactccacccgccattctgcctcaggcccatctactgcccaaatcggactccgtttcaacatggtcccaatctttctcctatccctccttgttagcgacattagggtctcgtccgcgtcagactctaagcctccaattatctcggagatgcgtagccctagccactgcagacaaggaaggttcagccgttcattctctcgtgtgtgcgccatagagccgtatttgtatgttgacattatggctatcccatccggatcaccatcggcgaggatatagaaggggggagcttgggtcagggtcgatcgtgggaatgtactttgaaagatcctgcgaacgaaagagcgggttgcaaggtccggatagcctttcccctgacattcgttagcatggactgatgttttggtgcttaggtgtatgcctggcgtaccgtaattaggattccttttcctactatggtatggttatggaagttgtttcggacgagacgacgaaagacagcctatgtaaccattgagtgagttaggatagcagttattatgagtctaaagaggtgagacgttgatatggattgccagaacaatacctccttctcaatgatcaggatccacttgacatctgaaatatccagatccgctatgtcctgtacccttgggataaggcaatcctggcatacgtacagattaggactggagacgtcggacgcggattgtttataatagtctcttacttccgtcgattcccgtgcatcaataacctcgtccctcaccgttgtcactcgataatatcctgctacgagacccttcgcagctgcttcctggatagtaaatcgtcaaaacagtgaaagacctagaccacaaagagaaataccacgttcaagtccgctctctcgacgccaatagtaagcgccaggtcgtcaacgaaacgactgacgactctctgagactcaaatagttcggggtcattgtagtatatgtccctagagaacaggagtcaggtctcctctcgacacttatctgactggaagcagcggacgcgtgcaccttattgagactggaaatccagcttctagagcgtctcgtatcgcggagaggatccgaaggacaacagctacagagcaaaatgaatccatcagccaatatcctcaggtggttattgtagcgttcacgcactgaatctccacgcttcatatccatctttccctgggaacgagtaggtgacagttgtttctgctcggactgcctggagtgcgccggttgaggagtcgatacggaagacagtggtagtcgggcttgttatccttcgcttgagtgttatggttgcatctccttcgccctctccgggcttggagatattgagttgggttaacactgttgtgagggtgttttcgaggtatttctgcacgcgctgttttgggctaaatggtggttggagaagagaatccatgtgtctttgttagggttccattaagtatctgaagagactgtttgatgcgtttagatattgggggatgagggaggtaagaagcaagtgaaggcttgtcaactatggcacgccgcgctcatataagttggtgtaaatcctctggagttctcaagtctctgtcatgggagttgcctaagacaactacttc

SEQ ID NO: 11883 - DNA, 124 bp, Emericella nidulans
catagcacccgactcattaatggaagctaatccagcaacaggatgaaccaacctccaacaaaagcgggagaatcaagtgaaatcttccactcaaaatgagacaaaaccatcgcgcaagcgacga

SEQ ID NO: 11884 - DNA, 957 bp, Emericella nidulans
cgctctcacgaacgctcgatccggcattgcggccttcggatatagggagaaaggagatgagagtgggaattgtggaaaactttgccccggaaactgaggaaactcgggtgtaggattgctcggaaaaccgggtctagggaatttagggaaaggcatgggattagttggaaaaccgggtcttgggaactgaggaaaactgggtaatgctggattgttcggaaagccgggtctcggaaattgagggaaacacggtctaaaaaacttcggttttaacgtttgtttcttcgtaaattgttgtgcagcgcggcttgaagtgatcatagaggagaacatcagagccatgaggagagaagcgactaagaacattttagatgaggccatagtgtttaataaaagagctcttcaattagttgtagtgtgttttttatttgattacttatttctctgatggatttgagttatataggaggaaaactcaatagagataacgagtacaatttgcatatcatttgacttgaattttctttttatagattaacccctgagggtttcataattaagattaggaaacggttgatttggttaccatttggttgctattagttttgaattctgttggtgtatcaccaaaccaattcataaaactagaactgaccttgcctataaaatggcatctgtttttaaggaaatttacatggatttaacctcctccattattttgaatatactggttgcctttgaagttttattttttttgcaaatacccaaatttttgccctgccaaatagtcattgtcaaattagtttggaggcacacccctttttgggatgattattcaccgtggcaaacttggtttccgcaatttccatgaaaagggcatttgagtagctttggaacttccctttttttttaaatttgggccggctccattttcttttgtattatttatattttttt

SEQ ID NO: 11885 - DNA, 111 bp, Emericella nidulans
cgtgatcatggctgtacatacagcaatgatagaagacaacgacattccggtcctgacgacactagctcatcctggaggctgcgccagtataacggggaattccccagtaga

SEQ ID NO: 11886 - DNA, 105 bp, Emericella nidulans
cgttggaacggcataatgcatcttacccagactacacagtcaagaaataggagcaatataagcacgccaaaactgagctgagcgatgaatctacgtagcagaata

SEQ ID NO: 11887 - DNA, 117 bp, Emericella nidulans
cgttccgcgatgggagataaccatagcagtcaactgcccacacttgacgtcgccattgaccacgctgatcctgcactcgatgccctgcagcatcgaattcggatgctatcgaagaat

SEQ ID NO: 11888 - DNA, 100 bp, Emericella nidulans
atggtagtataccagaagcaacgctccctaatggctcgaaggggaatcacatgagacgcagattaactgcagcctaatggcgactagagctacccgcagc

SEQ ID NO: 11889 - DNA, 1437 bp, Emericella nidulans
  unsure (1)..(1437): unsure at all n locations
ggggggggtganggcccttgaagatcaccggaccgaggttggtatttccagtttccttggtagttgctttctaaaaggcaagctagtatgaccatcgacacagcatgctccggcagcctagtcagcttggacgtagctacgcgatacctgcaaacgggggagattagagccgcaatagtagccgcgtgcaatctgtacatgagcccggagcactgcattgacattagcagcagtatcatcaacgctgcctctctcacgggcctctgccatacgtttgacgccaaagccgacggatatgtaaaggccgaagcggttaacatggttatcatcaagcgactgcaggacgctatccgtgaccgagacccgatccggtctattattcgtggatcggcttctaacagtgatggctggaccgctggaattgcgagtccgagctcggaaggacaggccgctgtgactcgacaggcgtatcgtattgcgggtattgctgacttcaacgccacttcatatgtcgaatgccatgggacggggacccgagctggagatccaatcgaggtcaaaggggtggcgtccgtgttttgtccggagaggcctgcggaaaggccgttgttgatcggctcggtaggtcgagctgctcgctgcgttccaatccctttattctcgtgtagagcctgctaataccgagccaggtcaaaagcaacatcggccactctgagcctggcgctggcatctctggcttgttgaagacaattcttgcattggagaaaagtgtcattcccggaaaccctacttttgagacaccgaaccccgagagtatgtcaagtcctccaaccaatgcaggacatggattaacaccacgcagttgactttgacggcctgaagacgcgcgcttttcaacatgccactccgtggcccagcatgcctttcaagagggcgagcgtgaactccttcggatacggcggctctaacgcccatgtaatcttggacgaggcaaagactggcgtatctgcatcagaaatgtgcttcaagtcgtcctatttacctgaagaccatgatccattcgaagaatgcgaggaaaatgagaaatgctttccccaactgctagttttttcagccaatgacgagaaatcgctccaggagtatattcgcgctctgagagcccacctaatcaacccccgcgtgcggatctcattgcaggacctggcgtatacgctatcggagcggcggtctcggcatttcaatcgtgcatttcttatcacacagaccagtctcaatctcgatctccatggtttggtctttgggaaactgcggtcgagctccccacgagtaggttttatcttcacgggcaagggtctcagtggcctcaaatgggaaggtctcttttggatatgtttccttcaggaagggggcagttcgcttggttagacagggcacttg

SEQ ID NO: 11890 - DNA, 228 bp, Emericella nidulans
ctagtaaaagagcagtgtgtgtaaagaactggtttagagaggaaatgttggaatatcgataaaaaagagatcttgcgtatttgttccgtggaagattacgagatttacaacacatgaaatacggtccggatggtcaggcggttcgccgaaggaatactctatgtggtggaatagaggcttgaatggaagcggcgtggctagactagatgaatcaagggccgttgaata

SEQ ID NO: 11891 - DNA, 105 bp, Emericella nidulans
ggccatcgtacacgttttgaatagccagaataacaactaattcctacactcgcaatcatctacagaagtactcttacaacgtatactgcgaacttctgcgtatgt

SEQ ID NO: 11892 - DNA, 2617 bp, Emericella nidulans
tgttggagtggccgccctcgtcgatattgggcacggccgcgcgcacttccgggtagggggagttctcgagaagactggcgacgatggactggcgcctgtccttgtcggtagcgtgaagggcatcgttgacctcgtcgacgacttcatcgggaaggttggggtcccaatggtggtgctctttcaagtgcttaagctgctcgacggtgtcgaggccagcggaaggggcatcatcactggggacggagtcatttgcggaggttatacggacaggcgtatctttctccatgctggctcatatgaactcgcgatgagttcaagagttgagcactcaatgggacggagatggtaggagaggaggataggcggtgggtgagaagaaaagggcaagtgttacagcagaccagggaggacggcacccttttgactgtccgcacgttatctgtctggccaggtaattcacatccattccagcaataatcacctgaacaatgattgactaaccattgttatcaacgagatatagggaattaatggtacctcctctaatcggctggcgtagcatggcgcgccgttatctgcgactgctctgcttctcctgaaaccaactgcagccggtccccttctcctcatctagcatagacgtctcttgtcctatcagctcagtccctcagtccgagacagtttgattttttccgatcacagtcaaacgaccccccaccctataggttaccttcggccaaactccagatacaactcgagtccaagtccaagcggcgaccgcacatggcgagggggtatcggatctctttcctggttggtgctaactcttatctcgacgggaacggcaaaatcttagtacgagcagtctcatgatggttgcgcccagtctacaacgttggcagcggtgcttgttcctgtgcttgcgtgaggataagctagcgaagcttcccgcccaagcctgccccaccgctaaccgcccggtctgcccgaaccaatagcttggctggtggagatacggtgcggtgcctgatctgagtatatggggttatatttaaggaattgggactgcgactgggagtctggaggttgaggactgaagatcgcgggagaagatgggtcgaatgccagaagtgtaatgatgctagcactgggaacagtatgatcagcatctccaagttcgagaaacctatcggtgcgggagtgcaggctaagagacggttagcgataacaatgttacatttaaccattttggcgcgaggcactcttcgccggccacatgtatcggaagaaactggggataagaaccaatctctattgctctaccggtgcggtggctgttattattccagaatgccacttccaacagtccaagtatacccatgccacctgccttatccggacagggttacggaacaagaaatcatatctcaatcaaatgatccaatccctttgcaatccaagcgagcgtccgtaccaaaggctatccgcttcaagcgagtcaatgttcgattggcgccatcagaacttctccaaacgccatctgatatgaggaaagtcaagccagccagctggctctgagcgtccggatacgatcattcggggatattgagggcccactccaggtccgtccaaaagccatcgtcgtagaggtggttggcagaaccctcggggccagtaggcggtttctcggtgttctcctccgtggctacaagttattagcgcgactgaactagaagatggtgggagaccgactggtacttggtaatggtggttcaaactcatccttgaaccacccacatggcatcaatgatggggcacaaagccaggcggctgcggattcgcaggttgatcatgacgctaccatcagccttgcgaaaggccttggtgctgttatacaggtgactcaatacagtgacaacctttgttggcatgtcggcgttgtcgacaatcatgagcttggcaaggttgagagacttcataaagtaatttcgagctttagcaaagtcgacaatgtctgtatcatgtcctttgattatgcgcaatagtatagatcctgcaaggaggagcccgaaccaaccctgtgatgggcagacggcaagagattgcagttcgcgagccatgtctgcaaccgcatcgattaccgcacatgccgcggcttctagcttccggaggcgattatccgcgtagagggtatgattctttagaaagtgcattccttggatgctgaggcaagcaacaagaatgtcaaatcgggccatccctaagatatcagttggagatttcccctgcaattgggtgacttacaagttgtcgcatcgatatgtagatcattgacacgctgctcatatgctttcagaagcaagtccaatcctccttcgtccgccgcactcagggtaagaaccccgtattcattcaccgccgcgccacactgagtgacaatctcctgtgctttcatgcgggtccggacatggggcgacatgttctggtatagcgtcttgcgttggttgacgtcgtgcgccatgtcaggtagagtacgaggagggctgccctttcatcaagcacgcactgcccagtgtcagtgcgagcgggcaaagggattggggcagggctcaccggt

SEQ ID NO: 11893 - DNA, 194 bp, Emericella nidulans
tgggttagtggcagcttgcagggtgtgaatgcatgtttgatgtgtgcgtgaccattgacttatactcctcaggagatactccgtcaagcttgctcctcgagcctagcgcttgctcagcaatctcccaccttgggtctgacgatgattcctctctcttggtaggatgtccatagacaccgctcgatgcccgtgtg

SEQ ID NO: 11894 - DNA, 537 bp, Emericella nidulans
acagagcctaaaagcactctatgggctttagaccgtataaccttccgacgcattctcatggactcggcattccagcgacgacgcatgtatgaggctttcttggaagaagtcccgctcctgtccagtctcaaaccttacgagcgggcaaagatcgcggacgctctcgacacaatcaagtttccggccggggaatatatcattaaagaaggtgatccgggagacgccttttacctgcttgaatccggcgaggccgaggcttttatggagggcgtcgaagaacccgtgaagtcatacaaaaggggagattacttcggtgaactggctctactagacgacaaacctagagcagccagcgttcgcgcgaagacggaggttaaggtcgccaagcttggtagagatggattcaaacgtctgttgggcccggtggaaaaacatcatgagaaggacggaatacttgttgaggccatttacagttacataagcctagcgcctacaggcggacttgttcagaacgattttaagttggtttatagtttt

SEQ ID NO: 11895 - DNA, 2288 bp, Emericella nidulans
tcaagacatgcgccctctctctccgatccctttgctagtggtgcgcttcctcggttccggtcattgaaccagcatgcgccctctcgaagtcaagcttctgcgagtgggctcccgtatgacgcgacggaggcaggcatttcggacgccgagcgcatccgaagacagattctgaatatgtcttacataaggcaataagtggcgctctgtgaaagctcttgtgcggtttcaatttcttgaagagctttcacttgcgcagacctgttgtcgacgggtgccagcaattctaatactggctgattgatttattattgtgtgacatttgagccatttacgcggaaatgatgatgtgaaacggcattgacgacataacgacagtttaagaacagaagagagagagcctcttgtgcaaagaatgatgatttcgaaacgaaaaaccgcatatgattgattataaaagttgcagcttcttgacgtttggcgcgacacgaacgagtctggatctgtgcttacagcacgggttgcttgactatatttaacctcgatttctcctctgacagtcgactcacccattcttcctggcctcgaccgaaatctacattggctgttagggtatacccacacgttgatctgactagacaagtgctttacagaccaagccttgctcgtattggactttggattcgggatacctgacacaatctcactccttgaacattactactgaagacaattgcatgagtagcgccccaaaaccacaaaaccccaaaaatatgcgctactcatcagtgaaagcttcctttcgctccatttcctttcctttttctgtttctctcttctatatctgctacaggaccaggctccggcaatactcattcgttacttttccttacctcagttttcttcagtcgactttctattctatatcctgacgagcttcaggcgtcgcgccatacatgacttggaacggagcattgctgccattgattgacacgaccaaccatagatgatgatgctgctatcgaatccaccttacttccaagcgcgtgtttacactttgcagctttggctttgaccactacctatttgcaacggacttcttttcttcgtccgtcttgcttcctctcccctgcatgtcagacatgtaagactatttaccctggctatcttttttcctccacagcgataggagcaatctccgctgttgcatatttctttcaccatcaatggtctgatttagattgaaccttgaaagatctcgagacctatctatatttctcttctcattccgcttttgttttgcattactttctctaccctctctatctacccctcactcagttcaaatcttcgcgctcctctttcgtttttgatcaacctgcctttcggacctccttacctactagacagatagggacagggccgggcaatttccgtgcaggtgttgagttcagcagctatgaggcatgatgccacgatatcatgattccgatgcattgtcgcgatataaacctgagtgttatgattttgaatcaaattcaacgcttcatctctactttcatcaagctcccgttcatattcgcgtaacagtaatggtaagaagtacgataggctggtctaagcgacggggttggaccaggggaatgaaccagaaagctccttcaggctaacgaaatatgtctgatggatcatctcctagtataaaggggggctataagaccgaactgaatatggagtggagtagaagtaaagaaatatcttattatattattccttagccatatacgaacaattgataacataaagacgtgaagcagaatatcagaacgaatagaggaaaggagatgaataccagtgcaaagcaaaaaagaaaaggggtatacgcgggtgctgtgctgtactatgtcatgataacattacaagagtgaagtcgacgaccaccaatgtcgggatcagccaaatgatgttcaagaagcgaaggggaaaagacagaaaaaagtcaaccttccctagatgtgagttgaaaaacaaaacaaaaacggaaggataattgaaattggagttacttctccaatctcttctttttctctgcaaaaattgcctcgagttttcggatctgcaagcccaaacctttcttctcagcatggtcaacgagccaactttccatccgttcacggagatgctgcattgagactaggactggaaggttggaggcgttaacattcgatttctgctcatccagccaacgtccgactaggataaaagagataaaacatggccagtatcctttc

SEQ ID NO: 11896 - DNA, 3288 bp, Emericella nidulans
agcccgaagataataaggcagactcctcacgtgcagacgagtgacgaaagatgggagcgatccgtcatccagcgccgcggcagtgtcagattgcgtccgtgcctcgcatcaaccctcgaggctccagaccgggatactaccttgctatcaaagattcattgactgcatatttatctcgatgccgttagtcttagctcccgtggaattggcagtattgtggtctccggatcagaccacgcattcattcgcacatggtcatgtcatcgacgccaggcaccacaccaggaatataatccttgtctcgtcgataatctggtccaatttgctaccggtttctggggatcgcgcgatttatcgttttcgtcacagccaattaaatctacgaaacaatcgagtcgatgagagttcatagtcttaagtttctcaagaatcctgcttttcatccaccaatcaacagcagatccgttaaatcctacgatcgccttgtggcacagaagatatggattctatatattcccgttgaatccagccgagcaatttcaagggcccaggctcacggctgcgcggcgaccgggtctcaagtttagaccatttttcaacttctgaggcgcctcttccaaccttatttcagccttgctcggatgttctgcgaaaagactacgtcttttgcgggctttgttcaagagaagacttttgagcagtcgagtcgaagcatctacgactaagcgtcgaacttcaccgttatgttgatgcaaagtcttagataccactgacaggacttgtagtatttggcaccaaaatgtcatatctcacaaacccacatcgcaaataatgaagcagcctctactctattccagaaaaagaattatcgtcgcaagaccaaacccatcttgaaaagtcattccattacattatacagctgatcaaacaatcagtatgggagcggaggatttgccttgaacatattgcacctaccgcgttcaaggctagacagagattctcttcctccatctacgatatatccaaaggctcatctgaaacggactttcttgccgagacatttcggtactctttctttatcccctcatattgcaagaaacttcgctccaccgacagtgcagtatcgtcgttcatcaggttttacctcacctatgatctccacaaccgctttcagctgcttcgcaagacagtgatcaaatgtctcagatagataaatacaagcactgatagaagtaccagtccgattgaatcggcagagatgctccagggaggggaagacgagcactccgtgagtgccaaaacccagaaagtgtgttgtccaagttgcccttgagctaatgaatattgccgttgtctgattacaagagttcttttagtggcaatgctggtctcatacttaccgctaccgcaagatgtactcgagaaagcctgcgagtggtcagctagaggctttacctttagcaaggtaactcgtccctggaccatttttgcatcgaaagttgggcttatctacgacatatgtgggtataactaaacgcatgtatcgtcaagttacctgtccatacgaaagtcaacaagtctctgattcttcctctggcccttttgtgcatgagatatatgccatacatccctttcacggtctgagaattccagggcaaccctgtaccagctactaggtcccaaactcggccaacaccacgcatataggagcccaactgaaacaaggtctttctggctccagcgcgaagacggctgtaaacaaagacgagtgcttgagttattaggattaaagtgggaagaaagaaaaaaatgccgtcctgcgtacctaccacagtctctgagctcacgcaacgactccaccgaaaatcttataatttatcctataattcaggaactcatataacatcccctcaacgtcagacttgtgactatcttgtccagaactcaagggacataccgaggtatcaactcgactatgtactatgttcatacgaggatgatgacttggtgaatcatttacattactcagtatctgctcaacagtcggttgctaaatcaagcttccaagcctttcacagcatcaagaacgactttacgaagttgaaacctcgacgagtacagatatcaaagtcaatcatcctcaggagtcggcttactgcgacgatgtacgcgtcaccatgcaaagctcccagctcccttgatatatgaaacatgagctcaccgtttaaatctacgatacgttgaatcagtgcatggaaagcctagaacgcgggatgcccgagaaccagtcaagatattgcctatcagatccaggcatcttttgctgccctgcgcctaggcctgccgtcgtaccttcttaccctgcctaatagatcgatttggatagatgaaatctacaccttctacccaatatggacatgcaattacctatcttctcgacgattttttatcagagcattgccatctcgctagatcaagccaccttaaccctgcgtctctcagcttgcatacagagtttaaggcaggaattcatacctggtagttggacaattccgtcgacctcgcccaggagaacaaaatctatctctccagaataccgggaaccgcaagcttccagcatcttaggtcaaagtgttacgagtttacgtttcgccgaaataacacccggtccgcctttatactgcacaatgtctggattcaagatactccaacaaccctacacaattcgccgtgtatacagccaatcgcgcgcaacataacgcagaaaattaaggtgtctaccagagtctagttactcagacaacaaaggtcacctgcacgcgctcaccttcttatctctcttcaagctatgctgacatatttgatgcatagctcggcaatcctggctgagcgcaaagtatacagagtcagagtgcacagattcagacttctagagcggctatgatgacagcaaatccgcttatcgaagcggaaggaggtcgaattcaattgatttcggcatacggagatctccgcggggtagttgcgtgcaatgctatgtccctatatttacagaaattatatattgtgccgcggatatgagtgaccgctgagcgtatagacactcattagagataggaatcaggattgcaagatattagtaggctcagtatcgcccaggagtttgcatgagcaataggcgccttggagatatgctatctgcctatttagatagtaggctcgatacgtatatctccgtacataaatcttaaggaggggcttgtggtatgtaatgaggaaaggataagc

SEQ ID NO: 11897 - DNA, 190 bp, Emericella nidulans
aaagagtaaaccgcccgaccgaatcgattaggcagcaacccactcactcatatgtgctgggaaatcggacaagctggtagacatacttcactgagtcgcaagattatccaatcgccgagtctccttcgtaaatgtcttttgaaaagcctttgtctcgatgattgagctcttaagcaggagagtaccagtt

SEQ ID NO: 11898 - DNA, 606 bp, Emericella nidulans
actatgacaaagatacggacaggtaacactgccagaagcgatcatatacgtttagcctagacttctgcatgcgaggaccaccagaaaagcggccacacactgcgtatcggtgttagccctgatgtctaatcatacatggccttttgatctgaccgcatctaatcgagcgtgcagagattggcatgataaagctcaatttagggttcttgatgcaggatatgtactcatgtatccttgtacttgatttgtttgagtattgtaatgtttttttgttcattgttgtattatctttgtgctatcttatttattttttattctcgtagatttgttttttttgttgatgttttttttttttttttcgttttattttttaatttatataattatttgtactcatatctattatatattctttataatttattattaattttctatattttagttatttttggttatgtttagatttttttgtattatattttatatatattaataatattatctttcttttttattttttgtctgaatttatgttttcattgtttaagtgtttttcgtagatttagtttctttttttttcagttattattgtattcctatggt

SEQ ID NO: 11899 - DNA, 2859 bp, Emericella nidulans
tcttggcactctttccgcggggacagtggaaaacccttgttctggctctcgctgactctcagtcgcacgctctttcttggcagcacttgagcgggttcgaatgggcgagttgtcgacggtatcctgtacgtggctccgagtcgaccgagacttggcaatggcctcatcctcggtggtctcgctggtttccccgctcatttccgcggctttctggatctcacggctcactcccttaagcgcatccaggccggccttctcggcggcgtgaatgtgcgtagcctgcggaccaggttccttacggtacaggtaggagcgaacaaagaatcgggcgaatagataggtcaggggcaaaagataagcaacattgaggtagatcgcgaaaccctgaccggaggtgtccatgcaagtgaccattggtccgggttgtacaacctcacgaggagcgccaaggttgttttcgacgtgtcccacgttctcggcaataccttctgcacctgcggcgcggaaggcaacttgcttaacccaagacaaaccggtggcagcaacaaccggagcagcggatgttgtaggtacgaagcggactggcgggagtgtatagtagacaaacaggtaggatgcggccatagccgatccgataacgaactgggtgatttgcatggtagtcagggagcgcttgacgatcgtgggaacgcggacgcggagcgccgtcaatgtgtagtaggtgtactattcatcgttagtccaattgacccacaagtagtaattcaaggtatatgtaccatcatcgcatggatcgcagagttcaccaaagtgaagatccagatcggtggcgcaacatagcggataccggcccacatgcacatcatagcaccggcatgatgataagtctgcaaagtcgagctcttcttgcccttggcaaggatgatcgctgtatccagcacttcgtagaacttggagaggtagaagatccagcccaggaaggccaatccctggttccacaagcggccaacgtccgtagaatctgggacaccaccttcagccaatctgtattcagggttctggatagaccatttgtttatcgttgtgtcataggtggccgcgtttccgtatcctcgaggaccgttgcacttgcacagcgcatcgacaatgcccacgaggccgttttcctgccaagcgggtaaggtgtagcggaacgcgcgaaccattccggcgaaagtccatgcagaatagacagccaagaagacattgtgcaggataacgaagatcttgaaagaccgggtttggctgaacgcgtacggtttgtaaccacggctcttgttgacacgattgaggatgacaacggtaacggcgtagacgctagcgatcgtgatcggcacgcgaatatcgagcaactggttgtaaagcccaggcgggatgttaaaaggctggtaccatgtcggctcgtcacgcagaggagcaggaaccgtggccggcagctcgtccggcgggaatttcagcagtgaagctggaggcagaccgaatcccacaaaggccgggccggaccctgtatcgagggcgagatcgtacattgcgattgatgcggctgagagcgtcaggaaggaaaagaacggcctgacaggaaggatccctcagcaacgggcagaacctgcttggaccgacagaaacgaaaaggcgctaaacaaaacagtcaggggcgcccaagcagacgagagagacgacaatgtaaccgaccaggcgggcggctagagactagaatatcaatttaaggacgagaaccagaaagcgatgaaataatgctaacactaaatctcgccgcgattatcgtgtggagccgcgactgcatttttcccaacaaaccatccagacctcggccgcgcagtcccaagttcccaacaactgcaaatcacagagcgcgtccctgcttgtgaatcttgtgagtcttgtccttggaattggccggccgattcttgcgctcagatgttatgttctgtctcctgcagcaatcaccgtctggtaatggactctacctagataatgacgtatcgatgactctcacgcgagaagcttccgctttgacgctcaaccaacgggaataccagcgggagtcgcggcggccaaccggtccccgctcctgcgtggggagcgttcgccgttagagttggtaagataggcggtcataacctgcgtcagactgcataatatgatcctatcccagacccatatttttggtatatttcctacaaatcgcgttgtgctaccgagtgcgctccgaattcccggcgtattttagaaaagtttttcaaaaaagtatggggatctgatagccgaggatgaatgaaccctccaatcatgggaaatctaaccagattttcacgtgagacgcccttacagaatgcattgcgttgaacagcggttgagaatatgctagaacgctagttataacaagtaaatctacagtggatactaagactagacgcctgctcaggtttcagcggggtttcgtaccgagcggaagtggaggcggcgcaggtgatccagtattgacgggcgctgaccgtagcgcggccttcttttgaggcggagggggaggaggcgccttcctctgagctagcgacgcggtatccgagctggacatggtggtcgaacgactcaagttcgggtgcggcgggatgggaggagcctgtcctgtgttgcctgacttgctgtccagagtgttattgatccgttcagtaatcccgtacttctgattgacccattgagtttttgttttccggattcaatctgatcactatgtttggaccggaaatcgctaaacgccgatctggctcctgaaaagtttgaagcagaattgacgggcga

SEQ ID NO: 11900 - DNA, 196 bp, Emericella nidulans
tagacagtatatggactaagatacgatgacatcaagccatatactcgaactgtagataagtgatttgctgagcagtgcccgaatgtttccagcagacgtagacgcagaccatttaactagtagcgagaagctgctgcagatgatctttgacgcgttgtacgtagttcatcagtaaatttgagtaatctggtcagtt

SEQ ID NO: 11901 - DNA, 2003 bp, Emericella nidulans
ctgctcagcgtctgacttgcttgaccgttggggtctgataagggcagaagtgtctgggtaggaatgtcggctggagtccacttgagagagctggatctgatttcggcgcagatgttgtcgatgatttggtcttcgttaagaaagttgacctctcgttttgtgggatgcacgtttacgtctagccgatgtggctcaatctcgaggtcgatgtagacaaaagggtggccgcctttaggtaggaagctggcgtatgtctgctcgacggctcgcttaatagcggtggactcaaccgagcggtgatttatgaagagtaggatggtggttcgtttgacatggtagtttgcatttgtgacgagtccagatgacgtgaagcctaacttttcgtccttgacgctgaactcaaccagctcgttggccactgcacttccatggatttggcggattcggtcaatggtgttgagagcaaccgccgtagagatgctgacgccagcgtcaccatgtttacggcatgaaaaagcaacaccagagcaatgtacagcgtagcggccgactacatcaaggatcttggcgtactcttcgctggctgaacgaaatgctctgcgtctggtaggcacattatagaacagatcttcgacctgatagtgttagaaacgtcttcatcttgatatggtcattgactaactgtgatctgcgtccctccacgccccgcagtggccttaggagctgcgctctgccctggtttgggagggaccagctttccatcggcataatgagctctccaagcacagcttgagtcagccgtcttcgtggtgacagtgagatgggcgatatggctgatactagccagagcttcgccacgaaacccatatgtggctattgacgaaaggtcctcaaattcctttagcttcgaagtagtgaacctctcgcagagaatgggaaggtcatcgcgctaggagatattagcaggtgcatcattaccagagctagacaatattacatcaatcccgtgaccattatctgtaatttgaagcagtttgagacccccttccttcacaagaatctcaatcgaagtcgatccggcatcgactgcgttctctatcaactctttaagtgcatgcatcggggcaacaatgatttcccctgccgcaattttgttcacgacatctgggtctaacgcctgtttcaatcattagttggcctgaacattcacgaacggtaatagcttactctgatctttctgggtttacgaggaccctcagtatcatcaatgggccgtttcgtgccccgagcctcggggacgtcgatgtccattccaggctccatctcagaggatgcaatctatgttagctgataaccacctataatgctacatttgccgacctagtaaggaggtagcgcaatggcatcaaataacaataggattttgacgggatgggttcgtccttccaggatgccaagacgctctgctattgaagcctcaagaatacagctgtcggagaccggagaaacattatgtccggaagtactaggtgaagctgtcgctattatcgagtgagatcaagccgcgagtatctaccgatagaaaatgtatctatatctgtattctactcgtcgcatgagatatagctgttttatggaaaacttgcgctctgtggtcagctatggagcacagattgttgtaatccttggaactcgttttatgcttgaattggagtgtgttcaggcgggtctaattaccataccgtaatgtggagactgagatctccaaagtcccggcccagccccaggatcaaccaagactaagactcctctctttggggtcaacagtcagtgtattattgcatcctcttgatcaatgcttccctgctatcttggagctccggtggagccgtgcttcatatgtctctaccatgccatcctccaaacgactcttcctcgcagatgaagagcttggaaagaaaaacgacaaccaccggctgaagaagcatcccgaccagcgatgg

SEQ ID NO: 11902 - DNA, 239 bp, Emericella nidulans
ggagactcgtgaagctgttgatggcgacccgcccatgatgccgcggccaagctcgtacgtttcggttggctaggacgcatctgacgcagagcggattgccacagtctgaacgactatagtcgcctcgtagcttgacatagagtggacactagcgcgtagccatatagaatcagttgaatctcgcgctgctgattagacacagtcagaaagagaggctacctcatcgatgatggtcgatg

SEQ ID NO: 11903 - DNA, 2793 bp, Emericella nidulans
atcattgtttctcttcttaaggtggacattaccgacatagctcacaacctgcgcacattgatacccgagcatgactccgctccatattttcgatgattgaatgctctgaatgaggatgcttggaaatccttttcttgcaaactcaaaaagaaaaagtagtccagcgcgaaaaaaagggtgaaactacactgtgacatgacagtcccttacatagaagtcgaggagaaaggccaaggctagggaaaggcacgtgagcagtatttggtaggggcatgctgtcccccgcatttccccgcatctacatcaatcgatcactaacgctttcaggtgcttcaaatatatgtacatatgtaattgttttacgttactaaatattaggagagacaatgaagccgtcatcacagtttctagttcctaatcaatgtgtagcgtcatcaaacttcttgtgacacccgccacgagcccggatgtgtatggcttcgggcgattcctgcgactaacaaccctggagttcattgctgggtagaatcagacatatatgaaggatgacgttgcccatctttacgcctgcggctgtagcgctttctggagtcatgcagaggtttgcgcagcccctccagagcggagacctgtcatgagtttccaccgttagtacggctaggatagcttgtctcgtgaggctaacggaaagtcttgcacttattcggaagtgctaaccgcccaaaggatcatgtacggacaacggtaatccaagaaacaccctgattggtgacaaggccgagtatctgcggtagctggcggtccgtcatcatagctacaatcatgcgcaaactgacccagcagtacgatctggctgccgaaaatgctgagaaatggacatatgcgcttataattaatgtaagacgtgaacgcccgcggccttgactgtgatgacgaaggggaagctcgttgccttctgagcttcgcagcccggatcctggtttgtgaatgtaaaatcattacattatgacggcgcagagacggcgcagaggatatagaggggaaggaaaataaatggcaatgcggtatgacgcgcggcgcccagctcaaagatcggcatgaagcgggttcggcagctgcgatcaggatgagtgtcaacaccggtgaagctgaaagctgcgtcgacaagagaggagagaaacaaacggaacaaaaatctcccgtagtgcctttgatcccgttgtagttggacctgtgttcggggccatgctactggagaaaccgatggtttcagagtttggtccacctccagcgaagataaaagcaggtcaaatatcacaccaatgaagcgaggactctgatgatagctgaaatggtttcgaacgctgtcaaagagcgaacgtcccgcagattgattgcgagcattaggaccaagcccgttaagatagcggctggagttatgtccatctaatatgatacgagaattttgcagttgctgatacctcggtagccagggcgacgatgtaatagtatatgtacgagatgatcagggagtattcgaaggtcaggttactgactctggtgtctaggtaaggaatgatccctgcagtgggagcaacggcgcgagttcggaaatgctctgcaaaggagcacctgaacatagtaggagctaagctgttatgcagagacgtgagcagacccagcggattatcatttgtagtctgcgctgggaggttcgacttcctttctaccattgctacttgttggctcgcttggtgtcatcgctacccaagattctctatcaagatggttatctggctacggctaagattcagacagagcccaattcatgcagatgaggccctggtgagagctcgagaagcctgtagcaacgctatcatgtcgcaatgttgcctcgagggcgaggaagctagagcacggaggccgttcagagtgccatgttgagctttgctgagaatgttcacaaacctttgatctgatggtggacttgaaatgagggacacttagatgtgccaatcagatgtctaaatgtctgctgggggggagaatcaagttattataggtgaaatttatccttggatttgtgtaaggctgtgaaggacaggatggaacagcaacataaactaacatacccgaagtttgagcctgccgcctccaatatagagcgcgattgggggtagtttgacaaaatttttttatttagtagtagccatattcctagggagatacagtcaaacagagtacagggcaacggtcaggaggcgtcaatgtcgcacctattatctaaggtcttcattgtccatgttcatcattcattattaccaaatcaatattgatattggtgtatcacattaacatgatcatcaagagtcctagcaatatattgcccctctcgaatgcctatttcttcccaggcaattttagccattttgggatcttccgagccccagatttctcgccattttgtttgcctgaatcggttggttttaacggtaccgcaacatcttcggaagtgtccatgacatcgggaggttgctcgatcttgtgttcttgtgccctgctttgaagctcagtttttaagaggccggagcggctctgccgaatttcaagaggtacagatgcatcccaggaaaagttgattagaacacggccggtcatgccgtggttttttatgaggaggccgtcttcggaatcgggaagaacggtttggaaaggcacattggattggtgggattttggagcggccgggccggagaagtttgtgagggtgaatttctctgtggcatattgtgg

SEQ ID NO: 11904 - DNA, 918 bp, Emericella nidulans
ctagtcttctgtgaaatatggggttacggtatcagcatcctggggtttcaacatttcaaggtcctccattcttactcaacttttagcaatcgtgagtcagggctggcatgttttcgttgtccagatacatcctttctagcgggtcgccaacatggttgtaggttttccaacatcaatggccatatttatgcgtgcattatgtttcactgagtttctgtatctagatagtactcatggttccgataccatgtcagatatgctatatatacgtatcgaattgtcgtcgctcgcaacagcaagctcgaaatcctgtttatcggcacttgcctcgctttgttctgtgagaggacgccatgatagttctgtgatggcttttgacggtgactggtctctatcagggcttgccaaggggctaggttcgacgccgactactttgatctgatgaatagagagctttccatcatcctttcccgctgcaagggatagcatccctttgtaaatatgccggaaggaggactagggaagtgaccgaactccttgaaagaatggtagccttggcacttagctcagtcctttgtcagctgccacaacttgataaacttggttttacccacatttttataaatggggagttaataatgtgagacggggccccatccttattagattatgcctagtgcccttgggatgtccaatgattttatctggtcaatttgtttctttgctattaaccttcaagttatcccgctaacttattaatattttataatttaatatattttcattttaaatatttttagttatttcttttttgcttttattcttacacctacttatcttttttttcttgtcttttatgtttctttatatgttattatattgcctaggttttttactatactatggttttcatataca

SEQ ID NO: 11905 - DNA, 477 bp, Emericella nidulans
gggatcaaaacgcccaagactgtacgctatagcccgcgaaggatcctaaatccccaaggagcggatttaatacatgaccatcttgcaagactaccatcggccactgaacgacggcgtacgacaaggacctgaccgattattgacaggtgaacaccacctgcatggacttactgactactgagagcacatattggactagcctgctgatgatcagaatcgcctacaacctattctcccaaataggatgggcctgagcctgaccttctagctgatatgccgatgtcattaccccaggatccaacgtccaacacagagacttggccattcgaccagacttccaatgcctggcatgatcccagctcactatacaaccccagtagacgcgccaatgtcactactcatgccatgggagggaggaggccatgacagccatcagtagcgtggcccacaccgtatatggctgcaacaagattcaga

SEQ ID NO: 11906 - DNA, 2060 bp, Emericella nidulans
agcaatggcgatactcaagggcggcagtgacctcgtctgcataaaatcgtgcagcttcttcagaaatacattttccgggccgggttgggagagctatgagtacgaagtgacatcagcaagcacgtagcaccaagctcgcggcatgatcatacctcggaagaactccccgccgctgcagtattccatacaaaggtaaagatagtcctctgactggaaggagtgatataaggtaacaatgaagggatgattactggtggcgagaatttcttgttctgccaatgcacgtttgatcttgttccgcttaatcatctccttcttactgagaactacgcactgtcagtccagctcgctctcacaaggactgcataaacttacccttcatggcatataagcgtgtcgacttcttttccctaacaagataaactttgccgacatcgcctttgcggatgagcttgatcttgtcaaagctagcgggtccgacttccacatttcgtactttgatcgagttggagctgtatgttcgacggaaaccaccgctagaagttcgaacttgagtgacagcaggaagcttgccggagccaggttgcggaacggtaagatttccatcctggtctgtgtttgagctcacctcaaccagaccgacaggggagcctgcagctcccgagtgcaccagaggttccttacccagctctgcagtctggggtcggccatctgaatcggtagcagtaaacaagccctgggcgttcggagccgaagcgacacggcgtagtttccgagcgagttcctctttgttggctgtggtagcttgttccgccgctgaaacaccatcaacttgtaactctggggtgtctggaggcgaagagggtatcgagccgtcgttgcgatgctgcagggcgggctggccctggtggacgaaatacggatttgctgtcgcggtcggggagattgcttcgtctaatggatttccctcactggcaaccgtagcagagcgcttgcgaccgatcattgggagaaatcgcgactgccgaaaagtggatttaggctcatgtttgacaggggtcgaggaaccggtatcccggtcagagctgttgacgtggttgctggactgatgagaaattgtgctgcttgagctgttgatgcggaaaaagttcttaatctttgtcggtaaatgggttgaatcgttggggtgcttcttggtaggcatggataggcttggatgacctccacgtttctcgtttgccgcaggggacggactggaagcaaaaagctgcgtcatccccacaacactgcctaatcaagcccgagagatttgcgagtagagcactcgtgcctatccaagacggagatgagcggcaaaggatgaaggcgtgatatcaaagatagtttgattcggcgacgaggcctggaacgggtgaaggagcgcgggggaagggaggtggtattggcggcgtggaattaggaaatttggagaggcataaggaagggggcggtgaaataggaggagtcggagtcgatgaacgataagttgtatgcgataaagagggacggagagatcgtataaagagcgggggcgagatgaagcgattaaccgtgggatggtcaatccatcaagaacggcggattgactactgctcgactattgccgacgttaaatggagaggtggagttacaccaaactgggagattctcccacggggctgagtcaggaatggccaccattattaatgaacgcgagtcaaaagcagtcgactcactgcacaaccactttcattatttagagaatcgaattatgcgtaactatcaagtcagtactaaggatacaaaagttcttcgcggggccagatgttcattgtccatcttatcagttgtagactcattcaaccccttaacgccaacgcaaacagctccctccaatccccaaatgcgcatcgtggtctcgatgcggataagtttacccttgctcactccactccaaatcaaatcaattcgaagccatcgcgtgatcttcccgcgccatcaaaagaaggaaggaaagcatgggcggtgacattctgagaaat

SEQ ID NO: 11907 - DNA, 1772 bp, Emericella nidulans
tggctctatactgtccagcgtcgccttgggggaagaaatgaagctatccagacgaattccgctggtgatacggagatagatactgcgttcgctcgatgtaccaccccgtagatcaaccttgtgaagtctgggttatgtataaaatatcaggtttcagagtcagtcattcaagttaaacacaaggacccagtatcgtacctgtgtcaagctgttccagagtctggttgcaagaacggtcgagaggaggtggaatcaaacaatgcaaaccgtcttggaaagggcgggagatcatggcaaaacccggatggttcccttctaggtcggcttctcattcgactcctccaccttctccttcgtgttctgctgtacgacctcgtgtacgaccttctgcaagtgcttcatacggcgtcaactgacacctcgtctgacaccctgatccaattattgtcttaatcctagactgggcgtcatcggtgaccgacattttatggtcgaccgcgactcgtgccatcgtggcctcagagctacgacattgaggagtaggctaccagaaactgcctctagcggtctcatgacgggctgtggttagtcgagactgttcgttgctgacaaggaaagtatatcgtgctgttctgagaagcaatgtcccatatatgaaagactacgtcctcattcaatatagagaatgcacctgtcgagctatttaccctggactgcttactcacgaaccattgctggcctgtatgtttgccctcggtcagctaggcaacacgctacctgttaccaatatcacaatgtgattgcgctgcatcatctactccacggccaatgtgactggctattcaagcctgtaatcactagactatgatctcagctcgatttcctattgagcttgaccaaggctgtccgaaatggcggagcacagactattgggtccctgcgtggaccgatctgtacctgctccaagttcttcgttcttggacctaggtcttcaagctgacgacgtacctgccactctttaaacacgcttgatcgccccaaagtgctgagattcttgacttgccaatgtcctggtatccttcgcttgtgagaaaatggccaagctatccgtaattctgcttttccgcagccttttactttgcggtgcgctcacggtctcacggcatgctacgctagtgactgagcgagaagtccaatccagcaaatacgactttattgtggttggaggtggtgtatctgggctcaccgtggccgatcgtctgacagagattccagatggtaggaacggcatatcctcacccactgaacgacgctgagtctggcagtgagcgttctcgtcattgaagcaggaccggttgatcgtggtgaagattttgtctacgtgcccgggtcatacgagcgtgatccgtatatctggcctggcttaacgaatgaaccatccgcagagttgaacaatcgagtctttgactccgttgtcgctagggtggccggagtggcagcatagtgaatgcaatgatcttcctgagctaatcagataccaccaccgcaggggttcatctctaatcctaaccacagaggaactgcgttggcacttcgacggctgggaatcacttggaaatcatggatgggggtgggagggcatgttgccatacttcatcaaggtaatccagacacacagtgcttgaggcctagttttgacggccttgtttgctttagagtgagaactttaccaggccaaccccagaacttgcccacgaaggaaatattccctg

SEQ ID NO: 11908 - DNA, 556 bp, Emericella nidulans
ctttgatcggtcgattctgggctgcttctccgtgatctggagccgactgacgattatggtgcgtccaggatgaccggcggtgtcagggcttcttttagggccatgggcagacaataaaaaggtgcccccggcatctcccttcttcctccccttctttcttcttccctggtcatctctgcaatcagcccagctagccctagcatttcctccctcggtttcttgcagcatggccgacaagcccgagcccgagagcgcggctgcgccctgtctgtctcgaaggagatcaaagactcagcgcacgtcgagcgcgtcctctccgacagcgagggcatgcacaaagaccatgtcgatcagtcgcgtgtcgataaggagatcgccgcgtatgcaggctgaagaggtcgtcgaaatcgacgaggagacgaacaagcggctgcgacggatgattgacaagcgcgtgctggtcatcatgatctgcacgtacttcctgcaggcgctcgataagggaacatgtcgtctcgtcaattatgggcatcgagagtatcggatctggaggatg

SEQ ID NO: 11909 - DNA, 2929 bp, Emericella nidulans
gagatgaacgcaaaatcactgcgtaggaaaattggtgttgttgcccaggagcctgttctcttctctgggacaattgctgaaaatatctcttacggaagcccgcattcgacccgttctgagatcgtggcagcggcgaggaaagcgaactgtcaattcatcagcgactttgtgagttatctgatatcccgcctctacattactcttatactaacatgaccctagccggatggcgtcgatactcaagtgggaccacgcggggcgcagctttcgtggggggcaaaagcagcgaattgctattgctcgtgcccttattaaggaccccgatattctgattcttgacgaagcaacttccgccctcgacgcagaatcagagacattagtcaatagtgctcttgctgcacttcttcgcggaaacaacaccactatcagcattgcccacagactctctactataaagcggtccgactcgattgttgtcctcggtaatgacggaacggtcgccgaacaaggaacttacgaagaactaagcgcacgccctgatggtgccttcacaaaactcatggaatggcagctaagtggtggtgactccaagccaccagtcagcccttctctagatcctgagacggaagaaaagccttgggtagaacagcccgaggaatatggtgacgctgaagccaacgacaaagctgagcaacaacgataatcattatcgggagttggattaacgcctagtgactgctgttttttcctttcgttttctcttattcacagtttagactgtttgcttacctttgcgagctcgagcgcttgctgtgatgatatactttgtacatgacgcgtatttggagtgtacataggtttcacgggtttggacctaaacactcactgtaatcagtatgatagataatagatgaaaactcttctctatccgtaactcgttagtaagtagttagcctttgtcatattcttctcccatgagctgctagatgtagaacgtgacccaaaggttgtcttggcagcggctggcctcagtgctgcgttaccgttaacgtcactcaaacaacatcccacttgaaacttgagagcaccggtgtccaggccctaatcggcacttttgataatgggcctagctctgttacactcctaattacaattcgaattcacagtgacctggatttggctctgattggtataatatggaccgcttccgaagatggatcgctcctaccgcagattatgagcctatccaagagcctacagtctacggcgatgatctagatacacagcccagacaaacccagtccggtccacctttctcaaggcctgtatattgggtgttctttatattgggagtatcaatgttatgggcatggtacgtgttcgaatccgtcctctgtgtaggggatccctgcttaccatcagtctcaacataggaatatgtttgtcgctgtcgcaccgttctttcatcagcgattccaacaggatgaatgggcgatatctcactaccaatcatccatattgtctgtatcgaccgtcaccaacctgggttccgtcttcgtgctcgcaaagctacaggaatcagcgtcatatccgagacggattatcgtatcgttaatgatcaacattggtatatttacattgcttgctttctcgacgcttgtgctcaagaacgccccggtgttggtgtacttctggttcgtcatggtcatggtgtttggggctagcatggccacgggaatcaaccagaacggagtcttcgcgtacgtctcgggtttcgggagagaggaatatacccaagcaattatgagcggccaaggggtggcgggtgtattaccttgtctagctcagatgatgtccggccttgcagtttcagaacgtggaaagcagcaggcaccggaggcgtcctggaaatcagccttcggatgctttataaccgcaacagtcgtctcatgtctgacactggtctcatttgtctggctcacaaagcgacaatccctgcacatcatagacgacgaatctggatcgacaaacaccgacgaccaaacaccaatgaaaacagtgagcctaaggactctcttctcgaagctgcgcctctccgccatctcaatttatctctgcttcgtaataacaatgatttttcccgtttatacttccaaaatcgagtccgtcaacgacggctcatcctcttcgcgcctctttcacccggccgccttcatccctctagcattcttcttctggaacgcaggcgacctactcggcagaacgctagtaatcaagccccgctactcactagctcatcgtccctgggctctctttatactcgccatcgctcgatctggcttcattccactctacctgctctgcaatgtcagcggtcggggagccatagtctcaagcgatttcttctacctcttcattgttcaaggtctgtttggcataacgaatgggtatttgtcgagttgctgcatgatgggagccggttacttcgtctcggcagaagaacgtgaacctgctggcgggtttatgagtctcatgcttgttgccggtctggcaacaggcagcttgttgagtttccttgcttctggaacgtagtaacaattatccacaattcgtcgttgtttgcatttatgggatatcaggcgctaggtagtcggcctttacgatataacgtttctaccgttgtgcatcatagaacgttctacggttttgttttgctttttttgacttatttttttgttcagtagctgttggaatatatagactgggcataaattcagtgctaacacctagaaatatattcatgcaatccccaaaatgtacgccaacaccatgccaaccgctaaccggctatataatgccatgcaacgcacaatgactgcagccacacagggcagaagaaaagcagaagaacctctagtatactatacta

SEQ ID NO: 11910 - DNA, 550 bp, Emericella nidulans
atagactatatggatgcaagctctctgcctgctcaagagcaaggaataaggtgatcacgatgttgtagcctcgcagatggttatactgggcttcatctgcagtaatctctcactccttagcagagtgtaaattcagtagtatctattaggtgacctgaacagaaagcgccagatgtgcattgtacgcttatcctgaatcatcaactgcggtcgtacaatacacaatctctcccctcaaccctaacgtgatgctgcccagtctcaaaacataatcaagcaacgactccttctgttttcgacacctctccccggtaagaaaaagcccatcagtccttccaccactccacagtgagatggagctctggacagaagacttgtgcggatggagggcaactttcgcctggtcagtgaatcggtcgacgaggagccaccggcaaagttcaaggtaagcttcctctatggccagagagacgacggatatccacgcattgcaatgaatactgcagtatacgaggcttgctgccgctcgcacgctgaatttcatgatatt

SEQ ID NO: 11911 - DNA, 250 bp, Emericella nidulans
  unsure (1)..(250): unsure at all n locations
cgagactataaangggtcttgggctaggctccgtgtgcgcctagagctgatggaggtatcaagtacattttcttatcagactcagtctgatatatgtggtactgggtggcacgatagacatcattcgtcttggcgagacaccctcattgcgtggatgagggaaggctcacttaatggcaagcagtgagatgatagacctgcctgtcaggcatgacgtctactgtctgctcttctctttgcacgtaggctc

SEQ ID NO: 11912 - DNA, 213 bp, Emericella nidulans
gacgacggcaggctcgtccgttggatgggagtcggcggttctatggtgcacgggtccgcagaccgcacgtgcgccggaacatgccgcgccagtatagtccgtttgctgacgcagtctatggagtactggtcttcggtaggatccggctccgtgtatcctgaatcgttcggttggttatggactgcactctgcgtcgcgctcgaagagccggtc

SEQ ID NO: 11913 - DNA, 2097 bp, Emericella nidulans
gtttcacagcgtaccctatcgtcttccgccaaatccgtggctggtctcttggcctgtctggctggccttctgcggcattggggttggctgcttgatcatgatcgcctgcgaacccttagtccgccgcatgatcaacagccacaagcacgacccagaaactggcaaagtaccgccggaggccatggtctcaatcgtctgtatctctgcgatcttgatcccgaccggggagctctggtttgcgtggacctgctcccctgcatctatcccctggattgtgcccatcctagctggtgtgtttttcggctgcggaaacgctggtgtttttatctacgcctcaaactatctaacggacagctatggtgtgtatgctgcctctgcgctagcgggaaactcggtgatgcgcagtatcctgggaggcgttatgccgcttgtaggcacttacctgtatgatgggctaggtccaaactgggctgggacgctgttgggcttgcttgaggtggccattatcccaataccgtttgtgttctacaagtatggatataagattcggatgaagagtgcgctcattactcggatgcaggaggataagaagaagttggagaggaagcggaagcgcttggaacagcggttggcagctgctgttgcggaggaaagagagaagacggaggtctgatgcaatcattgcagctcatctaaaggtcgaaatgcgaaagtcgacagattcaggatctcaaaagtcattttgcacggatggagtttgataccattgtttatcggatctcggcaggttggaaatactctataagtagcgcacaggtattatctagagcttaatggataatgacatatacatgaacatcagactcaggttcattcactcacgtgccctcatcctctcaaccagcaataaatcacagagtatccgctcatactcacccagatcgaccgctccggccggaaagataaccacggcatcaacatacacagagtctgacggttctcccttcaggctctgtacaggctctctgcgcacataaccaatgacattgacccacgcgcccacacacagctcctcccacgtcaccgtctccaagacagcattgacgtccacagataccgatggaggatcctgctttggctgcttcggcttcttggcccgggggtaattatgttcaaggactaagcggccagttgaaatgttgtatgttttaacgctgagtcgccgagtgtaaaattagcataatagctttcatatgctctcttctcatgtagatcatgttccgttggtggttgtttgcttgatctggtgtggtatctaggcaacggctacgcaccaaccaagaaagcggactttggagtcagccggcagggagagaatatctgccaggaacgcccttgtggaaggagagggcccgttcattctgtggaaggaacataatatagttgcttcttagacttgatatctgaaggaatataacggaagagatcatctggtttgatggtactgtataagcgggagcacgtgattatttccctccgataggccagtggcgtatgtcataaggaagactgacgcctggaggggaaaacacctccctcgcccgagttccatcttatcactttcacgctcgatctctccaagtttctggcttcattgactgagtcgctcgccttgcctagtgggtagatttagatctagtcgcaaatcacttgcctacattctcgaacctgtttgttcagccttgcggttcccctcactacttatctcttcttaccttctaccgtttcgaagacacttcctcctgcggcgagactagtatctatcgcctgtcgcccactttcaccaccgtgtttcactaggagaatagtgaaagactcaagtcgtctaccaaaaatgtggtcatggttcggtggtgcggccgcgcagaagcgcaaggaagcgccgaagaacgcaatcctccagcttcgaagccaccttgacatgctacagaagcgagaaaagcacctagaaaaccaaatgaacgaacaagaggccatcgctaaaaagaacgtgaccacgaataagaacggtgtgtatattatgggacctttatacaa

SEQ ID NO: 11914 - DNA, 138 bp, Emericella nidulans
actgcctggagtcatgtctgtagctgggctagcagtcttatcggcgtctggctccaattcgtgcctgctggtcttgccggggttagccgattcttgtgagtatactgggcacagtttctccggcggggggccgtgggc

SEQ ID NO: 11915 - DNA, 2727 bp, Emericella nidulans
ttctactgagactcttcccacccaaacgaatagatttccaccctaggaaccctccgcaggggcagcagaattccggtgcttgctgcatctgcatttcgaagctgtcgagcttagagcggtccttgtgaaaacggtcgagatgtgtatcaacgaacgattgcgcaatccctatacgtcatggtcagagttcctgccgagccaccggaaattgacctacacctgacattgtcgctgcgcttccaagtaggtcaaggcggaggggaattcgtaccgtcagtgtcttctttgattgaaccgaacgactcgcgacggctgctggccttggatccgtctcggttgggcgatgagcaggacgagttgcgagaggagttgcgagattgagcggtaggagacgagtttctcggagggccagttgaaaaagaggccttgtgggcagaaatggtcggagaggttgttgcggcagacatggtggagagctctggagccgtgggctcgactttgtatataagcggaaagcccgcccactctcaaaagggcaagtcgcgaatgaagcacgagcaagtgccagcaacgcaaaaaagaaaaaatgaataatatggagccttcagcacaggggttgaaaaagctttttcttccccagattcccaccgaagtggtttttgtggcagactgacagttgcggttggctagacgggccaagccagcgcggcgtgaggagaagagcaaagctgttagtcacagaatcggaccagctggaacaagctctttccgagtggatgctctggatgcgctatgatcgagccttgaaagcaatgggatccgagctccaaagagggacagacggttgtgaccgagaagaaattcaaagaatgtcagagactggccagggaagaacagggaagcgcggaaggcggacgcgaggagacggtggtggaagtgtaacaaggccggtggtggtgaggtttctatgaagtaagtgaaatgccctagtggaaaacgatgacagacgttagaaatagcttttattatagagccatggaataagtggaaatggctcctgctgatttataagttgacagcggaaagttctttcaaggttgatggaggcgaaagctctgagcactaagaaaattctccagcgagtggcactgtttattctgactcaaagcccgggttcgagctcgagtacctggtcgcattcagatctttactcctaatttactcctgatttactcctaatttactcctataatagatgccgattgcccgactgtccaacgcattacatggtggcactttctgtacaccgtagtactgggtatagttcattgacaagcccaagcatcaagactagcgcaattgctcgcagccgtgattcgattgcggtcgcagggcgagactttgcttttttcggaattattctatttgatccctcatcaacggcttcattattcgctgcgtcgctctctcctcttcagtcagatgattttcaatagtcctcatcgctagaccgatcctctgctgacacctggactcatgaactggctacagagagattggagcatgacctggtcttccaagactctctgatgcttggatcgtctgcgtgcattctatgacataatggaaaaccgcctccgcaggccccgtgactgaaagctgccagagcagctcgcttggcgtcggtgctccgatacagctcggtaacggaacaggcctcctggaaccagattccgcaagtcttgccagcaactgctttctagtgatggttgtgaacccttaaccataatagcccccatatcgaatgtattcatcaatctcattagtctcatcagaccctctagtctcattagtcatgatctcaacggcctctctcggtcacatcaattgcaggctatccacgtccaaagcctcgttgctgactttgtcaatacagacgtgtaccggcagtacagctgtaccagaggcgcaaatcccttagctaacggttactacgctcccgcccgccatttgctgagcgggggtcccgtgaccttggggaggagctgaatggctggtctgcctcctcgtcatcgcccgccgtctttccctccaatgcaaggttccagcatcggatccgtctcattgaccttccccggaatgcatgatcagcgtccctgtcgttttctccagcgcacatggaacaggctttctatctgactgggtctagatcttccagaaacaccgacgaccgctcgcatccgactcggcattggcgccgggggtccctccgtcagcaataattcgacgtcacaggagacggtgaatacgtccttctccgtggaaaacagtcggggtatggatagccaagtggtaaacgagctagctgttcatgcgccaaggaagatcaccccagcttcttaatttggcgcgtatctcaccactagttggtaccatggtgtcctcagtacgccagcacattggcctgagtccccggacaaccacggacatctcccgttctcttggagcatgccattccgcccagctaatattcaataatttgggcgcagacacgctatcacattttccgcttattggcttgaattgaatctttgtctctcgtggcacctcatctcagaacagacgatttaacgccatccgtgtcggaagtgacccattcatcacgccatactattctcccacggcgcaaagttggtatggggtagcggataatgcggatcttgatgc

SEQ ID NO: 11916 - DNA, 147 bp, Emericella nidulans
cgccagtacggcaacctgactatcgtcagtgacgcgagtcggtcggagatccggcgcttacagacgtagagtgcggtatccgagtccagtctgctgttatgccactcctcgtgcatgccccatgacgccttcatctcggtttccctc

SEQ ID NO: 11917 - DNA, 1465 bp, Emericella nidulans
tattcttaaatggcactcccgataaccgaccctcgccattgcgcggtggccaccatctctgctcttggccgaatgtgctcgggtatatcgattgatggcacgtgcctcctgggctgcgccgcctaacacgagtaaacgtataaaacctctgcggaccacttcctctccctttctagaaagtcgtgcgtgggcagacgtctatgaagggtttccaaatacagagattatcgatgtacaaatacaggatgagaacgcgactgtgacttttcggcatccagatgggatcaccgtttcccggtcagtgcgcggaatggtgtatgcgaccggccgacgaggcaccctcagttacatagaccagagccttttgcgtgaaattcttggttctgacgacaatgctgaggtaaaccctacaatatctggacaaaccttgcgaggcaaggctgtcgagaacgtagaaatttcgaaagacgttttcatcattggcagtttgacaggcgactcgctcattcgatttgcatacggaagttgtgtgcaggcagctgggaaactaatcgacgggtttactggtagtgacacgcccaaaacaagttcaacttctgtttcaagaaacgacttgaatataggcgtaatgcgtggcattgacgggcacgatgtctatctcaagaatggccacttttgcttagaccaggacaagcacgcagttaacccatcaagatctgcaaaggatgcgtcaaaagggatatgggcttggctgactagaatcttgggatggccaggggtgcattaaacgggctgaagcgcatgttatgtttcacgttgtatagatatatgctaaacctagagtctatttcattgtattgttcacattctcattcggcagttcaataggtttcaatgatatacatagcgattgctccggaaatctgggtaaatatgcgctctccgagtgtctgtattcgcgctcagcccataatttgcagctgatcgtctgggggccagcgagtctgagcaaagctaagacaacgtttgatactctgtagatatttacgagtactctcgtcacttaagatatgcgcttgcttgtccccctgatgtagtttctctcgcgctgaacgttcgtgaataccaaccatggtaactccaataggccatgctctgtggactgttagacataatatgggaataaaagaggaacgagcaggacgtacgcttttccaatactcagccgcaggtaagcatcgttagcatcaacatatcttcgctgctgggctttgcttattatctccactatatgctgtagcacgttatcgtcgatatcacccttctcaaattttcggatgagaggcgtcatattctcccgcgactgcaccatcgcattgtacgcttgccgtccatgtaaactctgctttaccgtgacatctcgtttcgcaagggcaaactcccactcagacagcaccatgttaac

SEQ ID NO: 11918 - DNA, 113 bp, Emericella nidulans
caacaagattctcatcagtttcgtcgattacgagtatttatattcatgtgtagccgctgactagatcagtacattcacaagcttgcacatctctagcagctttgaatggctat

SEQ ID NO: 11919 - DNA, 134 bp, Emericella nidulans
cgccactgctcctctatccgacgctcacagtcttctgcgtctcggttatcaaccatcactcattcgctcacgcgtcgaccggatcgtcgctttgtactcgctcaaccgtgtccttagtagattcgtcccttgtg

SEQ ID NO: 11920 - DNA, 271 bp, Emericella nidulans
aaaaggaatcggctgcagctctaccatcagagcccaggatataagcttggcagggattttttttacgagaggcggaactataatcatgccctcgaggtgtctgcacgtgtctcgatgtagctgccctatacttaccccgttcaagctgcggtgcctaccaagtcggcccataccattcggtaaggttcggtcataaccgtccccccgtgaagggcaggccatctctgtatatgtgaatcgccctgaactttctcgccatcttgggcgggca

SEQ ID NO: 11921 - DNA, 210 bp, Emericella nidulans
gggctggttatggggtaggggattgtggctttacggctcggatctgggtactgtcgacgcagcgagtccgtgctggttacagtgagttctgaagtgaccgtggctaacttcacgccaggagatgagcccgaacagtccgcgagacaactggtagagccattgcaaaaggagaaacttgggttagcgtagtaagtgcttgtccctcctgaa

SEQ ID NO: 11922 - DNA, 120 bp, Emericella nidulans
tcaaccacagagactgcgaacgaacagcgaccgcaacgacaaccccgacgacaccaaggacaccccgaagagcaaccccgagatcagaagcagcaagacaagcctcgacgactacaaggc

SEQ ID NO: 11923 - DNA, 163 bp, Emericella nidulans
gatgcaagtgtgcgatccttatttaggcgtactggacctcactagctttgctcctttgtaacggtgcttggtacagtggacatgttgatgatccggattgtgttcaaccctcgccgctacgggatgtatgcccggcgtacgaacctcgcccagtatattgtga

SEQ ID NO: 11924 - DNA, 481 bp, Emericella nidulans
gctcgcggcccttggccgcggcggagacgctcactctgaggctcgtatccttggccgggctgacagaatcgttcttgttcaggtagagctgcgaaatctttccctggacgcaggctggctcatacgccagtgtgatggcttatgatccgtgagcctgattcgagccggaagtagttcactgatgggaattgactaccgatccacgacaggtctgactccggtgacttactgatactgacgtgtggcatgctaccctacctcatcaccacgcatctaccgggtggagcagacttgacctcactaacacttctaactggaatttgataggctgctatatcatgagcaagtggcttatatatgctgacgagacgcggtcctttgacattacaacaggacgagctcaaccccaagtgctgaaggttagctaggagttaggtgagaggaatttgcttttacttagtatgcatcacagaatactacc

SEQ ID NO: 11925 - DNA, 121 bp, Emericella nidulans
gacggggaaccatgtccataaaatacagcccagacacgaatttagaacactagagccaggagtgaaagggtgctgaagagctacaggacctcagccgaaagggcaatagacctgataaagc

SEQ ID NO: 11926 - DNA, 1532 bp, Emericella nidulans
tggcgcctgctgcggcatgttgttgccagtggtactggcgctgcgcaatggcatgttgcaccatctggtttgacatgccctctttcatcatcctcttctcttgctctcgagcatcaattgctccaactaagcccattgggttgacaggaggtggcgttttttgcttatcactggataggttgaagaacgaggagccagtcacacgagccacatgctcttgctctcgcgcggaaagatgggatgagacatcgttatagttgaacatgctgctggcaccacgcgatttaggtcgagccatactcatttgcgactgtgacctcgtgtgcgccgtccagtcaccagacacgggccgcggggctgttattgttgttgtagaggtagagggcgatcgacgatggacatggatgggcgggctaggagccgcccgttgttgcacgaattgctctggcgtgagaccgccaccgggagttactgggcgcggagcagttggttgccataacacactccgtcggtgctcatctcggctcggtgacctagaatggttacgatcgttctgacgggcaggcagagaaaacctttgtctctctgtggcgtcggagccggttctgtggtgctcaaacttcttcaacgtgtccgacgtattcggacggcccgtggtgggtaggtaagtcaaagttggcccaaagtcgatcgcgggaatatccgaattatgctctggcttgctttccacagtgtaacgcgcgtcgccgatgaccaggtcctttggttcaggctcagatcccacggtcttcttgactcccatccgcttggggatggactttactgagtccttgctatatagagaacctttggtgctagcatagtctggcgacgccgtggagacatcgtcatcgtagacactttcctcttcttgaggtgttgacttcgttggtacagaatatgctgcggtgtattttggtgggtcgacgagaccgatcaggttcatggcatcctcatcaacagtatggcggagatcatcgaagcttggctcgccggtagagctctgcgggctgactagtggtgacggggcccgattgagtggctttcgtttgacagccttttcagtgtcaacggtgatggcctgagtgctcagtcggtgtgccttgagaaccgatgatgagttgctgttgccgaaatcatgctcaggtacgggagggccctgctcgtgtgctgcggttggttggttagcagcaaaggctgcagcaaaatgtgaagcatcagaagccccatgcgatgagcttgacggtgcaggactgttatttccagtgtaatcgctgctacccgctgacgtaggtctatgaccaaaattcataccgccagatgcagagaccaattgcgcgagggttgcgtcggacatacggacattggctctccgagcgtcaaaaaaccgctccggtcgggtaggaggtctcgagatagagtaatgggtgagggtggagtggaggcgcaacgtctggaggcagttcttgcatttgctttccatcaaataggag

SEQ ID NO: 11927 - DNA, 266 bp, Emericella nidulans
agggtcaatgatcgtaggctgcgctcagtagcttacttttcgtgatgatcgccgaatcgggaaggcctgaaatgatcttagattcggatacgagggagagcgcaataagagtgttgtggaacgggtgctagtcgacaggaagttgatgttgtataggctatcagtggagttgagactattcgtgcaatgccttcagctatctactgcttctcgagggtattgagtaggctatgagaaaggcctggatgacacgtctctacagggag

SEQ ID NO: 11928 - DNA, 1669 bp, Emericella nidulans
aattccgtccgcagacgacggcaggctcgtcagttcggcgggaatcagcgactcaatggggaacgagtccggagactgcacatccagcccagcaatacgtgcaagaatagtcagtttgcgggcgacgtccatgccgttcaagtcatcgcgaggatcaggctctgtgtatcctaattccttcgcctggctaacgacttcactccacttcgcgctcgaagatccggacgccggcgcgaaagtgttgaacaagaacgagagcgttcctgagaaaactccctcaatgcgcgtgacttcgtcaccggtgttgacgagatccttcaacgtcgaaataaccggcagaccggcaccaactgtactctcatggtaaacaagcgccttcccttcagcagccgcagcgaagatctctttccacaagctcaagtccgaggagaatcccttcttgtttggcgtgacgacactgatacccttgcgcagaaataccggatagttggatgccagggcgggatcgctggtgttgtcgacaagaatagagcgaccgggggcagaggcaaggtacgtggcaatctcatctggggtcaatgcgccggatttggtaagagagggagtttcgacggcggtcttccattccgcggcggggatggtgggggagtaagagggggtaggcgagaggagggtttggctggaacgggcgaggaggatcagttttggggcgtttgggaggcgtgccagttggttgagaaaagcggttcctacgccgccgacacctgggggctgtcagttaggaaggtatgaagttaagaagttattttgggggcggcttgagtttgaacgtaggcggggtaggcataaaggaaagataaaaggtggcttaccgatgacaccgaggtaaatgggggcagacatattgctgatttgtatggctactcttagtcaattcgaattgcacgaatctgcgttgaacgggtcagagatatagaggggatgtacgaagtactagaaactatgactccgatcaccggacaggatcccctccaccgtggggtacttaatagcttagtcagcgcccgatcaattgagaccgcaatgcgagttcgcggtccagttgcagtattccaggaacccgaatttgaagtaatcgtcctaccgactaccgacatcgagcaacatgtcaaatccctcactctacggtcataaaccttcaaaacaacaatccgcctcaacagcaccctcctcctcaacccttgctttcacaacaacgctctcttcccttatcgcctcgggctcaaacgaacgcagtcacgggcatgggcggccccgaccctccaaaactgttaaatcagacctcttttcgcggcccaacaaaggcgctcagaagcgcgccgcggctgatctccgcgatgacgatgacacagctgttcggcagatccatcagtcctcgaaggacattgggtccgtcgatgaggcgacactacaccgctcaaaaagaaggatggaggagaaggcgaggcaatacgaggatttgaagaaaggccttcatcttgcagcgggaagtgatagcgaggacgaagtgacaacaggacaaggagatgcgtatttttcgcggttgcaagaaaggaaaaggagggattggttgattttgatcggaaatgggctgatgagcaggataaga

SEQ ID NO: 11929 - DNA, 341 bp, Emericella nidulans
acactagccctaatagatctgtggcggtgctcgccgagaacgaggccaacgagctcgagaagctgtggcgcttgtttgaggggcaccaccggttgccaattcaatacatcttcaaccttgcgaggctcggcgtcaagggccatcctgagccttgctgggatggattctacgatgccgtagcagacctggatctcctcccaaactgccttgatgacccggactaccagagacggcggtagtttatggtcaggtcggtgcggaccatgacgtgcccgtgagtggaggatcagcaacaacagtgcaggggtaaaagagaaaaagtgatactggactgttaatgt

SEQ ID NO: 11930 - DNA, 741 bp, Emericella nidulans
  unsure (1)..(741): unsure at all n locations
ccccagacaagtatcacaggacatcccacatctataacaccataacaaacaaatggcgaaagttaaactgaactcctcaccccattcccnnaccaggggggtagagacccaagaccaccatgagcgagaccgacaccgggtgcagcacgcacgacgcgctgggactcaacgcctatggcattttcccacagcccctgaaggggatgccgctgggagccaagcacacgagtcaaccgcgcccagccaaaacagcaacgaccggggcacaacaccggatagcaccagaacgggcccacacacggacaacagcacgggggcctgggaaacccacgcacgcgacaaagctgcgaacgccgtcaacagacaggaccagcatcacccgaggaaccgtggaggcgcggacgaccagctcaaggaggccgaccactgagccaacaccatcctggccaaaaaggaaaaaaagccgccgacgaccaccgacaacgcaagcaacgggaaacacaggcaccgacgggcagaaccacggcggaccccaacgaatagagaacggataccgcgtcttgcccaaaggcaacggccccgataaccggctacgagaaccgcagagagccgcgagagcaccaccaacaagacacagccccgtgcggacccccagaggagaacagggcctgcaaaaaaaccgaaaaacacacaggatcggaccggaccaaggaacgacaacacccagacagcaggggaaaa

SEQ ID NO: 11931 - DNA, 1853 bp, Emericella nidulans
tacgaagctcgatacaagatagcttcatgactaataaccgtaacggcaggtcattgtgtccgaattcaacaggctagaggggagcagatactttgatgtggaaagccagacgtcctttgaagtcgaccacattacgcaagtgaggatcgccggtattgcggggttgggtcggagtgctgacattgtattgtggcggacagagcacttccgcggcgcagtcatatgttttggaatcacagaatgcggatttgatgtaagtggctgagaggaacctttgcagccatatgctgatggtttttagcaaatcgctcctcaaaacactgggagcacatgctagggaacactacccttcgtcctcgtacggcgtatacccgatcgaaaaagattcggctattgctattttactggtcgcgaaccgttactctcccaacaacttctggtaagtcagcattagggagacagaagctttcggctcagcctctgacattttggatgttggctcccaggaacggccggtaccgctctatctaccagttccctgtgggtgactccaccacgataacgggcaagatccacgtcgacgtgcattactatgaagacggaaacgtcgccctgaacacaactaagccgctgaacatttctgtaccgaacgccagcgccgagagcattatttcgcgcattgcgtctgccgagcgtaactaccaggaagagctcaacaaggcctttggtcagatggcggagggtgccttcaaatccctgcgaagacagcttcccatcacgaggcagaaggtcgagtgggagaaggttggtgggtaccggcttggacaggatatctctggtggaaaggggcggtaggctggacctcagtggtttttctctgtgatcactcttgatctattgcaacgaaaacctccttctcgccagccaatacatcactcgcttgaggacttgtcatcttacgggctgtgattgactacatcgaagctgataaatgcatattatatcagccatgatttaaactgatcccttaatactcttccctctccgtcatctctttgccttccaacacaagttaccttgtcatatccggaaccttctatgtctgcctaggaggctgatacccacaaggaaacttgtctcttaatcagaatagagggtctaaacgtcccaacacacatataggcgccttttaacgacggcaacaacagccctactaaccagggagtccagtagtatgctccaggaaactgcaaagatctaaggagtgaatgaaaccttcaggaggatgaacaactggagtgtcctaggtacgagttccaacaatgttggattccagtttattcacaatacaacgcttattgcgttgaatcacggctgttttagcttgactctaaacttgactaccatatattcccacacacagttccttgttctctgggaccatggtgacatccgcttctgacatccagcccagagagaacgtggctctgactgtacgtaaaactcttattgcctaggattagaatcttgagtcataataatgagtgcctgcttctgctgatggactctgtgctcaaggtcagacatatcaacttgatctgttgcgtaggccagagagctgaatctccccacgtataccgagaaaccctcccctccggtatcctgaccagactcgatgttagatgtgctctcaaactttgcatggtctgtcaaaacgttgaggatgtatcctttgtttaagaggtatcgaacatctcttggacgcgaacgtaccaacagcaacaaagcaagggcagcatacaggctcgcaattgtaggtgggacagacattggtcgtaaaggtaacgctatag

SEQ ID NO: 11932 - DNA, 139 bp, Emericella nidulans
  unsure (1)..(139): unsure at all n locations
ttgcatctgatgtgcantcctgtcccctgnattcgttgtatntctcagacctgagagccgattctgtttctcgantgtgccctgcagtccgctacgcttgatttgcacagacttgctattacngacgctctccctcctt

SEQ ID NO: 11933 - DNA, 646 bp, Emericella nidulans
accaatcagaaaaagacgctgacgacgcgaccggactgccgaacactcgacctgtcggggactgttatcgtaccggcctcgaccccagaaggaagggggcatccgccgcaccctaacgaggcgaaagcacaaggcaggcaaaggaacccgactcccgacagacaaagtgcaggaagcgaccagatggggaataagaaaccgaacgggcaagatagctaaagctggtgggcaacaaggcttgcgggtacggatgtcagaaggtactaggaataccgccaatgctggctgggataaaggaccgaaaccggaaaagaaggattgcgaagcaaaagcacacggattagaaaatacggagggaaagaccggagacgctaccatctcgcaggggagtacagtaaaccccacaatggggcgacataacataaaacaactggcctctctgcaaaggttatagatccgaaagtcttagggtggcagtggcactgacacagaacggaccgcaaacgccattagagaaacccaagataactgctgccaggttgtccccaaaaggcccccaaatcaggcatccccaacattagaagggggccaccctggtaaaggacccaaaaacattcggaaaatcaccacaacaaagcatggcaac

SEQ ID NO: 11934 - DNA, 1380 bp, Emericella nidulans
cttgttgcaacggcgtggaaactccgtcgtccatgggcgtcacttgagaaggacttgctccaacttgagcctggaaagaaccggctttgttgtcgcgcttttggcgggcgtcgatggaaaccagatagttcaccagctgatgaataacgttctcatggttgacgaccgtcttctggaccctcaacacctcttgcagcatcagctgatggtcaacggacatctgggcgtagcgatcagatatatgttggatctgctgttgctgcgcaacaatctgctggttcagtaggtcaatctgttgagtgggaacagagtcgtcatgagcctgcgcctgcttccgcggtgcaggtgccttgcgtcggatgttgtcaagggactctttactgttcgctcgaaactcagggtgcttgaattcccaagcctagaaggattatttcggtcaggaatgcaagatcagcaacagcgccctgaggataaactcacattttgtccgtacggcgactgtccattctcctcattgttctgccttactttgtgaaagtcgtatttattcagttgtcgtacgaaactggcaaagttgctgtgtttgaaatgtttcggaagaattgttttggtgaatttctcgcactgcaggcttgtcagcgaacgacattaaaatcgagtccggtaattggaatggcttacctctaaaacgacgaaactatcaccatcatcaccccaccgcacaatctccgcgtacgacgggtcctccagcatccttgtgcgacaacatcagtcaaaaaaagatccgagaatagaatgaagctttttgcgatcaagatggtaggaaactcccgcgaaaaatatgcggaatcaagggaaaaagcggcgaccaggggaaatatctgcctaaaaataccaggggaggaaaaagaaaggagacggctcacttgtagagtttgcgaacctatacattcgattagcattttgtgatacaacaaaatgtctgatgaagccgtaatccgccaaaacacgatcaggacgtcaatactcacaaaatcgctggagttgcccgaaggggcggcgctggtggtggtctggccaccgtccatcatgggctagatgggtcgcgaccgatcgaacgagcaacagacttcagcactatgcagaacgtcgaaaattagagggagctggtcgaggcaaagtctgcaaactcctgtatgggttgcaggaagagatcctaagtaaaaagaaagatgggtaaggatggaggagaagagaaaaaaagacgcactgcccaagacggtcgcaagagggcagaaagaggagagggaggagttgtcggttgtagtagtttggtgggacgggcgcaactggagagtgaacagtcagagggcgttgaat

SEQ ID NO: 11935 - DNA, 123 bp, Emericella nidulans
aattgtcagggatcttcaggttaagggatggagcactcatgaaagagtcagcacgtgcgcacttaattgtcaccggcaatgaagtcagtacggaccaaatttgcatgaatttgtttgcgcaca

SEQ ID NO: 11936 - DNA, 2148 bp, Emericella nidulans
agagttaatgcagaaaagaggttggcaaaatcttccggagcaagccaggcggcaaatgatggcatacccagcgtccaagaagtggacattggtccatcaagatcgattgactgaattgcaaggggagcagaaacggaaacaaaaagctcgagagacgcatggatatgatggtccgtccggaattctcgaaagagcggatgaggaaggcagtccggagtggtatgtcaagaaggttatggacgacacaatcacctccaaacagctagctagtttgagtgtcagtctacgaacgcaaccgatcagctgggtgaaagccttcgtcgaggcgcaaggtcaaatcgccttgaccaacgtactcgtaaaaatcaaccgcaagaaggttacgggcccggtccctgcacctccatctggtgacaaggatttggaccgtgaatacgatatagtcaaatgtttgaaagcgttgatgaataacaaatatggtgccgacgacgctctcgctcatcaacagattattgtggccctcatcagctcattgctctctccccggttaaataccagaaagctcgtcagtgaagtccttacatttctttgccattgggccgaagggcaaggccacgagagggttctgcaggctatggatcatgtcaaaaatcatcagggcgaaactggacgcttcgatgcttggatgcgcattgttgaggtaacgattgatggtcgtggcaagatgggcagcttggtcggagcgagcgaggagtaccgcagtggtggaattggcatggagaaccttcttatggagtatgcggtttctaccatgatcctcattaacatgttggtggatgcacccgagaatgacctgcagttacgatgtcatatccgagcgcagttcatatcttgtggcatcaaacgacttttgtcgaagatggaaggctttcagtatgaagttattgataaacagattgagcattttcgagagaatgaggccattgattacgaagatttactgcaacgcgagagtagcagtacgaaggatagtattgagggggaggttaaggacatgaccgaccctcttcagatcactgacgccatcgcgagtcgcctcaatggaacgagagcccacgattacttcctttcagctctgcagcatctgcttctcatccgggagaattctggggaggatggtctcagaatgtaccagctcgtggacgctatgctaagctatgtggctatggataggaggctaccggatcttgacctgcggcagggattgacattcactgtacagagcttgttagatcgactacatacggatgcagaagcgagacgagcgtacgacgaatctctggaagcgcgccaaatcgcagaagccgcacttgctgaacgagatgagatgaaggcgcaggttgagttaggcgcggatggcctggtgagaaagttacagaagcagattgaggagcagaccggtataattgagctacagagcaggcagaatgagatgctcaaggccgagcttgccgatgttcagaggcttcgtgctcaagagttgcagcggaatgagctggagacgcgagaactctaccttatgcttcgcgacgctcaagatattgcggcatcaaatgcgaaaaagtcgaacatgggagaggccgagacggatcccgctcatatgcgagggatcctagatagagagaagctgttgacacggctagagaagcagcttgaaaggacaaagacgcaattcaagttggaaggtaaagtttggggccagcatgacccatcggaccgactgcgtgagctccgtgagcaaatggacggcgatgctgggcccagagaagccttcgaagagcaagcccgcctgaacctcagcctgaacccagtaggatcggtttaccgcaagaaaacctacatccagggcatggaggatactgccaccgaggagctaggccaaactgatgatgaagtcgtctacgctaaggcccgacttgtggatcttcatcggccgcgtatggacccggaacaagcaactggccttcttggtgagattgctgccaaggtttcaaagatcgatgcggatgatgcgaaggatgagggcaaaccaactgaatctgaacagccagcagaaggtgcagccaccaaaggcgatgacaaggagtg

SEQ ID NO: 11937 - DNA, 559 bp, Emericella nidulans
cgcaaactgctccctgcggggcagacaccggaggatatggacgctgctccggacatgctaactacacccttttgaactacgctatggagcacgctgatgacgcggttaccgccgactgtaagcattgtatgggatacgagtgtacttactcacgggcagctctgggctggggatgaaaagacttatgacataccatgtcgagagagctatcatgatcgacactctgaacggaggggatcaaaatatgtgcctgcatggtttgatagatcgcccgctgaataacttccttgacgaggaaactaactgactaggataacaagagacctgggcattggatacatgcataaagcgcgtggtgacttagtctctacatcactgggagttacctacatacctacgaagaaacgtatgtctttgagtagttaaatccacgcgcgctaatgctgggcttcgactctataagggctgtatgcggcggacgttaacgatccattgacatctttggttttcgggcgagagcccgatctgaaaggccttacccccaggtttgaaatttttt

SEQ ID NO: 11938 - DNA, 525 bp, Emericella nidulans
ggcgacctactcgacaaagccaggaggtgtgtgggctctgacgaactgtgagtttcaacgctgctaggcggattgttgaattgaaccagcgacacaaccttgatgattgttgatcacggcgacaaccatgcactatgactaggggttcactcaaaaccagacgatgtgcccgctctaggatctgatatgatgagccaccataaccagaacgacggtctagatccagtgccaggacatacgcttaagtcaggcagactatcagggacctaacatggctgagccggggagggatcgaaaacattccaccgagggagtgacgataaacactggaatccgagactgatcacagtgtgcctgtctctgtcaataacgtcattagtgctgaccatggatatcagatgctgatgacctgaaaggtcaaacagttttattgtgctgtccatggccattggagcaacgatgatactggaccagagacataggtcactgtacagattgatatgaaaactgatcatgttactgacg

SEQ ID NO: 11939 - DNA, 113 bp, Emericella nidulans
  unsure (1)..(113): unsure at all n locations
tacgcacatgtcagagattgtagtccttcgtctcagngaaaatcagatgctgcacncgcgacttgtcagagtagtgcagtcggacctggtagcggtcttcctcaagcctggag

SEQ ID NO: 11940 - DNA, 1830 bp, Emericella nidulans
tgagtaggaaaaaaggaaaagaaaaataaataaagaagaatgtaggaagtgaacaaataataaacaagaaattaatgggaaaaaaaggggaaagagctaggcccacaaaatttttaaagtggaactcccagaaagaattaaaaaggctttcactgtaattttaaaaaaatgtgaaaaaaaaaaagaggaaggctttctgtgatgagagaaaaaaaatttcgaaaggaacaaaaaaaggaccaatacgtttggttgggagggtcaaaagtagtgtgaacaggttagtccggcctaaccgccaaagttagacatttgtagggcggtacctgccatatccaggtttagatgatctggttcagagtcggggccaattggagctatagctgccatactggattgcatccttgattgctttcagtcattactcgcagaccaatacttctcgctcggcctactcacgagctgcaattctcaattcctctttaacatgatatcctcctaatatccttcgcgctccaacatgtggctcgaccgcatcgccggtcactcgacacctgatcgcggcctttctccaattccccagagatcatcctcccatctctcgccgaaccgtcaaaacagtcgccctggacttagcagaccagggtcgtctctgtcagccttggtttctcccagcgcctcgaccacctctttgccgacagtagcccgtgtccccgaagagacaactttaaaacagaatgctacaggaacacgcccaccgaatgtcgccgacccattggaggtattaaatggaattatcaagaaacagaatgtggaatcaaacaccgagagttccatccgcaaaccaggtctagcaaaaccagaccagctggtggaagacattgacttctgtggcctgagcttagagggattcttgcagaagcccgagtcggatagatcagtgagaagcgatgttagtgcccagacgcttcagcagtttgaagaggaaagagacaaatttcaggatctgcataacgctatatccggatgcgacgatgtatctaaatctgtggaattgtacttgagtgactttcgaaatgaactcggggcagtctcggcagagattgagagtttacagtctcggtctgttcaattgaacgctatgctggagaatcggaggaatgttgagcagttacttgggcccgccgtggaggagatcagcatctccccagccgccgtcagaatgattgcggaaggacctattgacgagaattgggtgaagtcactgaacgaaattgaaacgcggacagcaagtatagaagccaagattgcgagctctagttccaccaaagcgatcgacgacgttcggcctcttttggaggacgttaagaagaaggtcagtttcctccactcagtgttgacgcgtatactcatgcacctaggctgtggaaaggatccgggactatctggtctcgcaagtgcgcgcgttacgatcgccgaatatcaatgctcaaattattcagcagcagcgcttggtcaaatataaagacctctacagttacctgtcacgagcccactccaccttagcaagtgaaatcacccaagcctacgtcaataccatgcgctggtactatctttcacactttacccgctaccaccaagcactcgcaaagatcaaactttatcccagtgaccgcaacgaagttctaggtggtgatccccacactcagaaatcaggtttgtatatcctggctcatggtttgacttgactaacatgctgtaggcaatctgggccctggtggtcgggtcaatgcccgtgcgcacgatcctttctcgcttgggaggagaatt

SEQ ID NO: 11941 - DNA, 194 bp, Emericella nidulans
  unsure (1)..(194): unsure at all n locations
tcgtcgtccaccacctgatgctcccgtctgagatcaggtgcatctgcccgccatcccagcggtattcctcttcctgagatacgacctacccacggccctcagtacaaggcgtctatatangatgccatacgaagatctccgccttggnatctcggatcacgctggncacgatatagtcatctctaatatctttg

SEQ ID NO: 11942 - DNA, 3269 bp, Emericella nidulans
ggctcacgaaagaacgcacaatcatcaatgtttcgcaacctcagcatcagcatcagctgttgacggtatccggcaggacggcaatatcgacgagagccaggagacttgtctggactcgactcggcacaatctcctagtgcagatccatcgatcttccttagtgcaccaacttccatcaagccgtggcaaaggtttaaggcatccaccttagcgggtgctattattatgactttgattattatgatagatgggcctcgacgatcgttgggtggtctaacctgtcacaacgagcccctcaggccccgttaacggctgatcgttgccgcacgatcatgtcgttgcgagaacctgatcttgtttcaccagcctgtcgatcgttcgtctgtttcgactctttgagatgcctagagatgggcttcgccgaaatcttaggactcaaccttgtacagtcggtcaccgtgcagtgtcgacctcaactcgagtctccagccatcagagtggtctcccgcattcctgggcggctcccgatcgagcgtcttgtcgccttcgcccggcgaccgtatgaaagctctgctgggtcgtggacaaacaaggggctgtgctcggattggaagtgcctccgttctcatcgccaaccaagcctctgaagtcggctggcagctccagcttgggcttgggccaggcttggcaaacacgccgggaagggaatctgggaacgatttccatcctttgcgtccatcgcttggttgcaggtcactggaaaaagaggctagcgcggcgcgagaaccggagattatagtggagtgggaccgataatgcaaaataaaggaggttcctcgccggaccaaggaccgaatctagtttagtgccgctgctcttctggccaaggactcaaatccgtatgacttttgatcgctttcgtgtcgctcattatgacgttgccgctctggattatgatatgaccctcaagctgacaggcaatctatcaaaaagactaaaaggactacggagtatctatcgccgtgacctcgtttacttggccccaagcttgatgacccttcatttacgcttgtgcctccattgggatcgacctacatataacgtaatgttgtagtcggagctgatacggcttttcgttgctcggcgcaatccaggccgttggccgatttgcacgaggtcttgactacacagtactacggtagtgcgaggggggccagcttgcgttattcctggttcaagccttggctctacccgagttctctacccgcgaacctcgaccgcaaaaggctacggagacgacaagtaggctctattggccacactaaaggcagatcatcaacccgaaaaccgattctcagtctggcagtcaccacatcaacgaaaccatacagagtgctcctgtcacattccaaggaccgccatccaagacaatgagtggtgactgtttcacccagtttacgggatacgtactcgcctcctcgactgcatgcagctcggctgcttctcatgcgtaagttatttgcgtggattattcccgataatgatcgtcagcgcccgtcccgaaccggtctagtttgttcaaagcgtccgtctctcaatctcgctctacgatccttggcgctatcaggtgactgggaaaatcacccgctgcgttggttcttgggtcggattcgttctaaaatgctagctgttaatcatggaaaatccaaattaggtccagctttttggagtaatacttcaagcccgactttgattaccgctacccctagaagtttctttgttttttttttgccaatgcatacggcagaggcagcattactggccgtgctcactgctttgtgcggcacagaaaagaaagaaagaaagaaaggatccggtcaaccatgtgtgctgatagatgtgcccccatccaaactctaatatacgatctcgtggaagcgaagcacagtagccaatcaccgggcactgtcttattcgccctgcctgcgtcagccgtcagctgcatgaatgccgctataattattatccctccgtccgtcaggcagaaaacgttggatccagtctccaaggcccctcaactggcttgtctcttattggtctgtggagctcaaaagcacttctggagcttttctcccgtccgctcgacccggagagctccggccggctcagagtctgactctgataccaccactgactcgagtagtatgaggcggcctcggggaggacaccaaaggttaaactcctccgtagacacgccccgcaaagtaccatctccagagcccagacgacaggcgctttcgcgtctatggagccttgaacggagtctaaagtggatcaaagcactaaggagaagccgtgggaaattgcagagtcatggattctggactccaaatccttggaccatagtcgcacagcaggatagcagtcacacaatcaacctgaaggcactcgaggataggagcgacgtaacacagagatcagggaaacttgcggattgagccgaccgtgtgcatatgtatcatccctttcactcgcaatggatgctcaatcgaggggggataaacgtacatcgggaggacgaagttttgtcctctgcgcgcatcattccatgcaataagatggaaaaagaaaacatatcaaccagccatcagtcatcacaggcacaattatccgtgtgttggccgggtttattttgccatccacaaagcaaaggcgctgacatgtacatccttcgtgacccgttcgatctacaagggctcagacgtacagttacagttcccttctcagcttacaattggcgctgacgagcattttgagtctcgactcttgaggttgatgatcaccatcacggattgcggtgatcaccggtagggtagcagaagcagtcaggtacagaaagtaccccaaattcgagatcattcgcgcatccgtgtacagtttcctttcgcggacgacagagtggccctgaagcttcgattaggtagcgagccacgggggccgtaccagacctttctcttgatccatggaacagccatccatggatctacacacagtgagtttggatgatgttcaggctgggagatctgggacccgtgcttcgcttattcgcttgacatctttgtctaagattacgcctgccatcgataagattttccgctttggcggtttttcgaccgagagaggaagccggagtcgataaacttgacgtcaaatattggccgatggatggaccctctggcgggccaacttaacccggaaattcggttttt

SEQ ID NO: 11943 - DNA, 572 bp, Emericella nidulans
gctccagtggtgagtcttcgccagtgaatactggccgcttctgccctttttgagaggaagcgtccatattcgatcgacggacgcttcgcagcctcctgcaatcaacccgacttatttcatgttcgagcaagacgccactgctcaggctgatatggttcagtttatctgcaaggctttcggtaccgtaccgctaagcaatattgtagggaatgaggtttccccagagttgggtgtcctacccacaaatttgtcaatcgccacttggaacaactgcggtttggcgaactgtaagttgctctcgttcagaaacggcatatagctaacccggctgtagaccgacctaattatcacccagtcggtactgccagcttgcttccttggggaaatgggggaagttgtcagtcctgagcttaaagtgtatgggaccaggaatgtccgtgtgattgatgcatcatttctggcgttccagctctgtggtcatttacaaaggacactggatgctgtccgctgaaaggcttcagatataataaagcgaggcaccatggctaaaattctcgtcatggtgtaaaggg

SEQ ID NO: 11944 - DNA, 122 bp, Emericella nidulans
agtacgtgcttgggagacggcgactgggaacgattggatctcggacagcgtgataccctggggaatcataaacgcgttatggtagattccgcctactccccacaggcaacgagtccttagct

SEQ ID NO: 11945 - DNA, 601 bp, Emericella nidulans
tttgaacttcgggtgtcgcttcgaccagcctcgacggcagacggatttgcattgctcggcacagatcgcagttcctcgtcgtcgccgtaaacgtcgaggttgatccccgtccacccgccgaatagtgctagcgcaccatcaatggaacccagactgcggtagtatgcaaacttctccttcgcttcctcctctgtctttcccagaaccgggcagagtagggccaggaattttatcgaggacggatcgcgtccgtattgcgacttcgcaagctctctgatctcggcgacattctttgcgacgacgctcgggctgtgtcctgcgacgaagatcgcttccgcgtgctgcgccgcgaaggtcttgcctgcctttgaggttcccgcttgcaggatcacgggtgtacgttgtggagaaggctggcagagatgaggaccggggacgttaaaatacttgccgacgtggttgatttcccgtacgcgcgagggctctgtgtatacgcggcgctgcttgtcgaggatgacggcgtcggaccgccaggatgattcccacagcttgtaggcgactttaatgtattcttctgcaatggagtaacggtcatcgtggt

SEQ ID NO: 11946 - DNA, 284 bp, Emericella nidulans
aaacataaaacagacagttatagacagaataataaacacaagataccgtacaatatggataattaacaatattatagtaacacataaatacacaccatagaacatatcagaaataagaaacatatcatgacaatacccaatattacagggatatacatatatttaagagaagacataacgataagagagaaaacataatagcaacatagaagatagaataatatacaagacaatatagtacaatactagatataataatatgacatatacatagaatataatag

SEQ ID NO: 11947 - DNA, 167 bp, Emericella nidulans
aactgccccataaattgcatgcaatcggaggtaatatgccaatcgaggcacccaactctgtcaggtcgaacgggatgcactcttgacccgcatacagcgatcaacgtgcctctataaagtaggtaggcatgtagacgctccgaaacgaggttaaggccccaacctta

SEQ ID NO: 11948 - DNA, 3471 bp, Emericella nidulans
  unsure (1)..(3471): unsure at all n locations
gtcgggtctgtagccttctcaaggattctgtcaagggcttccatgctggactgttagacagaagccgataaccagagtggaggactcgctgtttacagaatgatgatgttctgttaggaatctgctgtaccatttatctgcagcgcctcggctgtatgtggaccgaggtacttcaatctgtagtaatatacttggagtaataccacggctgtctcgcccgctggccctcatatcgttgccctggtaagcgcattggcacaggaacagtacctctaaagatgtccagaagacatccattctcttccttacccttgctttgcacacccctgctcgttccaggttgacttccagcctgcgattcggtctcctcggtttttcttgtgcttgcgtctatgtcattcttattcttcctttcaactactggaatcacgacgccgcattcccaattccgacagttgagcttcggctgcttttttgtccggtcgtagactaatcgaccccttgacaaaatagtgtaatcttagtatggttcaactacaaagagaagagtaacccaccaagcactctcggaaagatttgcactcccgacataggcccatccgagacattgctggttgcccggaaggcagattggcttatctggttgaacgtacagaatctttatccattagcattgccctcatctcagctgtacaatagatagataccttattgtgcatgacgagaccctctctcacactgacgcagtctcttagtacatttttggggaacttgccgttctcgaaccatcgttcttgaaagcatattgtccccgcggaatttgggcctcctttagactggagaacagtgttctcggacggaaaatagacgcggaccctctctttccattcgtccgctacagaagcagggagaaggcaacgtgggtcagcaagagatttggcaggaaatgattttgctgtgcgaaagcttagttctgtgagaccggagtcccctgtaaattcggtaagttggactgagcttggtactcatataggagatctgaccttgagcagcaaggtatatgcatctcatgaagtcgggggttatagagcctagagaggatgtctgtgccgttagtgtttgctgagtataaaggttttggaagcgtaccacgaaatcaagatttattggcttattggcttgcaatccgagagatgataatgagcggcctagaccgcagtaaccggtttccttccatgaatcttcccagtgcgagccaccactaggaatatcagtaatgatccatatttagcgagtgagacatacattgtatgcacaaatgcaaattgcgaagtcttgctaaagtcaaagtcctcaagcttccgaatgatgttctcatgcaaggtgctagccttgaggaagtagacgaggtccttgtaaaaactcgtcgagcaatcagacgtcgagccatctttttcaggaagatcaatcaggaagacgctctggacaatgttagcgtagcagctacagcaagaaagataaagacttgtatacattttccataacaccatcctctccccagtcgaatggagtgaggttcgcagtcggcactgcaatccggagatgcgtaggatgaaagagaagcatgagcttagagtgcatgcaattgatttggccttccattggcggaaagcacagtcgtaggcttttaatgctcgccgtttctgatttgtattgtcgtttctgcagaattaaccgcgcgcacaccaaagtgtcatcaagaataaactcacagtagcctcatccttggcttgcatgatcagtagcaatcgactcttttccatgttcaccttcgagaagagccaatctatgtcccacatgaacgagcttaaaactccaagctccagatctgagctttgcaagacttcttcgatcttgatatcatcatccaacctgcgatggccggaagcaaatgtcttcttgacagtgccgactgaaaactgaacaccggacacagatgtcggtgccaccggctgcattgctgtgtgggtgtgtacactgctggcatctggttgagacctcgtacgcggttgcttcagctcacgttgctcagcggcaggagactgggctttcctttttgcaagacgtgcaaggcgctcctcttccatcttcttgcgatctaagccagggaaagcatgtccggtggctttaggctcagatgtctccttctctttcctctctggtggagggatagagttaggctccgatgtggacgagtcgccttgtcctgcagggctctgcaaagataatgcaatagccaatttcagatcctcatcgtcttccgcattctcaataatgcttgcgtcgcgactggtgtctgagccaacgaccgacttggacttgggaaagattggtatcacgtcgtcatcactgtctgccgtcaaatcaaccacagacgtttcatgatttatggctctctcaggaggaggtgcgtctgccaaggaagcggcaattgctgctctaagatcttcatcctctgactccatttcacagtaccgaggtggtctttatgagagaaaagttctttaatgaggacaatttcagatgcccgtgttgagactttcagaggaaacaagatgctgtctgccgcgatagcggtgtttactccctcaacccagcgcgaaggacagatattgccgctcagtgggctgtatttaatgagtttcgaacaaagagctagtcccagatgaaatcctatatccaagttcaatgatactgggaatatgcaagatatggtgagttggaaagtgcagatgatgtgacgggcccttacaataccgcatgcacgtgactacgtccgttcaagggtttgagcaactactcccacagcctatgagcatgaacaaataatactgacttgcctattccacagtgagtgtgaatattaattatcctagttgcgccagtgtagagacaaaaatcatctgccctggggttatcaaaggacatctctcgtggccaggagtcatgcgtaggtaacactatatagaaaacaatattcactactccagtcatgaaagaagcacctgcaaagccccctagacccccagcttgaaatatgaaacaaaagcccatctaaacttttgtactggaagtgtcatttataaaatgctctcaatggtaaccctggtgcatgtgcgttgaacaacacaacataaccagtgtctatctctcagcttccttcaattttcgactatagagacaagttatagcttcagagaacagtgggagttgcatggtagcttcaaaaaaacctgtctaggcagngtatacttttgacccaaattccagaaattgtgttgccacagaaaactacgtatgtactaagggtatgcttttaggcccatgggggcgggtttactcgggcgaaagagccctttaaaccttttcggttgaattgaggtttaaaaaaaaaccgcgttttttttcctg

SEQ ID NO: 11949 - DNA, 2144 bp, Emericella nidulans
acccgccgcctgcagtcaaataatcagacagattttcggagagaaaatgaacgggacagtacatgactttcttctgatgcgcttcatcaatgccataaacaggacggtcatatctctcctcatctttaagaacggcttccaaatgctggctaggcgggaacttctcttcactgaggttgtgcgtttctgccatggcgggttgcgagtgggtcttccaaatcacgattatgattcaataaaagatctggattgtttcaaaaagcggtttccttaggacctataaacaggataccgtctgaatatatatttccgaagaagccttcttccgtcaatggcccttgcttcacaactggctaactttaaccgagttcaacctaggaaccagcccaccgtgtcttgcatacccggacaccgcggcctgaattctgagtaccagtcacactggaggacctggagatatggagaatatccccgcagatcattctcatgccaagggtctataggtgcggggattcttctgatgccaagttaaatattgaaggtaccagtcggctgaggtgattcgatacagtcaggactgcaacgataatggtcccatggtctgcagcctacccatagcatatcggcggtatgaccacgtttgcatgtcctgctacactgctttcgtatatcagccgatatcaaagagatcactctaaccgcaatcttggcatagcgcggggaagcagtggagagcttggcattgtctgatatctcccgggctcgcgattcgaggtattactcttggtattgccgaattttctgccgaaattgagactgatttacttggcagccactagccaagctcataaccaaatgagttgggatatgtctttgatgcatctaacttgtagtcctagagttgaaagggctctgacacgacatgaatgaatctagaactatataaaccccgcagctgctgaaccgtctatttcaagagctgatgtgctttgatccacttcgtgttgaatgcgtcaactacacctagtgcaatctcgtcccgcgttgtccttgttcgtgattgagcgcaggagccatgcctaggctgtcccagtctagattccaaggtcctcagtcgtcaggcttaaggaatgttctataatcacatcctttaaaaaggcatgaaggttttatgtcgaataaagtgtttatatcctgcaggctataaatttccgacaactcgattctacgctactcattgggtccctcagtgtaggaatttgaatactccaccctctcatcgaattcactctcatccagcctcctcaggaaaccaccctcaatcaactcgagcacattcgtataggctacaaactgggtccccatccccggctgctcaaaccatggcgctatgggtcccaatcctacaacaaactccttctcaacttgataaacgtggtagttgaacgggtaattcccatcatacgtgatcaagttgctcggcggcagcgagcgctcaatatatggcgcgcctagcggcgcgaggaatgtgccatactcggacccgaagcggtcgagcttctggccaacagggagcgtaacattgccgataatgacagcttcctcgtcgtcgacgacgaatccgtttgctggagggtagatgtatgtcccgttgctgttgactgacgtggcccatttctcgagaaactcggctgggcatagagagccgaagcgtgcgtatgtacgcagttcgttgcgaagcgggaattttgaggggtactggacaggtccgagtcgggggtcgccgcagacgtaggtgttatttatgggggtgatgccctcgcatgggtttgggaggcatcgcttggggaagagagcctgcttctatcatcacgtcaaaatcagcaagtaaatcaacgggttatatggagacaaaagagagtgttacctcttgctgaccacgttgtgcataggcagccggcgccagagcactcaggaagagcagcgcgttgcggaactgcattttgactgaagtgagcgcaagtgattgagtgcgaaagggagagttagctagtcgtctgagatcaacaggccgcagaggccgccgcaggaagatcttatagtgcgacttggctggaaaaatgtattctacactgcgcttggat

SEQ ID NO: 11950 - DNA, 1798 bp, Emericella nidulans
aagatataactgccccgcgattcatcaacacaatcgcaacgcaaaaggaacaccttgcgaaacagttatgccgaacccagcgcgagaagtgccatcattacacttgcggcagcgatgttatcctcccgtctcagctcgctcgctccgcccaccaaaccagatacgtacctgttctggcggatatgcctgcccaacggcagggcgttaccggtcgaaccaacgcacatgacatcgggaaagtggattgatgcaatataagacttgcattgcttggaggtagacactcaatacaatgccgctttctgcggtgggaagcaggaggataatcagtcctcgaggagggggtctggccgttgccctgaaggttccaagaaaagtaactatcatgtcatcttgacggctgtccagttgtccagcttctacggagcacgccactggtatacttcaactcgaacggtactgattgcggcagtcttgtttggccaaaatgacggcgagatgaatcaggtgcgcagctggcaggcatataaggctggggatattgcgtgatatcagcacgatcattatactcgttcagacctggtcaagcacacgattattcgcgaatgggtgatcatatagccgactgcttggaactgctctaacacaactagacactgatcatatagatcatgtccacttccaggaagaaagacgtgcttcctcgccaaccagattgaaaaacttaccctagccccagcgagaaaagaacccccgagacccatttttggacattcttctggacccggcagcctctgttcgcgccatatgcaggcgcctatctgataatgacctcctggggctctttggtcgttattgtgagcaatatacaagcaccaggcaccttcgaatagatatttagccttgacatctgctgcgctaatatgatccgcacgtttcgcatctttatttaccgtcatagggcttttccggacccataggcaacttagtagttcattgttgctatccgtatagttgcgccaccggactcagaaattcctcgaggagcggcaaactctagcagactgtctatacaaccctgccctgtctggcgtggacagttgaattccagcatgaaagacgaggtgccagaaggggttttgcataaacctagccctaaaacatgaattatccccattttcactttcataactagtcgactagataaatactcccatcctccttatatccaatctcccgtaccttaacattcctcaaatgactctgtccccccgaaatctcgcaatcatgataaaacagccaccagcgcccttcaaactccgcaatcgagtggtgcgtcgtccaccctagcacaggctctagtattcgtccccggtacgtgaacgggccccaaggtgaagacccagttgcatacacaaggtagtgcgtgtcgccagtcgagtaggaaaagtagtaaacgcctttgtacttatgcatccaggaggcttcaaagaagcgtctatcgtggtcatcccccgctagcggctgcccagactcgtcaagaatgaccaaaggacgaacgggggacgcaagctctgtcattgagcgcgagagtttcgcgacgagaggctcgcgcgctggagctcctggtccagtcggttccttcgcatctttgtcgtagacccatccctcccctccttcctctccatcctcgctcctaacccacttctccaattggcccccccatagccctccaaaatagatgtacgcttaccaaccaatctccgtcttataattcaaacccatatctgacatcctc

SEQ ID NO: 11951 - DNA, 593 bp, Emericella nidulans
ccaagcgcttttgatcatacgcgccgcttcatttcgttctccgcaatctgctcctcaaaacgaccattctcaaatccggagtcatagaagtcgtcctctatcgcgctcggtccaaagctatagccgttttcatgaaggtactcggatatctcacttccaggctgggcaaagtcaagcgcaggacctccggaagaggactttatgttcggggatgccccatgatctagatgaatctttgctatcattttatgtcggtggggatatgacactgccttgcggttcattgattgcggtcaagttgaaccaaatgtgggcgtgtgtacagagattgacctagtgactgttctgggttcttctcttgcgatgaaagtgagcaacatttcctagggtcattattcggtccagggcaagaacatggtctagttgaacccgtcctaccaggatttaaaagcttcggcctttgcccggagatacaggcgggaataccttactccccttttggaccgttttaaaccaggtttaacaccctatttgagtttaagccccgcccttgtatttaggccgcttaaaactttcccgttctcgtgctctta

SEQ ID NO: 11952 - DNA, 714 bp, Emericella nidulans
agcgacatatatggggaactggcggctttgtatacagagtattggagaaaagattgaatagatggtgtgtctccttggctctcccttgatttctttactctcgtgatcgctattgaacttcgtgcgcacccgcttgtctccaatcctattagcctagaaagttcattctatcttctttacttttcgaaagaccctcgtagggcttgtgcattatatccatatcttaaccctctctatcactgctatttttatcgatgttttatctctaccctacttgagttatatctttcttacaaacgtcttgttggctgacttaacagataactgctgtctccttatatatctcctacctacttacatactcttaccgtaattcattcttccttacaactcacttgcaagccattcgtcactactttcctctatatcaaccctatctgaaaaaaccttgaccagtagtcggcttcattaatatgatgccgtaaactcgggaaagggtaaaattctcggaggctctcttaattattataattattgcctcaataatctctcgttctaagctaagttactattacttaccttaatcaaatctatgtctaagtcctcattgtgtctatattcactcttttaatgattgcctcgctccaaaattaatgattggcttactggcttaattaagctagtttaataatctctcgactctttatacctcgc

SEQ ID NO: 11953 - DNA, 1347 bp, Emericella nidulans
tcttaaacggcccaaaataaagtggtttgcagcacgaacttaaaaaataaaggataaattctgccctcggaaaatattggctgttgtatttcccggaatgttaaactatcaaaagttagtttcgatggtttctacagtataagattgacttaagggctcccccgcctttaaaatttctaaaatttcctaaatgcaatgggtgtaccagtcactttgtaaaagaccattgcattatcgatattacaacttcaaagcaatggggaagaaagcaacctccccgtgacccagcatacatatggcgcgcatgtactcctccagacaaggcggtgtacactagtatgtgcctctagggatgcgtcatggatgacggcatagggataggcctagcacaccttctgacgtacaaattttatgaattacgccatcacgaggcggtgcaaggctggctagtacaagaaccgcctatgaaaatcaacaacagcacattggccttgtaacgcattccccttttggacatcatcgccatcattaagggaaggttcaagtcctaacgcggtgacttttcatagacgcaagagtcaccctgccatccgtacttgtttcccgtttcccgtttcccatttttcctaccaactcacggcaaaaagttgcggcaatgacgcggaccatttcaacctctctagaccgatatcaagccctacaaggtcacggcctcgtccttcgaatcgactatattcactccttcgccctccatcgtcgatgggtcacccacaatcatgcccaacttcctcgcccaatctgctcttccagtctctcatatcagctcatcagccaggtcccgccgacgaaaatacctcttcgaaaccttgacgacccgaatttccctgccgttcatgttcattgtggcagttgcagcattggccaaaaacaacagcccagcggacacaatcatcccagaaagcagtaaaacctgcccagtcttactgatattgcacaccagcaccgcgctgacgtatacgagaagagttgcaactgccgatacaacgtcttcgccgacgctccggtctcgcatccactggcccgcggtgatggctttcaggtcgtccactgcgccttggatacgcacccagcagtcgccgcttaggaggacaaggagatcaccttgaacgcctggctcgggagctcctttccaccccgcctcgcggcatcggcgttggatgacgaggatgttgcatagtcgcgcgagaacaagggagagcaggcaaaatacaccccaccaatcctgaagccaaagatatacaataagcatggggattgtacgcataccgcgcatgtatacgctattgg

SEQ ID NO: 11954 - DNA, 630 bp, Emericella nidulans
  unsure (1)..(630): unsure at all n locations
ccttgactcagttctagcaggtatcaatgtctattagatcgcattacacccagttacgcagcccaatgttgaatgaacaggccaaccctatgctagcccacagtctgtgacctggctgcgtagcacgtgtagtcgtgagacgtaccatgtatgtccaggttgtttaagagactggcgttgcccacttcacctagcgagccaacgtacccgtaggcatgcacgacacctctctcaaagcgcaaaaaaaatcgaaggtaaacgaaattaatttccattcggggaatggacccctggcctttcctttggaaaaccggntattttacccttaccccattgggttttattgtatgttcaaccctaaaaaaaaactatttttttgggcgtttttttggggttttttattttttttgcgccttcttggtatctcctctaaagaggttctaacaagtttgggggcgcccttcccataaacttttttctttcatttatattttaattttacacatcaacatttaattttatttataatttttttaataattataaattattaattgttaagtttactgaatttatatttatcattctttatttttctaatttcatattagtgttctatttttcctttat

SEQ ID NO: 11955 - DNA, 573 bp, Emericella nidulans
tcagagcgcgcaagtcacaccggatcctgtattctatgacagcaatagacggctttcctacttcgttaggtgctacatgtaagtgaaattatataagatgcgggttaaagcgatggaagttatgatgggcagccgctcagtcaggtacccgctggctaagggatgtcccgtgcaagggaagagcttaagtaggtgctgctttctgtacttgggtttcaacagtgcagaggtagctgatagccgaatggtacagctaagccacagtaaaaataatgtaaggaacattgcttggccaggtatgtgattatgtaggcgctcagactacccacccatgccggttaggcgcccaagggtatggcacgccgttttgtgaagctgatttattctcgaactctgaatatactcttgagggtaggtgggaatgttaggcagagagtgaagtaacgaatggggactggagaggccagcgcaggccaggggtaaagataaccctggaaaagtcgagtgggcgcatgagatagtcagaccacttcctctccgcatttatctagctgagcagcaaggtacgcctac

SEQ ID NO: 11956 - DNA, 1062 bp, Emericella nidulans
tcataacggcaatcttctcggtctgctcaacaaatgtggaccacgggattgtggagctggattgaccataaagcggatacgtcgttggcgtggatgaagagccagtcatggtaccgttatggaaggcaaagcgaacgctaatctcgtcggtagaagggaatgagtcggaggtggagttagtgacgagctcccagaccatagaggatgcataatctggaattcctgtgaaggcggcgtccacggcagggaggttcgcaaggccgaaatatgagaggaaagtaccgtaggagccgaactcaaggtggagcttcacctccccctgtgaggtaacagtctcgttaagacccatgagcatttcagcggcaagagttgagcctgcgattgcgcggacggtctcagaggagttgtaagcgaggttgtactgctcgatattggcaaggaggaaggcctggtggagctgggactctgtaggcgtgttggaagtgttatgtatcgaaccaacattgaggtagtcgtagatagagtacgcatttctgaagctcatatcggcatccgagaaagatgtgttgatgagcggagaaagagactggtagaagtctttggtctcctcgaagagtgtcttgtacagctcagactcgtagtagctgtcgctgctaaccttggctctgttacagtccgtcgttccttgcagccaagtgctatcttcgctgctggctcccgagtcaatgagcgagagtggtataagctggtagccgttcagaggcgattcaacagttgttccgttggccagttcctggctggacacggagcctacgggcggatagacaccctgaaggaagccagttgcagagttctgcacaccagcgtcgcgggtgccgacgctgtaagctggctgaggttgacaacatcctcgctgatgccgtcaatgtactttgaagaggttgagttgattagcggtcgtggtaggcggatccggttaggtagacctggttatagcctaggtcagtgagctgagtgttctgaggatcttgcagtgccgtctcatgacgcgcgatatgtatg

SEQ ID NO: 11957 - DNA, 2729 bp, Emericella nidulans
gcgcgcgtcaggatcgtactcgaattcggggtattcgtagatcgatgtcccgccggagccggtgcccgtcggatcgcctccttggataataaaatctgggacaacgcggtggaagattgtgccggcgtagtaattgtccatgcagtgttggaggaagttgcgacatgttagcggagtttgcttcgcgaacagcgcgatgtggaggggcccgaaggtggtatggagagttgcggaagccgtcggcgctggttccgtagcatagtgagcggacatattgttaaagatgagatgagatgcaaagggtcagagatttgcgtccacgaggggagctcagcgatgtagctatgtagctggaagcaaagctcagacacccttctcaatcgcgcaggattggctgcggcctatatgcctaaattaagagctcgatgtatcaaaagatagatctaagtataattcgagcctttgagtgaccggaattggaggtaggcgagagggactggcgagggcgaaaagtggtgatttgaagcttctcggccaagtttcggggtcacgtcaacgtcagccgaagccgagccttttatagatccagccagcaaccacaaacatcagaacagcagaccaacgcattcaacttaggctggtaatcttcattttgttggctactttgcaagctggcgagacagcctggcgatcaaataaaataaaatgacagcccacgttgcattcgggcatgattgaaacgccaatcctgacactgaagagagcacctaagctactacagagtatagtcaactgataaggtctgactgaccccattcatgcatggcatttttactgagccttcaaagacccttgaatttgcttactggtagggaaagattcggatacaagtccggcatctggcacaataagtgggaatgacgccaaaaaaaacttgcgaagtccaatctcattacttactctcagctgtggaagatatcttgagtctcagctttctcagtgaagggctggagaaactgtggtgcctagaaagcaagtcgtgatgtggcagtgcaatagccctataccgcacagccaccaggcctggaattcagctaccttcccgattgagctagtgagaatcagccctgtggaataaaaaagctatatttctcttagatgctgaacagatcttggagaaatcatgtattgagcatctatcgggcaactaacatgtcttcccaagaatactacagcgacagcaaataccccggccatggccagggctatggcaatcagggtcccatgcctccaactgggtatcccgcataccctccagcttcaacttcatggccagcacctgcaaacgacacagcatatttgtcacaaactagcaacggatatcaatacccgcaggaatactacggcggctatcagcaacccccgcctccgtactatcaacaccctgaatcgccagcgccagcgccagcgcaggctccatactcatacccatacccaccgcagcagcagtctcagccgacatatccgcaacatactgaccaagacgttcacgcccgtcaagactacaatgaccgtggggtcctaggggccctaactggaggcgcggcaggcgcatacgcagggcatcaagttaaccatggggtgcttggaacaattggaggtgctatagcaggctctttagcggaagacgcaataaagaaacacagttcacacgggaaggttgacaagaagaaggaaaagcggccgtggaggtttcaccggcgccgttcttcgagctcatcgtcttcatcttcctctgatacagactctgagaaggaagaaggaaaactcccagtttcagctccagcccgggtaccaacccaggcttcgtctgatcaccgcgggaatttctccaaatcatccagggatatatccctccagggagactacgaattggcggctttgtgctgcgctgtctcgggccaatttaaggcctctcgactgccattgaacagtgtcttgatgaatgaatttgggcatttcaggtggaagactgcgggcaattttggggcgtcagcgagaaatgctcgtttgactgagggtgggcgtgtgctggaggctgagttggcagacggtaaaggtgggtggaagagggattgggtaaggcttgatgagaggatttcgaatcgggacggggtcttggtgtttttggactagggttttctctctcgtggtttacatttgatattttgagatttcctttttaatggttcattcatatggtcacggggttttatggttgtgaatccatccttgtaattatcgtaagatattgcgtgatctaaactacagcttgtagcattacaagacaaaacactcgttaagacgctcgattattgtacggtcgttgacacatcgtgaacgcttcacatacagaaaagccaacctaatctttattctcatccaccacattacccctgtcaatgccagcaagccttcccttcttggaaagcctgaacggtcccagaaggaggaaaagcgcctccaaacccaagatcacagctaaagtaaccatagcaccaatgacaccagccacccccttggagattccaccgccattgctacctgcaaatgagttcgtagaagcgttgcctgagtccgaggtgtcgctggatgaagcacactgtccatctgtgtttccgcagacatcgcaccattgctgcgtagtcataacggcaatcttctcggtc

SEQ ID NO: 11958 - DNA, 445 bp, Emericella nidulans
atatataattttacttaatagaattatgatttacagccataaccatgaaattattactgcacttgagctataattaagtaatttgatatttagaactctcttttcaagactattagctatttatactctagaaaactaataatttctcttttcaagtaataggaagattatctcataatataatattgattgaaaaatacaaagaaaatcatttagatatttgacgtgctatattaacaagatacaatattatttttttactataattaatatatacaggtttttccttttataatgtattaaagaaaaatgtattaaaatattaaaaccgtctagtttagtattatactaaaagaaattttatattataataatcagctatattaattttgtttatatatttaatagtaggtagatctcaacgtagaagagttttataagattt

SEQ ID NO: 11959 - DNA, 482 bp, Emericella nidulans
attacggccggaacaaaggactggttgaatctcagttgaagaacatacccaagaagtgttttctaaggtgaacgataaagcccctatatgggatagtctctcaatcatcctcaataccttctcttgctgcttaaatgctgggcagttatctatcagagtacgttccatgatataagatataagcacttgcaagatatggatcagtcttattcacctcaaccaactcaaaatagacttctctctgttacgaccgtcaatctaatataagtataaatgtgcatagcaatatacagtaccatatgcagttttcatatgccagtcttactatctgtgccgggcgtgatgctgccgcgatacagcgaaatccacatactaagaacaacattctattagaatcggctataggactagtgatactcgcgaacagtaaacccatcatttttgtaagccactcgaataagtagaggattgtcacaaataga

SEQ ID NO: 11960 - DNA, 408 bp, Emericella nidulans
  unsure (1)..(408): unsure at all n locations
gcatggctgtggatgtaacaccggacgttgggtgtacgtatgaatcggatcaaccgggatatatgtgggtttatgctcgcatgctgaatacagccaacaggcttgaactttgcatgattatactgcgtactaaagccggtaaggaggccaaagatcggcactcgaaacgctgtcaccgcgctgtatgttaagcaagcgcgtgccaatgatgacagattacatctcctggccagaatcactgatactgaaccatatcaacctacagtaagcacgctctagaagatacgccgaatcaaaagggggcaccccaacaaccggcgggaagccgcccgaggaaggtatattttccctcccgttttcttccccaaaaattttttttttttttnaaaagggggggggttaaatttt

SEQ ID NO: 11961 - DNA, 1954 bp, Emericella nidulans
tatgatggacgagataaaacgttctgctcgaacttcgactaatgggagtcgtggtgaagtcaacatcgacgtcttgcttaaaggcgcagagatactttgtaatgtttagtgagttgggctttccaggcatccctacctagatttctgactgtcgctttaagtcctgtcgctggcgctcaggataagattgccagcctccgctaccgcaaccaagtcatttcggagtcaatcgcagagttggaggagcgggtagcgaggaatgcttcagaattggagagcatgagccaccttcatgatgatgactacgacgaactagacaatgccagctctccgagtgctggcgtgttagacgttacggatgcggacattgagcgggaattgaaagagatacgggagcttgaaaggagaaagcggaatcttgaggaccgcgtcaacggcatggagcgcgatttgggcggcctttcgtgatgactacatcaaatattctcagtccaattactgcgcactgataccacaacagacacgcgagagatatacgcgctgtcacgacattctctttacccaacaagaacgctgggaaattcgtcggctccggcaagcagcgttattgctcctatcgagcgaacgaggaaccacgcatcaacaatcgcggcacatacatcagatcgaaatggcagaggaaaagcccgttctctggtaattctgctgggcgtggtatactggtgatagtcgttgccactttcgagtccatgctgattgccataagtgccgcttgagcactacactccgacatagcatgcatagacaacgccgcattgaccgatagtcccaatgcgggaataattgctctactcaggtcagtctcgtgtaaagagagcgagttgatccgttgattccagcttattgacctgatgccatgaagacaacttgtaatggtagtttgatatagagaagcagtttagcattaaacaatttttacatatcaagaggagtttaaaaacggtaaattggattactctactttgatggtagttaataaacaacagaggaacagaggacacagccagccagccaggcagagggtagtgccaagcctgcggctccgcctcaggaacctcgccgcatcctcactacgtgctgtcgacgaaagtgtttcgaccaccccaacttgtctagttgatctccatcgactctggagctggatactcctttcctcgattaggactattcgaccggtttccgcaggggtatatctcggaaacatacgagcggtccagcatcgatcctcctttcctgatatcggcatcgcatcgagtcaacctttcacctcgtcaataccctaagccgcctgcatattccaaaagtcaacaccgcaaatactcgttgaaatggaaggcaaccaggcttcaagccctcagcagatggtgcctcagcactcaaacctcatccgaacggaccaagtgcagaagctaccgcatctaaatgatcagcaaaaagtccagcacacccagcttgttcgtaatttctgggaaattctgaatagccgcgatgcgcagtctcctgaatatcaacaagcacacacgaggctatcgcaactttcacagtctctaatgaaaggcatgcgtatgtaccaacagaaccgacagctacagcatcagcagatgcaggctgcctccgcagcgcagggccagccagtccaacgttcgcagtccgtcaacccgcagaacttcgcccagctccttccccaattccaacagaaggtcaactcattacagctcttcctccctccgaacatctcaagcgaacaagcagggacttggcttccggaggccaagctccgatacggcattgcgctccaaaagcaagaaattggacgggctcgtttgagcgagttgcgccaacagcacagtcagcgtcagagtgcgggaaatctgacgcaagaggagatgcaaga

SEQ ID NO: 11962 - DNA, 481 bp, Emericella nidulans
  unsure (1)..(481): unsure at all n locations
aataacaacattggagctactgctatgatcagtcgatttgggaacttgtttttaggatgcctcaggaggtcacgggcgtggggtgtaacatattcggggaacgtgagaggggttgagacgatgtatttgtagagcaagtcgatattatcaccgtctggattcgctggatcatcatcgaaaggaagatagcctgccagcatagcatacttatatcgttcagtaagtcaaagacaaaaagtgagaccgacataatcgattgagaccacttacaagaataacaccacaactccaaacgtccacccttcgtccggtgtagagtgagtcgctcaccacgagctctggggcagcataacagggacttccgcaactcgtctgcatcaagtctcctcggcggaagcccttcgcattgggtttatccaggcgcatctttttcacaaactccttattgntgaggttatactcaatctctttcgtgagctca

SEQ ID NO: 11963 - DNA, 604 bp, Emericella nidulans
gtttacaagaggaatgcatatgaagcactggcggagtaccacggggttggcaggcggacggcagatgttcaaccgacagggagataataatggcgcatacttggatcccagccgttgcaggccaaggcgtcgccagcgctcgagaaccgcaactgtacaattagcgacaggataatcattgaccagtagctactgcgggccccccactgttcaatgggaatggatgcattgaccaggcccgctcttattcgttgcgagtcagaagccagaatccgcggcatagcatgacacaggttctccgcacactgcgaatttcctggatagatatgtctgactcggcagtcgagaccagtccacaaaccagacttggttgcgtgcgccgcaaaatacagactgccctttcagaaatggtttcgatcctgatcgtcgggcattgagcgccatctccgtctgaaagaccagttgccagtcccctcatacttgatcctgggtggcgaacggcgatcctaccgatagctatgcaggcctccctggtacggtggggaacatcagctgtgaggtacgaacgaactagaacctcgggcgatttcgggccaggaactta

SEQ ID NO: 11964 - DNA, 499 bp, Emericella nidulans
  unsure (1)..(499): unsure at all n locations
cctncggattccgtcgcctggatccctccaacctttataagagcttcgagacggtcgaactgccattcgttttgcctaagtcgccgcgcatgcttttacctccagagcttctttggtgtcttattcgccctcgttctcttaacaacggcctttttcccgtcatactctcggccgccgccgcattatgatgctctccgagacgctgtcaacaactcgcctgctcctggtcggggcaatcctcgcaaccaaaagatttttattgcagctagtctatacgaccgcggtggcgacatagcgggcggacagtgggggaaggatgtcctcaggctgattgatctgctcggcgagaagaatgtgttcttgagcatctacgagaacgatagcgggccagcaggcgcaggcgcattgctggaccttgaagctcaggtgccttgcaataagtcgatagtcttcgaggacactttggacttggatagcttgccatcggtgaccttccctg

SEQ ID NO: 11965 - DNA, 121 bp, Emericella nidulans
  unsure (1)..(121): unsure at all n locations
taagaatatggtactaatctagcgtgtcacaagttagtctctanggggctggaattcgaccttttgcgtacctgcggcctaggcacgctcgtctctctggcagtgcattgcgcgaggggtt

SEQ ID NO: 11966 - DNA, 629 bp, Emericella nidulans
ctggacggatcattgatctagagttgtcggtaactcaggtacagagtgcaccagaaatggttaggtttgcttggattgacatgatttaagcggtagtctactctcaagctgtggtggaaacgtcaagacatgggaagagctgcagcacgatggctactatctaccagaaccacagcgtaggatgcgctctgtcggtgcaggatcagctacagcaggataagccaaacatagacagcactagatagtatgagactaataaaccataacctcctgaaaatatcctgtgtatgataggagatataatctaccgtgaagtaacatatgagatgacgatagttaacactcagtttagcccatgctctagtagacgtcatcacgcagccttgctgattctcttcgctcccctcttactgctttttcacctgttgcgacttctttttcggtacacgaaccagccaataaaggaaaacagccgcaaatgcattgaagacgatgtagacgaacagaatcccaacattgcgccagttatcatcagggttgatactcagcgacgccaagaattgattcgttgaggagatactgcagagccggcagtcaccattaggagcacactaagaagttcgcatgga

SEQ ID NO: 11967 - DNA, 902 bp, Emericella nidulans
cgagttattgaagctttacaatgctttctgctttgcttacggctcaaagtcagacatcagacatcactttgactctttgactccacgtatttgagataatgcagcaatgctagcaagttaagacgagcaaggtatagccccgatgaagagttgggtcatactgtgtattctgtatagctctctgtgctctgcgaactgcagactggacgggtatagggacatggcctgtagatttgaatctggatcgtgacagaaaaaggcagaagaatccaactgttcattcaatgcccgtgctactcggcacagttggtgattggcgcacatgcaaaacagtgctagtttgctgtccggcacaggcctcagcagggcattctataggatgcgctggctcagtgagatctgaccagagggcgtgacccatttcacctgctgtaaagtgcttccagtattcccagacatgataagtttcttaattaacccagcctcaagggtgcccgtatgtcgataacaaagctgaagctgaggcgtaaggcatagaggtggctggtgtaccttgtgattggatagaactccgtcttctgcctcaggcgcagatcccacctcaacttcagcccaattaatatgcaagcaaacgcctatcacggcctctttgcttcctctttctatctgagccagctctcttgatcctgtaccctcaggagtattccggccgtcgcaatttgcatcatcttcattttaaggctgcgcgttccggttatttcgatacttagttgtcctttcagctcccgagccgcttctggccctcgctgtcccttacacacgcctctcgcatcgtaatcccgccgtcccttcgccgtcccttcgcagtccctgtcgactcctggtcccctgcgtcgccctcg

SEQ ID NO: 11968 - DNA, 533 bp, Emericella nidulans
accattgcgaccgctttgggactgacgcatttccgtacatggccgagcctgtacgatggaaccggttttttccgaggcgcggaatggagttaagcacggcttgaagcaggatggcatgtacattgatatccgtgtggaggtgcatggaagtacatggacatctcctccacgcgtatacctctcattcatatacagttagcgtgttgactcgtagagactcaacatgagatacgaaccggcacggtactatagtattgttgcttgctaatgaatgcgagagatggcctgttttaagcactataactgtgtcacagtaaatgtcctggtacatgccacagtcagtgtaggacatgatgatgcacggacggaaaggctctgccggaccactgctcgcggtgaggcacaccgcacagacagactcaacttttaactactagcttatgaactgacacaactaggatatacgctaaagtagatggaaatacccaggatggtggtaaagatttgcactacaattgctccatgataaggga

SEQ ID NO: 11969 - DNA, 150 bp, Emericella nidulans
aacatagtaacagagttattaatacaaggagagcaataccaataacataacaagaccacaagattacaaacatagacaaagaatacatatacaaacaacattacacagagacagaacaggataacacacacaaacaacaatacatagaga

SEQ ID NO: 11970 - DNA, 1579 bp, Emericella nidulans
tctcgggaacttcatttgaagctctggactccaaggtgacagtggacatggcattcatgagaccttccaccatgtctagaatctcccaccttaggcggagattaacggacagacagtaagactctacggtaatcagagaactcgggttctccccgtggttagttaattcgccctgccggaaatcagatgtgacaacagtggacaagtctcgaacaacaaaatcgctctccctcggtccaggatcaatcgaaaaacgaaacaatttgattgtggaagagaaagaggcattcaacggcgcattttcaacaacatcctctgggaagccccatacccgtcgcattacatagcttttttcaacgtgagctaaatcccaggctcgccactgatcaaagctagaaaggacttcagattttgcattcgcatggagtgtaatgtcatcagatgagcattttgcggtcaactccttttgctgctcgatggagaggttgttaaagacgttccggatacgagaaaggatcttccatgaatcatgatgccgtagatgtccagaggccatcctaagcatataggatatgcgcgttaagaaaaccggatccggcatttctgcggcggattgagtgagacgatatatcaagaagcgcattcgcttatggcgacgtatagaggcatgtttaaaggatgatgtcgcagaatcaagcatggtagttgtgcgacgaacaaggtaggcgagttgctcaaccgacttagttgaggtggctatatgaaaagcacgaacctgcaagttcgatctaatcgtcggtgtagtcatgatccagaagctgatgtcgcgcagcatacagctgacttcggacttcagtcggtgctggtcagcttgactactttcaagcgagactgagaaactctcagcagcgacatgcgcagttatggcttctttaatacccgcgatgagatctcctttctgccgctcgacccttgttctaaattccgtctttaagcggcaaacctctacccgatattcatctcggaaagcggcttcgttggcactgaaaaagtccgagtcgttgactagcttcaacgatatcaaaggagctcgaatggcaaagctagtggctttcttcggattcggtaaagacttttcgtaggccatgatatctgaaacaatgtccttttgtagcgaatcaattatctcaactgggtgtcgcaactctagggactcggccaatgccgagattacaaaaaggaacctcggcgtacagaagcccctgactcctctatgtaagtcgaccataaagttggtatacgttgtactgtcactctcagaaggtgagaactggggatcgaactttggcgccggagggtctgcttgagaaacaccagcatttggcacctggctggcaggcaactgagacgtgtttaatcgaattcgataaaaggtgaattctgggatagcccacgtattcggattgacttgaggcccttgttgagaggccctggtccaatacctgggtgatctgtatctcagaccaactctgccagtctcagagagtctctgatattgatgcattgacgatggcatact

SEQ ID NO: 11971 - DNA, 2663 bp, Emericella nidulans
agattctgagtaatatgctttccctaagaacaagatctcgtatatgggatacatacaagatattgtatacatatcgtaaacattggaaccgattcgacaaaaatagccatgattccatgaagaatactgatcgatagaggagtgcggccaatcagagtcgagagacgctcctccacaaaaagagcccactttctctatcgcagtcagagtcagcgatcatgacttgcgctccttctccgcatattgtatcgcttgctaccgaatctagacatcgtttgctacaaaagtacaaaggccaattcatcatgcccgccgatcttgttcccgagacaagggtccttgccattgccagccatgtaagcgtcccctcccctccctctccgcgcccaccatgacagcccacttatcagaatcaaactgacacttccaggtcgtttatgggtatgtcgacccttgtcatatcatgtaccaatctgtatacatcaatgatcagcagctgaactgaaatcaaagccatgtcggcaataaaatggcaaccctcgtcatgcagtctttgggctgtgatgtcgccgccctgaacaccgttcatttcagtcagtatatcttaatattcatacgtccagaactgacagttgcactaggtaaccacactggataccgccaattcaaaggtacaagagccacggcagaggaaatcaggaacctctatgaagggctgtgcatgagcaacctcacagactttgatgtcatgctctccggatacgcccccagcgctgcagccgtcgaggccgtcgggagtattgggatggacttgaaacgcaaagctgcagaccgtcccggttcattcttctggggtgcgccgccgtctctcagtgccatctccagaatctactaacgacgtcgtagtcctggacccagttatgggcgatcaaggtcggctatatgttaatgatgatgtagtgccggcgtacaagaatatcattcagcacgcggacctgattcttcctaaccaattcgaggccgagtattatccccgtcccatcccagcccgtagtcccagagacacgactaacagcacaagggtcctctcgggtatccagataacttcactggaaacactcgcaaaagcaatcaccgccctgcatgaaacctacaacatccctcacgtaataatcacctctgtgcagctctccaagctcctcccatctcccgaaaacccatcgccagactcaacacagaacctcctcactatcattggctcgactacactgtcaacgggtaaaccgcgccttttccgcatcgatgtcccagcaatagactgcttcttcagcggtacaggcgatatgtttgctgcgctaactgtcgcccggctccgagaagccgtatttgcggatgcagatgaaaacctacgatataaaaagtcatggattccagctgatgatgtgaagccgacggagttgccgttggcaaaggcaacggagatggttctggctagtatgcataatgtgctggagaagaccagcgaggcgagagatgcggagcttgcggctactgcggctgctgctgctgctgctggagctgaggagactgaggaaatgaagaagagggaacacttgcgacggacgaaggcagcggagatacggctggtgcggaatgtgcggtttctgcgtgaaccaacggtggagtttaaagcgaaggagtgggagagcgcgtattagtctcggatatttgcccaccgtatctgtacctatcattactagagagtattgtatgatcattattagatgattctatctcggtctagacaatgcgatcgtatccatctagagcgtcgttcgttcgtaaaacccaaccatattcacaattagttagtgccggtacttccaaaaccaccagctcctctcacactttccgccaactcctcaacaaccgcaacctcgggggtataaatctacaagtacgttagcgtccagccatcaatctagccagatagtgtcataccctctccaaaacaagctgcgcaacgcggtcgccctccttaatcgtaaagtccacatcggaaaagttgaacaacaacaccttcacttcacccctgtaatccgcatcgataacccccgcaccaacatcgataaagtgcttggaggcgagaccacttcggggagcaacacggccatctataagctcgtcaattagctaaacgtcgagcggacagcaaagggaaagagcggaaattgggtaaacatacaagtcccctcgggaacagcgactgccaaccccgtatcaactaggcccttccccttcgctgggatgatggtctcctttgcagcatagagatcgtagccagccgcgaatgcagagccgcgggttggggcgcgggcagtgtctgtgagctttttcacgagaagggcgggggtgggtgttgatgctgtgggggctgtggcaacgggagcagtgctgtctgtagagaccatcttgattgcggacgctgatgtaccggttgtgtctgagggttttgggcgtttagctagaggggaggcagggagggagggtggttcgtgggtcgttgatgtggtggttgtttctcggggtggtgaagtggcctccttggtcatgatctgggagaattgggacttggatcggaattggaagtgagtagatgtgac

SEQ ID NO: 11972 - DNA, 270 bp, Emericella nidulans
  unsure (1)..(270): unsure at all n locations
gatagacacacatagacacatacatacacagnaacatatacagacacagananagatnagaatcaagagatacatatagacacaaacacagagagagacatacaaagaaagacnatcaagacaacatacagacagtactaaaatacaatacatactaganaacatagacatacacatagagatatatagacatatagagatagatnaatatagatagacnannaaaagagaatatagactacaagaaacacacatagagatacagagaca

SEQ ID NO: 11973 - DNA, 1809 bp, Emericella nidulans
tgttgctgaatcccaccttagtcctggctataatgcaactggtcaaactacgattgccctcctggcctccgcaacgccagccccagccaatcgccatgcggatgtacagataaaggctgagatgcattagtccggaaccacagatgcatcgaagttccatgatcccagttcctggcgccctaaagtcccgccaaagctagactatcgaaagcttcatgtggcgaaatcctcatttgaaactcttgcagtaagtggaatcatctactcggtacactctctcctttcatctcggcccagtgtgaactcccattatgctcaaatgcacgaaccttatgcagccgtctatcaatctcgtatgggcgtctcaccacccgataacgtgcggagacaaagcaccaatagtggatctgaggctaaacatttctttttgctttcattcccttcagtttagtgagttgtagattacttaggctcgcattctcttaataaggccaacccctcaaagcttttctcctcagtccctgaccgtttttgcatcaacagttttcgcaagtagtgccctcaagcggcatcctcagcaattggctcattcgggtatccaatattctttacctacctagacaccaacatggtacgtttgaccttgcgaggttatgggatgaacaaggctgactgaccttttagcctgggtgtccagactcgacgaacagggcattggatagcctggagtcccagcattttgcattgctctacatcgacgaaagtggcaaattgcgctttgaagcctctccttcgatcgccaatgacgctcacgctatactgtctccagaagttacgcattcattcctcaaggcagttgctgggtctgagaatggggccagagctggtaaagaattccataccaactacttgacaatgatctgacctggcaggctctgaatcagccgccgaatttcgaagtggaaggagttcttcttctccggattcacctgtttctagctttagccccagatccaatacgtgagtctccgaagtgcataaagctccttgaggtctctaacaagtgcagttcgctcccccttgacggtagccggaaacgcaaacgggcatcgcacgagtatgtgctgccgatgagcatcacttcatatccgaagacaatgcttccagtcggaaacaaacgcattctgcggagttactacgagaaagcctttgaatgtctccagcagaccaactgtcgcatattggcaaaggcctatatcaaactcgtcgaaccacggaagcaggtcacctacccatacaacggccacaaggtcgttgccggtgtccctcagcagtttgaccctgaagagacaagaccgttgtggtggccaacgggcgtcacccatcgcgaaccggatcatctccgaaagccaggtaattatctaagacaatttgtttctagcacccatactgaagctctcacagagcgcatccgcctactcattcatattctctgtgagctccgcgagagccacgccatctgcgtcgaaaaattgagagaagccgaccaagcgatacgtcgccagatatcgcccgttgagcgtcttcaggtcttggacgagatctaccgagtccgcggtgaagaagaacgttaccttgacggtcgctccggtatgaagtacactgtattgtttcagaactaactactaactcctcctgcagactcccgagcagtcgtatatgtctcccgcgttcacctcccagaaatagccgacgcccaaacttccctccacccttcaaatgactcgaccgcgctacccgacgggtatc

SEQ ID NO: 11974 - DNA, 3160 bp, Emericella nidulans
tgagctagagaacaagctggcgcagatgaaaacaaggcatcgacatgttgttgaggaattagcgcaagttgagaactctgtggaagctaaattatcgtcatataaagcttcactatcccttctcgagtcggatgtccggagattcctcgcaagtcccccggtcactccatcggccagaggactgctggagagaacttttactcactaaaaccaaatcgacgaactctggagatggcacaggaacattggagactggaacaatctgtattgcaacatcggcaagaggaggttaatgccgagatcgaggcacttgaggatggttgcgatgtatggaaacgggtggttgaagctcatcagcgggtttgagaagcgcctgcgagccaacatgcgccgttcgatacaagatcaaggggagccactgcaagacaagaatgttgcgaacaacaaaggtaacttggtccaggccattatggaagacctggaacagacgacagatctcgtagagcaaaacctgggtcatgcgcaaacaaagattggaagctccttgtttgctgcatttcggcagaatttgaagcacttcacgaggctcgagtgatgctcttgagcatattcgacaatacagacgatgttaatccgcctaccgcctacggagaccctggaaagccgcgcaagagctcagacggcgattcacatggcgatcctcttggagtggataatcccgagcctccagctgacctgttgcaagatatgaacagccattctcccggcgatgccaactcggagactgaagatgacgaacctgatcctgcttggttgctgccggagagttgattcatagggctagagctgtgtcaaatatatcaatcgggaactagcagcttatattgagctttaccacatacgcacctgagtgtacaggacacctgcctaagagcgagctgcgacttacacgattcacatatatatatattgattaagatagtggtgcgcactcactagaagcggcccactatcgaacgcatgtaatataatattactactggcgttgttggttatcactctataacagtcattatataattacaattcctgggtgtcgagcaaatccacttatatgggaaactacaaaccccctcaaataccgaatagcaaaactacctcacacctggttcagccttcgctttatcgctgttcaaggcaaagccatgcccagaatgccggccttcagttccaccctttaactcagaaatcgtaatttcactcaccccattcacttcaaccggccccgtaaacatcttactcgctgtcgtgacccacgttaccacaccaaccagcgcaataacgccaatcgctgcactagtgtagttcatattttcgtcatccaccggcgcctcagatgggaaattaaaggtgacaaacgcaaagaggaggaagaggagacctagtgcgtttagggataatgacagcgggagagacagcgagaaggggcctttgaagtgcgttgaggagattttgtgcgaggttacgtagccgagcaggcgggccaagaggggaagggcgtaggatatgtctttgaaagaatgcgaattagtacgggggtattctgcgtttagtaccgtcaatggggatgagcttacagaatccggtggtggctatagagatgatggtattaaagcctgttaccgtgccgaagtagatggagttgaaggccatctgcactagtgtcgttgcaatgatagcgtcagagggatgtgtcatttgccggttactttggacagagtagtggaaaaaagaagaccacggtctctagcgaaggcgaaaagggatcttgactcctcagcaatcaaactaactgagcaaatgaggactattagtgtcatcatacttgccataaagcaagctccaactctgctagtcgttgaatcgtagctggatgacgggaacaccggtggtagacgccgcagttgtttcaacatcgccaatgcaaaagcacaatgtgagtaagaagacgaagccagtaacggcaccgagtcccactgacataatcatggccttcggggcgtctcgtgatggatgtgtcatttcctcagtcatatggcttggtgcgtcgtagcagcacataccaaaaaggctttgcaggataccgataatggtggccattgcctggccgaagccggtgaaattctgaaagtcctgaaaaacaaaagaggccgacagcttatgcctgttagtagctaggagggtaatagtgatgacgatgaaggagcagatgttccagatcaggatcatgcgcgatagccgattgaggagatggggtgcgaagatattgacgaggagagcgctgaaagccacggcgtacgtgacgaggacggtttgccagcgctcaatggtgaagctggggaagaccaggttcgcttgcccaaggatgaagttggatgcgacggagttgttgacggcgcccatagccaagatgccggtaagcataaaccatagcctgtgatgtaggagagctgacgggagactttggaaggtgcgaggagggcaacccaggagtactggcctccagcgacgggccaccgcgagcacatctcggccatggacaaggcgacggtcaaggtgacgacgcagacgccaatccagccaaataccatgacagggggtccgccggctttgaccccgatgatgaagactccgctaagggctgtccagctgatgattgaaaggtcagcttgtgtactgatctaggatcctcacgacaacttaccaagtgacgatactgaagctgaacccaatcatgtctaccattctaaaggaccgtcgaagctctgtctcatcagcctcactcaaaaaatcgtcttgtcaataatcgtaccctgtttgtagcccagatgttccaaggccatttcctcgccggccgctgaggcaaacacattttgattctcttctgtagctcccatcttgatgagaccttcttttttctgcactttctgttctatagatggaggatgacgcgcttctctaaatcttcctgtgtaaaggcccgttatcagtatatcacagtatatcatcatgcagggatggtatgaaggctaggcttatccttacctgctccatgtctcaaacatgttgataagacgaatttggcctgatatctagcagt

SEQ ID NO: 11975 - DNA, 3159 bp, Emericella nidulans
gagtggaccgtgaggaaagagccaggactaagggccattgaggtataggtctagtagactagaagtgattaaccagagacgagaaagaccaagattttcaagaagcgagcacttgatagagagtggtcaacttagtgaaatacaggccttacttaatcgtcacgacttaagatgatgtgtaggcctacctaggtaatgaattagaaaaaagagaagaaaaagggtatgtggatatgaagaagaagagtaaaaagggagagaataccgatataaacagagatcactggtccgaaaaaggtctagagattattaaggcagggtctctgggataaggaaacgaggctgggggatgggaatgaaatcaacgctgccccggagattttggtcccctgcgagaaatacccatgaggaactgtatatatatttcttgtgcggccatgattccccagcctgttatctgttcttacgacaaagaatctcccttgctatccgggtaatcatcggaaaagtacccgaaagtctgccctggaaaggacatcatctttgatgataccatcattgcctccctctgtcggaaaatccacttgtggaagtatagatctgttgtttcagctttggcctcttctttagtcaatcccactactcgtccaaggccattctgcgaccacttcgcatcgtacttcaagagccagaatgtccatagccctagaattgcctccagctcgtttgcgtcgactttccattgaaatgtatcatttgatcgttcaagcatgatattatatgtttccagggagccgcgggacttgctatccttagggtggcaggcgaagaaaagttcaaaactgcatgaactgagaggcgactctttccatcctgacaccacctccattgtcaattcgatagttctcgcaaggtttttagccactcttcgtattgggagatcatcccagtccatactaggatggcggccgcaagaagtgagctctgttaacctagctctagtgcgtatcaatttctctccaagtccagatggctgattcgacacttgtgatgagctactcgttgcacatgatccagaccgcacagatgcatgtacgggggttgacatcagttggaaggatttgaccctttccaggtgatatgcaaaacaatccaattcttgctcattcagggaaaagagttctcgatcgtctatgcgaaactggttcccgtctgaaccaagccgtttagttctcagacatgtgcgcgccactgccatgacaagcgtcgatccaacgtctgcgattataacggacgggtgtaggccacgaagacccacgaattgcaacacaaatcccaccatagtgacggatatagtgaagacaagcagagatcttttgccctttggaggagggccgcggacggattttatatatatcaagtcttgggaggttgatgaattcgggccttcttcaacagcaaggaaggccccgaagtcctgatctccaatactctgtcggcccggttgtaaccagtaaagcttacttggtttgtttgggtgtaagtaagtctcactagatgagcgttctatcaagaaggcacttagaaacatgcctaagctgagtgaaaccgacccgtagatgtagaatggcaaagcatagtttgtggcggaatcatcgtcgtttccaaaaataccagacgaccaaaaaactgttagtgccgcatatgccaaagttcctagaccctgatcagtaggaagtagcataagcatccagaccaagtatgatccctacctccctgtaaaatgatccccaaaagagcagctgcgtagaaccaccaaggccctctccggtcaatgcccttatttagtgacagattcggtatatccagttcaggaagctgtaggagctctttcccagcatgaactccctcgccatccgcgtaccaagctcctgctttagggcatcgcgaagagtcccaagcgcgtatgagccttgttcttcccatacaaccacttccaaaatcctgggcctgccagatactctggaaatgccgccatcgttgaacaactctgccgtgccctcagacacgcaagatagcagctcattctccgcctctcccggtgcttcattggccctgcccacaaaagctcgaagagacggattcccgcaaatccggatgacggagactacagcagtcaatatgcctagcggacacaaggcaaatatcaaattgtcgagacggcttgtagactcggcgagaaattgcttcattagccgctcgccaaagagagcgactaggggtgcctgaaccggcaatcacattagcactacattcgacgcaagcaagaatagattgggttaagcaggacagatagataccaagtccgttgcgaagttatccgcaaagtcttcccagcctcccgctcttacgctcgtccagaagagggccgtgaggagcaagtactgccagagcatagctggcattttaggtctataccttccagcggtaaagaattaagggaacaaggcttacaaatgaacttcattgtaggtgagcgatggagccagacagtattataatctgaacagggctgggggtgcagtcagccgtgagaatcgccttgccgcaacccccttccccacgggcattggcgatagaggcattccctgtcagtaatgggggctgagcggcatggccccaaccattgccaatgatttgacaagaaaccgaccagactgagccgcccatactgcggagttcgttgtagaaaagaaaaactacgagtggagattgccacgtttgcagccggcgcttaagtgcagcaaagatagaacagttcggcgccaatcgaaacaccagaagacgacacaggaaagatctttggaaccatacaattagaacccgtattgggctttccctaagaatagttttgaccaaaacgccttttggcacgtagataccctgaaaagccaagttagagagttcatagcaaaagacccttaacatatacccgaacaggcgatgattaactctttcaagaccttccgttcacttatgggcctgccctttatgcacagaaaaataggataaacccgaccaccaacgccgttccatgggacaaatgagaagaaagaccagcgggacgcacaatctggtcgataataacgacataaagcg

SEQ ID NO: 11976 - DNA, 1771 bp, Emericella nidulans
atccgtttgatttgctgtttatcatcactcagcagcgcgaatccccttattaccgccagccaaggtgaaggactgactttacgcaggctaccccagaatttctcaacagtctgccgcgcctcggcggggtcaccgtagatggcctgaatatcaatgtaggaaattattgcgccttgatggagtccgtctcgcccgatgtcggggttatcgcagagcgcttggaacacagaacgggcaaataaccgtatcactccgtgcgcctgaggtaggcattccgctttggacaacacatacagaacgttttccaagctctcgttggagaaaaccctctgccattcctctgaatctagagattcctcaagagactgcaaatgataccacgtcgtactgatcagctgcgcttgaaattgtgtgataactcctggctccccagcacgggtttcgaaaaaatcttggaaagccttcgctagagtatcaacctccggttgtctgcttttgctccgtaatgatacaagcaaatcgcgcattggcttcagcccaacctcggaaggcaatgtcgacgacggcggagcagtcgggggattgaaattgaaagcgaacaatccgcgtcgctggacgtaagaaggccctgatgccaccttccgagacctagatagccggacggtatgtatgcatcggttttgacatttagatgaggatagcggctcgttgttgagaatggctcgaaaaaccctccgcgtgagttgggactgcatgttaacctggaacgcaggtatttgtcgcgtgtacgacattggctccaagcgcaaattttgtaaattgccagctctaatggccgtggcggaattgtccacttgagggtcaaggggggagagtgtgaacgacggaggtgacggagcttccagctcgtccgaaaaatgcgggaggtcttggcgtcccgaagagaaatcgtcggcgatcactattgatccatctcccatccttcaatcatttcacctccaagtgcaacgcagcttgctggtaaagatgactcttccgcttctttcctcgtcgccattacgggcatttccatcggttgtgcgattggcttgccgctccaactcaaccacgtctaaaagtgtcgcaaacgagctcgagaatctcatacgcccggctagaccagcccctggtacgccttctgccttttcctggtccatcttttgactgtatcaccaaaaactttgaactattacttacctgcccaaaatatagcagcgcagagattgccgctccgccgccagacaaaccgccagcgagccattgaagaggagaggacgcttagggaaaaccgactcatggaaaaatttcagacgcgcgaatggaaggctggtgatatatatgcccctcatgatctcagccctgccgagatgaagaaatggaacaagcgcaaccctccaacttcagacgtctttgatgccgtcaatctgaaccctctggatgtctataaggtacgcactggccgtaaggtggcagtagtcaacgattggaaaactgggctaatcatcttgtttgccttccagaacttttccattatgtccgaatatatgaccgatatgggacgtatcaaacacagaaaagtgaccggcctacggggcgtgaaccagcggaacttgcgaaggccatccgaagagctattggtgttggcttaatgccgagtgttcaccgtcatccagagattctcgcggagataaagttcaggactgatggcggattctgagagaagtgcatgatg

SEQ ID NO: 11977 - DNA, 1030 bp, Emericella nidulans
cgctcagcttctgctcctggtccatctgactgttgtacttgttgatacgtgggcggtacgtgttggggtcacgacggaatgtcacgtcaagactcctcaagaagctattgcaaccggtgacaagagattcaggagcgtttgcgtgcgcgtcaacagacggcttaccatcaaacacaatgacacggtcagcaaggtaggtagccatgatgaaatcgtgctcgacgatgaaggcagtctttttggtgtgcatgatgaaacgcttgatgaccttggcggcaacgatacgctgctcggaatcgagataagcactaggctcgtcgatgaggtaaatatcggcgggcattccaagggctaacacaatggcgacacgctgcaattcaccaccagacaaattctgaacttcctggtcaatgaagtcatctatcttgagaggtttgtagacatcagtctggaattggggcgacaggaacgcggccttaattttcttgaagaagagctgacggacggttccctggaacttgggggtaatcttctggggcttcatgctgatgttcatgcggggaattgaaacgttgccgtcaggcttctcggcaccagcaagcattttgcagaaggtagtctttccggttccgttctctcccatcattacaataatttccgaatcggtgaaatcaccggcgtcaattttcaggtggaagttcccaagggtcttctccatggttgggtacctgaacgcacgcgccttgtcaatcacgaaatcgtcaccggcttccgcgagacggaaagtgagggattcctctcggaaccgaagattctcggttggaatgtggccgtccaagaagatgttgataccttcacgcaccgaggacggcaatgtcacgacaccgtaaactgcaggcttaccgtacagcacgcaaatgaaatcagaaaggtagtcgagaacagacaagtcgtgctcaacgacaatgacgtagtcatcagggcgcaggacgtctcgaatagagcgggcagcggcgagacgttgtttgac

SEQ ID NO: 11978 - DNA, 3721 bp, Emericella nidulans
gttgtcaggagtaggaattggcgtttacatgatgattgcaggaactgagaagtcttagtacacaaacgaatgaccgcaattgtcaagcatgttcactcaccatcaatgttctgcttgatgctcttgtgtggcaggatcgagccgccgttgacgtagacttcgtcggcaatcgtcacatcgtcaccaagaaccgtcacattttccagacgggcccaccggccgacggagctgttccatcccacgatggttgatttgatccaggcatggtccttgaccttgctgttctccatgagtacgcaccgctgcagacggacaccgtcacctatcacgacgttcggtccgatgacaacattagggccgatgcggcagttctttccaatcttcgcagtagggtcgaccatgacgtttccaccatatacataaggctccgagtttggggcgagtagcttcgagttgcgctttgtgagggaagtgaggtaaagacaggttccggtaaggaaatccttgggctgaccaacatccatccagaatccctcgaggtcaaatgagtgaagctggccgtcccgcacgatggcggggaaggtctcttgctcaatggaggtggggcgcaactcaatgcgcttcagcacgctcggattcaggatatacataccggcgttgatgcggttaccgacgaactcgacgggcttctcgacgaaccggtcaatgcgagaggggtggttgggcttgtgcacaacgacaccatattttgatggctcatccacttttgtgacgacgatggtcccttcatcgccgtggcgcttgtgaaactcggccaattgttggaaaggatagtcacagatgacatctgagttcaggacgaagaatggagagtcgtctttagcgagaatactctctgccagtttaaggggaccagcggtgccgaggggttcggtctcaacggagaactcgatctttacgttgtactgctcttcgtactattcgccgcaaaatttgtaagcatttgcaacaattcccgctctgaaagagggttggataccttcttgagcgcagaaaccatgacatctgggcggtagttgacagcgaggacaatatccgtgacaccggcagcagctaagctctcaacctggtgcagaatcataggacgattaccaaactccacgagcggcttgggaagagtgagagtctattatgaaaataatagttagcttttttattcatgaaatgactggtttgctgcgtcaagaacgtcgaggaggggttgtgctcactagaggccgcaggcgggtaccgaaaccaccgacaagaatgagagctagaaacaagagtcagacagaaagtccagataaatcatcatccttgaagaaatgtacccttcatgattgcgcgtgggccgatattaatccaggatctgtatcaacgagcgacgaagatggagctgcgatgcgggcgggatgttgagaggggtccgcaagaaagactgtaagaaaggtaggcggaaggcgttgatagtatgtattgctctattgaagcgatacaccgctggtaaagtccagtataacccaggaagacaagaacgatcccagggaggcagagagtataaaacgccaggagaacacgttgagcctggtaagtaagaggaagtctgcttgcggagcgccacaggggcagaacgcgcacacattattggttggatatattaccagtacgatcactgtttccgatcaggtggccttcgtgggcctttcaccccctgattccggccatcattatcaacttctggccttctctgcagtggatattactctgtaatgcaacattgacggaacgaacagtcgacagtttggcaggaattcaccttccaagttctccataatcagtgactgcaatcttgtagtcttgtcatgtatgtctcccccagccgcgtacaactacagcccgtgaccatgtcaacaggatgtcatgcaactcttgggacagagcaagcattcgcatatgattaaggggctcgaggaattaagtataggccgatcagtgagagtcaaagaagccaaacatcaataaattgtcttccatctcgtgcagcattgccccgaggtgacatccaaccctaccattgaccatccatcccgacatattcccagaaatcaaatacttgctatgttggatagcaccaaccaaaagcatgacactgcttttctaattataacgacccgtcctgtgaatcaggaggcaaagtcgtcatccttggaccgttgctaccaccgcctgctgaatccggaacaaatcgtctgatccactcgtgtacctttcgcaccttcaccagcggcagatcatcgtccttggcaggatggctaagaatgtcccgtatcctatagatcccgcctgtgtcagttgcgtccacttgctggcggtgcagcagatcgattttggtatatcccctccttaggctctgcccatatactcggtcctggaaacaacttagtcctacgttgcgtagaagaacaatatcccgcgggcgaagtgccatcagtgacgctcgaagctcttctccggccccatcgccgcatccacgagtgttgaccgcattctcgtccgccggaggaagccagaaagtaactccaaatcccgctctagtctcgtcccctaccaccacttcaactaaatctaattctctcttccagtgtttcgttatgacacgacgcggagagcggatatcaatgatggcaacgacgagatttaccgtcatggtttgtggcacaatagagttaagatatactgtattgggtatatctttaagatccgtaatgccgccttgaatatgtggcctcgcagcaggaatttctctctcgtcgcttgtcgcaatggaggtatctgtgcttacagtccacagaccactgtctaatgcagactctccggagagggcgcttggtgcagatacctccgaagtttcatgaactgtaaaggaatggtcgtagaactgagagagttctgaatcctcttgctcggatgcgcatttgccaaccgaagtggcgaggtcatgggtagtaaagaaccgggtctctccagtcatcacctgggagggcttgctttgagtagtctttgggacaattggtgctgacaataatctccatttgaccggcgtgctacctgaaaacactccgaatctctcacggcatcccttagagtcttcgaagggaggtaaagattcgctgagcaagtctcgttcatcccatcgtaaactcgaaaacgtgggagcacccatgaggaagatagtccttgaagacatagtttgggctgtcttaacggagttcagccatgggtattgtaatgtgcgttgttccgctcctttcgcttgtattattgactgaaaaatatataactgctgcggttaccaggtatcagcttgccggtgaatagacgaatgatagccacgtatatagatatatattaatatatcaggtaaatagtgagtatgtctgggagatggtttgtggtgacattggttggcaacctgtcaagtcatacttttaagtacgcttttgggtcggcaaaggccagattatgcggggatctgagaccttcaagagatgttagagacacaatggcctagactgccgccagctactccgtacggtgttaccccataagtttggaaaatggcagcgcaggtctgcattcccaaggtagtatagagtgacatctgcgtatcaagggaaga

SEQ ID NO: 11979 - DNA, 1136 bp, Emericella nidulans
atcccatatacaaggctacccagtacaatcgccgaaccgccagaggcctgcaaatttgcacaaagatattcgatcatgcgtgtctcattcactacaataaccacagactatggttccatcttgattgtgaaagtgttgtgtttggagattccataggcgcacatcagacggctatggagtgtacccaggtctccctatcaactgacatgctgcgctcgcgctgaaaaccacaccgagcccaagacatctagcctgtgaatcaaaatcgagtctgccacgcggatcaggccactggcttgttcatcatgctggcccctcgtcattcggtgcggcaacaccggggaaagtatgctacagaattggaccttgccgtacctacgagccgagtaatcttaggctgacagacctcgtgacgcaagatacatcacttgtttgttgctagtcgaagaaatgaggcgtggctaagtagagctcaatattagaggcccaaacgccttctcatggaggagcgaagaacagtaaagagatcgagaggagacgattgatcttgcacggtctacctaaagtctgaccatttgctcccgtgaacatggatggttcgtattcttgatcactgctagctggtcttaagaagtattctgtggcgacgtaaatggaatcaagctcatgtccctagcatatccctagatttcacatgaccgcatcaaaccctgaaaagccactatccatgagtatccaccagcgcgaatttctcatcttacggtaccccatgacctcgagggcccaacctagagtctttggcgaactctttgagagggcactcaaattctgtcagtcgaagtccgtatcagaagcctccttttccatattcagaagagcatccatcatgataccttcattttcaccaccatcactatcagcatattcgttggtcctagcaacagccattctttccttccctttggactcatccctagcctttttagtgggactctcttccggatcaaccgagttaaaacccgcactttcattatcggctccagcagctgttacagccgccgcattctttttaactagttccctcatacgtttcacaggagtcctttgagcagaagcacgtgagtcggggccattgt

SEQ ID NO: 11980 - DNA, 509 bp, Emericella nidulans
  unsure (1)..(509): unsure at all n locations
caccgctganatgtatggtggtatagctagactcgttctgtagacgcgccgggtgaggggatggtagcctcattcatatgatagcccgccgttaggcgatcgagcgagcggttggtcgtatctccaagaggacggggtcgcacccactgctggaagcacttgtttctacggttcaaacgagcgcgacgggagtggtggctgcgggataccagcctcgctgcctcactgcctcgctgcctctgttgcatttattgcgtccgttgcggtgtggaatgacgctgtagggctggggtaggatgcgtgaggggcgcaccaacccaagccaaacgcccccgtttttcctcgggtgggttgaatgtgaaacggtgccgagcgatcagattccatgacctgtcagcacccactacactgtctaggaccgttggagatggcactaccatgcatagcccggaattatcacgtatttccagtgcataatcggctacaaccaagcggtgacagccgcctgt

SEQ ID NO: 11981 - DNA, 1510 bp, Emericella nidulans
cttccccaagagaatggcgacgttcccaacgacaaccagggcagcaccgataccgggtccgatgacaacgacgatattgactctgctgcatcaggtggtgcaactccggaaattttggcactgtttgttgcagtgttggtgatggtcatttatgtatgatttgatttgaatttaacttatcagtattctcatgtttaaactagcaattgcgttcgcttttttctcttttctcttctcatatatgtatttatcccgcaaggaggactttcgcattttgtccatggttattccgtatcccgagttcctcagagacggcagattgtttactgttcctttctgtttgcggagtgtaatgctgttttgacttgcggtttggttggaagttgcgattaaagcatttggagcatatattctgctatattcataggcctatggtgttggcttctcggcatttgtgtttagatcgctctgaaacaacattttttcgatgactgcttttccttgtacaccggtctcgatccctcgtctgtagacttgctgtttattgagcctagataatcccttctgccatttaatagtgactgcttttgtatcggatatagcattgagtacgctcggtagtttcatccatggaagcttcgtgatctccagcgagaagattcttgaactgcccacttatcatccaaccattatacggagtctcttccttctttatggtcattgttgcgcgatggcctgagttccgaatgtatggcttctactcctttgtcgtatgcagggttcaaatctacaatctcctatccgggcctacatgttttatccagccactcatggctttggaggaaaccaatccagtaaaagggagtgacggccgatatatttgtaccaaccgaaaagctacacctagagccataaggacctacatgagatggttatgatgcatactattaaaatagaagcaaatcaacatgcgagctgctgtctacatccggaaaacaccgaatttcgtctgtacatctttatcgctcttacctcccaatgcagccgccagactcaatcccagcacatgccgggtgtgcgcaggagggatgataccgtcatcccagagtcgcgcagaggagaaggttgcctcggattcgcggtcaatcctggccttaagctcagggtctgcggttctccctacagcttccatcacggaggaaagctgctcggatcccatgacgccgattttagcgttgggccacatgaagaggaagcggggggagtatgcgcggccgctggcagatggttagttgcttgtacatatttggcctctgagtaggagtcaaggagaaggggaaagccaaaaagtacataccacatgccatagtttccagcaccagcactagatccaaacaccacggtaaacttcggtacatcggcacaagcaacggcggtcacgagcttcgcgccgttcttcgcaataccgcccttttctgcatctgcgccaaccatgaaaccagagatattc

SEQ ID NO: 11982 - DNA, 593 bp, Emericella nidulans
atactatgaaacgccagacccggaagttgctattggcgggagtcaaaggaagtctgagacgcttgctctctggggatctactcgtggagcaaaaggagaaagcggcgcccaagggcaaacagaaaaaaaaggccgctgtagtagctgacagtcgcaacgctatcaagcagttgcacggttgcgggctggcgttcaaagtggtcaatgacgcgaaacgtggagtcctcgtatatgttcgtgtctactccgggtccttggaccgcggtagtctattatataataccaacttgaatgtttcggagcgcgcacctcgcctcctcaaaatgtacgccaacgatgcggttgaagttgattcgatcagtgaaggacaaattggggttgtggtcggcctcaagcacgcccgtactggcgatacacttgttgcttgcactaccaacaaggcgactccacctgaacctctggataccctccaactacgcccaattgacgtaccgccaccagtgttcttcgcaagcgtcgaacctcacagcctagctgaggagaaacggatgcacgagtcgttagctttgcttttacgtgaagaccctagcctt

SEQ ID NO: 11983 - DNA, 497 bp, Emericella nidulans
gtgagtgagcggctcaaggttgatgggtacagtcactgttggctagctacatatgcaacttctttacactagaatctagattccgtttgataacagctagatgggcctgtctagcctaattcaacagccgaggagaagcttatcatatttctatatgttacagcctcgctcttccgtgtctttcgttccttctccaagctgaaacgtcctttaaagttcatagaccgtgacaaaacccgtgacaagtcagaggtcaaaacccaactagcaagttttgagtacacccgaacccgatcgacccatcacgggttttgtgtccaccacgtcggtaacccgcgggttgtgtcatgttaaagagtccaagtgtcgtggcatctgcatatccagaaatgagctctcagacccaagtacaaaggaaaatctctattttcactaccttgctgctagtgctagcaatttcttctgaatctcttattcggagaatggtagcctgccag

SEQ ID NO: 11984 - DNA, 1613 bp, Emericella nidulans
tggtacggtggtgataggtccgtcaggttcaagatggacaacagtaagttaaattttcagcatcctaccatgtcctcttcgggtcaatgctaacagtgtttccagaattcagacccatcccgggggcagggggattccagctctccacctcttccgctacggatctcacctgtcttaacgcttcactttccatcttcgatcaaacgtcaatttccgaattgcgccggaagtctgtgcaactgaccgcttaccttgaatacttgttgttgaaagacacaacagacgaaacccgcccattccgtattattaccccctctaaccccgaagaacgaggcgcgcagctaagtctcctcctcaagcccggtctgctgcaaagggtcgccgacaagctgcagtctgcatcgattgtttgcgacaagcgcgagcccggcgttgtccgtgttgcccctgctcctctgtacaacacctacagcgaggtgtggcaatttgtggaacagctgaaggctgcattccaggagtaaagttaatcgcgtccaatggcattattaggaagcgtgtacactgttcaaatctccgtatggctggaagcgctcttgatagagcgatacttgggcaaagcggaggaaccgggactgtttcaatctagacactcgtagatactcgtagagcagggaaaatgacctaccaactatgatcaatagaatcttgaggagtgacttcaacagctggtaggcgcttcaagtcaggtttcgaagtcactggtcataaattcaacattacttatttccgatgacccgtcattcagagcgtgaaagttgtaaaatttcaacggatatggacacttaatgggctacaattcagctatttgagacgaaataaaactgggaaaaggttcacattgggactctagcttatatacaacctcgatagtctcccacttaactagcccatcatgatttagaggtacaccgtcattcagctcatgacagcctgtatgggcgatacggagtctcgatagtacagagaagtcaatctatttctcgccgaaccaggtcttgtggccctattgagagtgttagcagacgtgatagcagtcgagtcttatgcgagaggcgttaaagcggagacaggaaagggaatactgacaaagaccatacggcccatggcgtaggtgcaagctaggacggagtcagcgacaagtacccaaacgtcaacccaagtaaaacttaccaacacccatgccatagacggagatgaggtaaggatacatgacccaaccggaacgagaggtctagttgtaaagattcgtgttagctggccgacacggtccccgaaaaaccactgtaggcgggttgtgtgtgcgcgaactgaccttccaccactggcgcttgccgtcgtgctgctggaagagacgttggtagtaagggacacggttctcacggaacacgaacctgcattgataaagactgagttagcaaagtgtgcctcgcaatggaatggtctctcggagccagaactcagccaatcaagcagggcatattatggtgccggatgccgactcaattggcgagaaaccggtgcatattgagcacgagttgaacgaaatgtacgga

SEQ ID NO: 11985 - DNA, 345 bp, Emericella nidulans
gaggtgatggcgtcgtgaagagcgtgtgtgaggaggccgttcgcggacgaggcggtcgtgtggggacgatcggggagggcgaggcggagtttgaggggagtgtggacgcggaggcgtgctgtgcctgacgccgtgatggtgtgtggcagagggtgtgcgtgtgggcggtgggatgtccgtcggccgggcggagggatgcgagggctggcggaggaaggggctacgggcagtgaggaaggccggaggttccaaggttctgggagttgtgtggcttgctgtgggaggcaggaatgggcggacggttgcgggatgggaagcgatggggagtagagaggtgtggaggtg

SEQ ID NO: 11986 - DNA, 849 bp, Emericella nidulans
tttaccgcgcctaatccaaaagataacgagcatccgtcgacacaaccaggatatccaagagaaaggaaaatcaaacgccgtcgcaagacagactaacaatactgccaggggagtaacctactgctcccgacgtatgctcgtactcgcctacagtagacatcttaagagactttccgggatctatttatcccaaacgtcccccttgaatcaccagttccactgtgcattagactgatgatcgtcagggccgtacctgcagactccatagctcggccatggctgcttctaggggtttagtccccacttccctagctcgaaacgtcggggttggctgctattcccagagctatacgccgacctccctactagattgtctgctatggtgtatctgcactactctgttcgaatacactgccgaacagcagtggcgtgactgcgcttgaactgcggatctcccgctcaaacagtctccgctggacgcgcgtatgagaccaccgttataggttggagtggaggcgaatactccatagtttatctggtcccggctatactccggatatacagccctttacatggtcatcaatacctgccagctcctgagatctataaagcgttctcgatcacgcagtgtcagttccaatgctagacaccgtaccataatcatgccgttcttgaaacgctcaacccttctctccctgctcgctgccggtgcaaatgggctagccaactcactgaaacaacctggggcagcgtcttcctgccgaatcctttccttgtaacctttggcaccagcgtaatggggtggtcttttttccagtcccttttcccggcacctggtttcgcccaaaa

SEQ ID NO: 11987 - DNA, 967 bp, Emericella nidulans
  unsure (1)..(967): unsure at all n locations
actgggtatcttgcacatggataaatgacctattactttcttttcactcctttgtcacatagttacttgcttttctttagcgttacttttgactgtatctgaagcgctttgttgggcagaatctgttaaaacacaaacatggtggtgcttatcattccatgcgagggcccaactctagaccaacttctccatcttccgcaatctccccaacctccaaagctccttaacggttcgcccctgcccctccatcaatcctgcatctaacaagcaattagtttctttttttgacgctagggtactttcctgcagaggaacgaggccaatatggccaacgatcagcatcccgcagtgttccttttccaaattcggcgactcaagcaataggattccaccgttacgcgcccgccacaatgcagcatcatttagctcgaggtgatctggcagagccaatgtgacaacaacacaacaaccaacgaatcaaatctacgtcctgcactatggcagaatcgatggttcgacacgtttgccagggcaggccggcatgcagcatgttgactggtctacggcaaagctcttgtttgacgacgtctgctccttgccttatcagaaaaagaggtgcctgagcagtgaaatgagaaggttggtgatgccacgttgatgctgggcttccacactgagctgttttttgccgctgattgatagttctttaggatgcttaaaattacgtgactatttgttactgccccgagcggttttactgtgccctgttttgactcagttgcacttgtnngggaggaacccgtgttctttaagcgccgaaattgctccaagacaacatttttagggttcgttttttttcccccccgtcttttttaaaagagacctttttttttgttgcaagaaataaaagcctttttattttaatttttttttcgtgggggcctcccaaagttttttttactttttt

SEQ ID NO: 11988 - DNA, 618 bp, Emericella nidulans
taaccatgcatcatggtagagatctccatgtcagttttgcatgaatggtaaaaaaaagatgttgtctgcattgtaaactcaaataagactcgtcatctagaagatcatcatgtgagggggagataaaaggtgcaagacggaattaccttgtacaaatctaatgcatttgagacaaacggctcgcgatcccttcccagtctggctttgttattagcctcaagcaaaactcccattgacagagcatgttttgtagacggtaatctcagtgggcgaggttttctaggcctgccgcaaaatggcttatccgtcaagaccggacgtctgtcgaacgccgtcggagcccaatgccgcttcatcttcgaaaaacacaattcttgagcaagagaatgttaagagcttaccatcgggtaatgagaagatggttcctaaatttgtcttaaaaactcagaacatgccattcaggtttaacagagcaacatttgtggacaagattggaaaggtcaggaatagcccttttgtttgacttcagaaagccaaggccctcagccggttatttccaacggtatttatacggaaggagccttatttcaaaaaaaaaaatcaagttacgggatgagg

SEQ ID NO: 11989 - DNA, 155 bp, Emericella nidulans
  unsure (1)..(155): unsure at all n locations
tatagatgtccatgtcttggttttgagagatatgaaagtatagatctggatgtcgtattatcttctatgcagttcattgacaagcattgtatttaataatgcaagtgaaggctagatcggcntgagtttggatcccgtcggcgagatggatcata

SEQ ID NO: 11990 - DNA, 726 bp, Emericella nidulans
  unsure (1)..(726): unsure at all n locations
taagtggtatatacgtgtgtactacactgcgagcggaatgtcattattacatggccttgacctgactcttgatttccgcataatgacttttattgcatgatagcatcgtagagctacatccagatatgacagcagaaagccgcaaattgcgtgaccgattattgtgtgtcatcgcgactcaggctcgagctcgagtggttccggtggagctcccaaacagtttttttttccctcgccgcttccactatcgtcgccgccatcaccaactggccctgagtaggctgagatgacggcccaggcacggcgggccttcgcggccttctcgattcattctagagatttggatctttccttctttttgttttgccgccggccgattcttcttttaggctgtcatcgcgtgctgacgngccggtttcccacgggcatctccagtctcgaccatgctctcttcgtcttgattcacacctctcaccttcgttctgcctgacgcctagcttttcgctctcgatcgcggcgtcgccgagaccactatccttccttctatacgacctcagggtcctagcgtgagcgtgattcgattgcatcacacttgacctcagcacatcatcactgtcgtcgcatatatcaccacacgttcacacccacacttgcgcctgctngtgaatagccctcactgtctttcaccagcgcagaagctgagttgtcagcaatgacatcacttcg

SEQ ID NO: 11991 - DNA, 631 bp, Emericella nidulans
cgtactcctttcgccgtagacgaatggtgcatattcccgattatgcaaaatcaacatgtgatcttttgagtcttgctttcgagcagcttggtgcttttgagttcttctgtgattgttccaataatgcttttgacatcacaccggagatctactaatgtgacgaaagggggtcaggttattcaaggctgcattcttgctgcacgtgagaggggccgaccctatgggacggtccctgtcatgcctatatgtctcctgtaacatgtcacgcggctcccaacaccagcgacctgaagatttatactctttatagaaagttcgactgcccataccactcccaaggaaaaacttacatctggattccctatatgcttctaattgttgcgcaatgtgtccttcctacaacgaggtacctggttatgggcttcttcacagaatgatcacattttgttgtgttaccactatggactctactagtcttttctcttactatctccgtatggtctccaatatttataactccttttctgtcttgatctcttagcttgtctttttatatttgctacctttattcttggtttctaacatgatattatgtgtatcttttattccgtatatactttccctaattttc

SEQ ID NO: 11992 - DNA, 467 bp, Emericella nidulans
tactatcaaggaagaggcgcaaccgaagtcgtctgatgagccgttttttttgtacaactcttcgcgcgaggagtcgtgtggggctctgacagtgtccgaggacctgctcacgcaggaggcttatgtaagatagtatatgacccatgttactcctgaccatgggactggtatgaaggtatgagaagcctgaattaggaactacctaccgtacgttgagggacggcctttttggcaggaatgtgagctcggtgacaattgggaagagatctgtgaaatttacagcagattgaagacggacattcgttgctcctgtggagagaagactgttacaaatgcgcttataactgactgaagtgttcgaacgaccccttgtggaactagccgatccgaatcgggtgccgtggcaccgttttgaaggcacataaacatggcttagtcattcttcagcgtgcatgaagcctagccag

SEQ ID NO: 11993 - DNA, 465 bp, Emericella nidulans
cgttacatctgagtacttgtttccatgaccacatgagtcgaatagaccttcacgtttgttttaccatctcctcccccgcccgcggcctccaccataaccacctccagcattcccataacccatctggctttgaccaccaccttggccaccgaatcccccttggccctgttgtccgccgactgcgcctgattgcccacccatcatcggttgggcatgctgcatgaaagacatgggatccatggatgaggggtctaatccttgcgacatcattgatgccaacatctcctgcatcatatccggattcatatctggtattcccggcatgccaggcatcagaggccgtgcgcttaccgtaactggcccagcgccgggttgggcgccaggcattgggggtagccccatagtcaggaggttctgcatatcaaccaactgcctctgttgatctgcgacttgctttcgtgactc

SEQ ID NO: 11994 - DNA, 448 bp, Emericella nidulans
tacccacctgagggccggatgtctcactgcaagggctggtttcttggtggctcaaaccgcagacctgctaattgcgctaggcctacttgcaaggcgtgatctacggccagtggaccactgcctacaaggctatcttccatgacgcgctatgcggaccctacgactggaatgctgaagggcatctaaggcgtacgtgctggtctacttttggatacacttcggcagaacgtatgcagatccgggatctgaagggctagcggacaaggccacgtttcaagaaacggcttgactatggcatgctacgattttttgtcttaccgttcctggcgggacaagctggcgcggcgccagattatccgacataaagtgcttggaacaggttaggaaacatcggctcaacctatggatacgattgaccaatctctgggctaatcaagcggtgtcgaca

SEQ ID NO: 11995 - DNA, 470 bp, Emericella nidulans
cgagccgagtagacgtgcaaacactcccagactcatccctagttccgtcaaaacaaattcagccaacagcttttttggcaatcttttcataacgtcaaccgttgtacgcttgaggataaaaacagatatcatagatacaaggcttattagcggcatgttgcgtaccataaggctacgatccttcttctcaatctaggaatgatcgaatgatacctcaaccagcaggatcctgatttatgttctatttggagcgctccttgtgatgctaatcgtgatcctcaacaaaacctggagggcacggcagatcaatcactgtgcgcaaagcgatttagaaaaaataataagtccctccccctaagaattctatatacttgttgggtattaatgaagcgattatacataatctaagggtaattgagaagcattctcttctttgttcaaaagttgtaaagttttgcgttaaccgttgt

SEQ ID NO: 11996 - DNA, 218 bp, Emericella nidulans
ggaacgagccccaagaaggcgagcaagagcgaggagggcacaaacgaccaacgcagccacacggcgagaagcgcagaaagggggaacggaagacggcaagaccaggcgccgccgcagagggcagggcgaccaggcgcgggccaagacaaaagcaaccgagaacgacgagacaacgggccaccggcagaacgcgcgccggcaaccgggacggagaacgg

SEQ ID NO: 11997 - DNA, 2827 bp, Emericella nidulans
tttagaacgtaagaaaaaggcaagggcccaaaagatcacaatgaaatttatggcgtaaacaaagcaaagtagggttttcacaaaagagctttccaaaaagaggaccatctttacctgcaagacaatgcgaaatttttgcgaaacgggcaggctagcaaaatagaagccttcaacagaggaaaaaaacgccggacaagtaaaaaaaagattcgaaggagcagcccaaataaggcaatcgataagaaattcaagataagggtggacgggtcaagaaacttgagaacgaaaggaaagggtacacggatgaagatggagaggatggtaatgagttggatcgcattgacaatgaacgagcccggcagtgggaaatcaagctcagccatttgcaagcacgctatgctacgcttgtaaacctccatacgcaggctcaacaacaataccaagaggcacaggaacgcttgaaatggttgacctcgcagcgagccggtacggcgccgttctctctgccacctatggatctagaactaccctccggggcaactatccgcccaccccggcgccatcgcagctcgctcaacagcaatgtctcgtcgccaatgaatttcccttctctagaaccatttcctactagcgtgacatacaaccctccgaccacgggctcgcctacattcgcaccagcctcgtctttctttaacattaataatggaatgaccctccctggattgaccggtgagcctgaaagttaccgtagaggttccgatttctcaatcacgaatcctcagatgagccctcgagcggacgctctgcttccgtctgatctacttggcgatgaagaatcacccgaattgccgcggcctgtcctcaaaagttttttgaatatttggaccgggtatccgattaagggtacagttttccccgttgatccatcttcaccagaatcctctggcagcaaacccgccagtctcttgggtagtcctgaggaagtacagaaaggtcctcaggaagctaattcccagactgcaccctcgggagatgcagaagaagcaccgaaaagtgcctcaagacgcttgtctggtcttttcaacttcaatcgtccgcgtggtaaaacgctcgcagaagacccgcctcttcttggaacattgaaacaagggcaaagccaatcatttccaagagaaatggatgaaatagagccaattgggcccaggcgtcgtcgcttgagctataccaccagctgggctaatccaatgtctttgctgccaagaacccacacagccggagccactccagatagctcatctgatcatctgccgtccagacgtaccgctatctccagcatattctcaccaagcagattcggatttggaagtggcagtggtttgtccaagggcgagggcgctgattctgtttcagggtacaaccagttcagtcctaggcacgatccgattgacccgtcgtcgatcttaggtacggttcggaggaggggttcattgtctcccaggccatcttccacattctcatttgacaacttactcccgcatccctcaacagataaccgtcactttggttggccttctgctgataagcctggtcaccgaagccctctcggtttcgactggacatcaccgtccacgtggtcgagaactcagtctcggcgcccttctacgactcaatatggatcctcgggccatcttcctctgggttttacagctgaacctgacttccttgatgactctttcgagaggcagggtcggccactgcaagccccgattggtacgcggccttcgtcttcgcatcgaccaattactccaaaattgaatccggcagcgctaccttcaaaaccatattcaggagcaagggctcagagaagaaggaggataaagagaagggccagactactgaggaggcggacacgtcttttgacatgtccttcgaccatggctctccctcagaatcccgcgcatcgagagactctcgatccctgtctagcttccccggagactcatacgaatcccttgagcgcatgccatctgcaacgtctgcagaaaacgcgagctcgaaagaatcctttatccgaaagatcacccggaaaggcagctccagcaagtttggctcttggaaagaccgctccggtttgttctccaggaagagcgatgcttcgcaaggcgacgtcgatgaagagggcgatagcgaggcacaactggctaagagcatcgacagcactgtgtccagcgcgcctagcaggagcagccttagttttttcagccgcaagtcgaagaaatccgacaaggcagctagtgagacgagcgagcggcctagcgagcggattagcgagtatggcgacgatgagataccggaagaagaaactatctagcttattgttcattcactctttatactctcgtatcttcttatagtatagacgagctgtcccacacagtatttattagactatacatttgctctcccgcacccagactattctcagtaatttctatacgtagagcacttgaaaattccacttttatcaggccaggttctgaatcaagtcaagctcggccatatatggtagatgaagagcgtcggttatcgacgcaagttcctcgttttccccacaatctcttcatcacccataacccaaagaacaacaaactcggcaatcaacaagcgcgtgataatattcaaactgcatataaactgcatataataagcataaaatctgcaaatagccaccaagatggcgaattcaaggtacctcggccctctcccttagagtctcagctaacagcgcaccagattcgaatatgttaaggcattcgagcagccagac

SEQ ID NO: 11998 - DNA, 143 bp, Emericella nidulans
gtaatctaaccagcggttatcttaaggcacgtgtcgcagcgtgtgctaaacccagcattgaaatcaaacctggtcaagctcgttgggatcgctactcggtagctcctgggctagaagtcatgataggactcgagggacagacc

SEQ ID NO: 11999 - DNA, 3283 bp, Emericella nidulans
gaaaatccgtggatcccgaaataaagtgtcgatgcaggactttttggcagatttaccccagagtcggatgacactgggaagctacgtccagttgataaaacgtactttgtaccgaagtcacgagacaacaagacaactattggcttctttagtagaataagtggccccaagccggatatgcgttatatgcatccgtccaacccacttgtctgcttgcttcgagaacaaacaatcccacagaaagtacgcatccaaggaaaggagtatataagtggaagaaaaatttgacataccatccaaccaatgtgcgccggagagcgtaagttttatgtctgtggcgcttcttgaccccattcactcgtcttctatctttcccacatgttgataactgtcttcggctttgcctctccatgcaatatgataaggagaaaaaaataaataatagaaaaatgtccctaactacagcattcataatcaaacatgatcaaacgtcccagaaagcggttcaggcaagcaagtacatagggtagagagtaaaaatagtgcaaaatggctaaaaatacatgagaatataatgtcaacgtcgtctctttcgaagacgatgctccttccccttcttagacttcttcatgctcttgtctacaggaagcacgagcggctcgtctttcatattccattccatgaacctcagcaggtagtcgtcgatatggccaacggacggatcagagtccgctgtgtcttcggcgacctcggcattgtttgcgtttagggactgctgcgcctcgtctggtaggggtgtgcctgcttgcgttggagtctggccggcgccggaggcagaagccgaggcagcggtgacgccgctggcattagcattggcacgatcatcgaaatcgccgtcatcagcgtgttcgagttctttctgcgcgttcttagcggcgtcgatatcttctttgtcctcggcctgctcgaatacgcgcgaagtgttggtgactcggttctcgaggacgcggtccatggcagcactggcctcgtctttaagagcctcgtcattgccaatcatatcgcgcacgtcgagcttcgtgaaataatcagttgtgaactcgccttcttggatgacaacgtcgtccagcatgcgcttttggttcgccttgcggaggatgttggattcgattgtgtactctgagacgaagcgatagatgtgcacgtcgcgggtttgcccaatacgatggcagcggtcctggcactgtttgtccatagctggattccagtctaagtcatagaatatcaccgtgtcggcgcctgtcaagttgatacctagacctccagaacgactggacaggatgaatgccaggatgcgattgtcattattgaaccgatccgtgaggatctgccgctgctcaactttggtcgtaccatccagacgaagataacggtgcccgtggatgttaaggaactgctctagcacgtctagcattttagtcatctgagtaaaaatcaacgctcggtgaccgccggctttaagatcgcgtagcagcttgtccagtctctgtagtttttcacagtcatactgcagaagccttttgtctgggaaagcgatagataggcgcatctgagcctcgtggaagggatcatgtggcggaaatctctccttgttcgtaaggtgtcgcgttgagatgggtgtcaaagcggcttctgtaacccctgcagcaaccgctgccggagtaacgcaggcaaagcgttggatatatccatccatcgcttgagatctttcctccagagacatcatcatcgaggccaatacagaggattggctggataaccaatccgcgtacgagcgtttccgtaagggaccatgggcagtcggccgctgtttgctgtctgccgtaaggaactcaataaggctgcttccatacacgggacgccgaccatggcgcttggactcaaaatacagagatctttccagttcggccattctcctcttcctgcagtcgttctccaatgcctccaatgtagactgtacggttgatccattaaatttcatctcccagtttgtccggtggtactgacgctcgcggagtgtgttaaagggagcataagccataatcctggcgctatcatccgccagccttcgcgatatgtcctcccttgagatgggcaccaggttgaggaaatccaaatcgagcttttccaagggatgttggtaaagcagacgccgccgaactagggcttcgcttgtctcaaactccgttgcgacggaacgtggcatcgcaaatgaggttgagatcggccgtgtctcgaagagatcggggtgattacagactttgcgtagctgcatcaagcagttgatgatcgacagatagttcccggatgcaagcgtctccttggtctgtgccctagacatgaagccatcgtacaagtatctttgtcgctttgatagtctgcaatacacgacatgctcgtacttgccgggcatttgtttctcgacgtcagcttttagacgacgcaaaatatacggtcgcaggacagtatgcaactttgtcactacttgtttcgcctcgtcgtccattgtttcccggccatgctccaagatctgctctacgggacgccgaaaccattctgagaagttcctcaagtcggcaaagccttcaataccagcctcgtcaccatcggttggcatcaaaaagaagagaagggaccacagctcggtaagattattttgaaggggggttccagtaagcaagagtcgcgctctggtgcgaaacgtgagcagagcttgccatctctgggagcgaaagttcttgatgttgtgcgcctcgtcaagaatcatgtaatgccaacttcttcgcttgagaacctgctgatcttgtaggactaattggtatgatgtgatcagaacgttccaactgttgtcatccatccaacccctgcgtttttgccggcgttcttcttggttgccatagtacgtcatgattttgaaccccgggcaccattttttgaactccatttcccagttaagaatgacactggtgggaaccacgacaagatgcggaccccaaactccatgttctactgccaggtgagcaagcagggcaatggtttgaatagtctttcccagacccatctcatccgcgagaatgccgttgatatgattcgaataaagacccgctagccagtctaaaccaaaatgctgatactctcgcagggtccctcgcagaagatgtggtatcggagtctttaagccaggtccaggcgattcgctgggctgtgcgtgcttctctgctgg

SEQ ID NO: 12000 - DNA, 345 bp, Emericella nidulans
cagagatcttggtcttctctagaatctcggcacgcatgcgactgacagcctcatctggatcaagctgcttttcgcggcagtaagcggtaatgttcaaataggcttcatcaatgctcgcactctcgaactgagggtcatattgtgcaagtatggcgcggatttcttgagctttcgccgtatacttttcgtagttttgcggcaggcaaattaactggggacacaacttcttagcgacaaaggatgccatgccgcttcggcagccaaacttcctagcctcatagttgcaagtcgtcagaacgccctttccaacagccatgggtacagttttcagctccggtctatcca

SEQ ID NO: 12001 - DNA, 116 bp, Emericella nidulans
cttcacgccatcggagataaacatagaagtcaacttcccgctcctgatggaactagtgtgcatcccctcaatgtaatcctataatgacaagcctgaattgcaatcacatcaataaa

SEQ ID NO: 12002 - DNA, 487 bp, Emericella nidulans
cttgctacctgttgggtaacaaccaccttagcagcaacagccatgatccgaatattatggactggctggaggtttttatcaacgtcacactacgtacgtttaacagtcttgacgaccataaaggtatggaccgtgccctacgatcactctataacctccagggccctcttctatgcggttttctgcatgactatctaattggtgacaagctcacctttcctacgttaaggcgcaaatttactgccaacatgcctaatgcttgtgagcatcttaaccaaggcctccggagcatgaccatgcggccttatttgtaaattggcctgactgccacttcctacgaaggccgtatactaataaccacattaggccgttatgggacatggcctgttcatatagctaagactcttcaatgcatgctcttaccttcaatggccccttacattcttgtagacttaccaccctgaaccaaaactgtactaacatactt

SEQ ID NO: 12003 - DNA, 99 bp, Emericella nidulans
ataatcgcatacagtatatggagcagcattgagtccatgattcccttgcggtatcacgagtactcgagcattgaaccagagatcgaggacttgggcctc

SEQ ID NO: 12004 - DNA, 132 bp, Emericella nidulans
caggagtgcatagaggcggcatgtaaacgtgagggatctgctgtggcgtcgacgacttgcaggagcgctaagagtacgtagccaacgcgtatagcgagcatggagtccgggaacgtctcattcacatcgagg

SEQ ID NO: 12005 - DNA, 1556 bp, Emericella nidulans
gccttttttttttatcagggaccatgagagcgctgcatgtttctgacgctttgagtctcatacatcgaactctaatccgaagtgcaacacccttgatcattgcaagctgaccctatggccggagtagcctaattcccacccgcaagctgcaaattgatcactttcattcttattcgtcgagccagaggcccatcacgccagaggttgaatgtcgaacttatccatttcaggcccctgggcaaaacagaccagaattgagcacttgatgttctaggcaaagccagactgcccgtataaagtgaatggcttttggaaccctacatttggcaagtggtcaaagaagatcagacatgcgctggaaattctccagcttgaccggtcgtcccaaccttctcttttccctccacctcaggcagtccagtctacctaggctatatcggcaacccgggagactgcgaccgtgcggccgctaccgcgtccttcttcaacagccggcttccaaattcaccttcaagtcggcgcaatgctcatcgacaacgcaagtaaggcctacaaaggaggggaggtactgaaaggaagttttctatgtgcaagttatgaagcgtcaatagaatgatacaatatataaatactgggaaaaccagttgctcgtacagaacaacacgcgagcgctcccttctagtcaatgcaatagcaacaactctaaagccaatagaacaagtaagaagtctatatcaacccgatgcatccagtaatcctatgcccaggaggcctagcataacagctctcgcccacgagacaactctaatttacagcgcagccctctcctccccgcccaaccgttgccccaacatctccttcgcctccctacacatgccgccaacatcagcatccgtgatgatcgcgttccggcgattaatcgcctcctcaatcttccggaagtcgcgtcccaccccctcagcgcgccactcataacaatcgccgatgaaccgactgctctgtacaagccactgtgtgcgctcgcggcgacaggcgtcgaagacagccagggctgtctcaatgtcgctgttattttgcacgcgcgggtcagagaggagcgtagcaaggacggctgtgtcttcaaggcagtagccggcgccggcgccgtggtgcggggatgtggcatgtgcggcgtcaccggagatggcgagacggcccttgtggaaagtgggaacgggatggacgcccaagtcaaagattgcccactatttcgctgttagtgattcctgtttcctgtggccgaaatcgagggtatttgcgggggtgggagtacgtacaatgctgagcttggggtcacagagtttgaggagcttggtgacattaggtccgtaacctgcgaagtcgcgaagagcttcttcgcgtgtgccgtcgcgagtcaggcgagtacggtcggtccaggtgtcgggggttgtatgaaaggcgacgatgttgagggtcttaccgccattgacgggaaatgtgagcatatggttattagggcccatctggtaggattagcaggattctaacaggaaacc

SEQ ID NO: 12006 - DNA, 1831 bp, Emericella nidulans
gttaagggttacccttccgggctggctgcagaggcaaagcatatgattggagacaacaaggtcggcacaggttgacgcgactcatgcgagatccagcagactggagtgcataatagtgttccactctagtcgcagatacacaaccttgagttgtactccataagtatggagtactccgtaccaactactacgtatggagacggctgacgaccgattaccgtccagtggccgtgattctccggccagccaagctagcggttaatcagctagctgccaactctatgctggcgatgcccatgcaaacgggaagcccggagtacatcctcatatccacgatgtgattggaagttcggactcggctccgaacgcctgagtcgtagcatttattcggaatcgattccgttggggttggtacgcttcgggtgaactccggggacaattctggggacagcatcagatagagaagtatacttgccgcaactgttggagacgtccaccctgtttcgctatcgtggtattttctgtatcactggttgtcgcaaatatacttgcgatctgaacgagatctgaacgagtggcgtcacgatatcggatgcgatgctaataatccaggcacgttaaacgtttgggctgcaggctggggagagcgaagagttcacctcaatctccaaattgtatgaacaacggattcgaacgatgtatctgaatcatggaatacatatttggagggcaaattgtcggctgcttaatagaaggcattgccgttctacccgcgatgcccccgaagtccacatccgaagagggtccactagcccgcaagcgtggtttaccccagatccgacaagccttggtgggttccgattcacctccatgaattcaaatgatgtgccccattcactgccgttgatcatagataaaagctcagcggtcttggtgtcgcatctcttcagcccacctttcgaccaaatccaagacgacgtagacgattataccagtggcgtgttaccagtacgcccttccgataacagaagaagatcccagaaaaacacccactggataccgcgatgaccccttcaacgaagccgaaaaccttccatgttgccatcgttggcggtggaattgccggtctgagcttggctatcgcccttcatcatcgcgacgtctcagtcaagatctacgagcaagcccatgcctttgccgaagtcggcgctggcgtctccttcgggccgaatgcagtcgaggccatgaaactctgccacagtgggatatatgaggcattcaagaaagtgtgcacacggaatctgtggccggagaaggagaaagtgtggttcgactacctggacggatacacacacaatgaagaggagtacaatgccgcttcgagtgggaaggagagcaagaggcagaaaatcgcattcacgatcacaaatagtctcgggcagacgggggtccatcgcgcacattttctggacgagctggtcaagttggtcccccaggaaattgcgcagttcaataagcggctccagaacataacagagcggggagacgggaagctagtgctcaagtttgcggatggggtggaggacgaggcagatgtggtcattggttgcgatgggatcaagtccagggtaaggcaaattctcgtcggggaggaccatccctcagcgcacccatcatttacacacaagtatgcctaccgcgggctggtgcccatggacaaggcgatcgaggcaattggagaggaacttgcctccaataaatgcatgcatgtatgtctcttgaatatctttccctggtttcctgcatagaatcctgcaaatacataccagat

SEQ ID NO: 12007 - DNA, 445 bp, Emericella nidulans
tgctcaggcgatacccactgaggctcatgccaggccggagtgagccgttgctacccgtttgataaccgatgccgggaagagccaagagacgcacgctctgaaagaaatagagacgttcaattacctatgcctgcatgaaccccttaatttccgttgcgacagagagtgatgatacagcaatccatctgcttggataggtcttatagcgatgtagacattatcgtaggtgtgagtcagcacgcagcgctcatgacttatgcggctccggtagagggtcccctttaactcttggacagggtaacccttaccttcttggtgttggtgggaatatatccccccgccaggagtggcttttttgaggtcgggctgagctcaactggtaggtgaatcaacgagtatttagggttcaaaccgattcttggggagggacttaatcagtttgacg

SEQ ID NO: 12008 - DNA, 150 bp, Emericella nidulans
atgccaggtaatagaagatagttcgaggcatcgacctctgggtattggagagatcgaccgtgattgtgtaactgcctacggtagcactcagcagtttatgaagaggttgatcatattgtttgctggcaacgagattgatctattcgacca

SEQ ID NO: 12009 - DNA, 996 bp, Emericella nidulans
gtgtgctctttagaaagtgatgagcagtgagcaggcagaaaagatggccgtttggacgtaagactattgccgcctttaagtgcggtgttttcagatcctcgggtcaggagtgtgaacagcaggcagcactgggcttctcccaacaagccgctacccaatcctttttttttttttttcggatgccattgactatatcgtgttccaaagctagaccatatttgccatgcctatgagaattgatatttttgtactgtgagtatcgactaccatgtgaaaaagcatcattctttacatggaagcggccccacatcagcttggagcctcgaaccgcgcggtttctggccggtggtcaaacatcctgatggcgacctcgtcacctggagctcgaccttccaccttcacagcctacaacaataactattgagtttttttgcctttgttagtgtactatttagaggcccatgccgcagaatatctcagcacaccggtcaatgtgactatgtctctccactcgaatgccgcctctcgatcggtctttcccaagggcccgagtttcacccttgaggatttctcgagtcgcgactacattgtcaaggagtttatcgaagctctttccgattccgcaatttcaagccgccgttcttcgcttggccctgcaaatggaaaccagccctttgacccaaagcccctcattcggactttcgaacatgcacagcgccgtctaggggaattgtcaggggatctggaaataagagagaatgagttgtcggcagctgtccgtagggctgaagctcagcattcccagaacctcaatatactaggacggaagctgaagcaagcaattgagtcgtttcaacagctggatacatcatttcagagcgctggacctggcgatactgctttaggcagcggaaatatggctgtggaaacgggaagagagctggaagaacaagatcgacagagacgccgcgcgctcgatgctcacggtcttaccaa

SEQ ID NO: 12010 - DNA, 109 bp, Emericella nidulans
cggggaacatatcctcctccaaggagacgagagtcgagccttacagcagatgaagacacggcatctgatactccatacgaagtacggccgatgatcacagcagtctgac

SEQ ID NO: 12011 - DNA, 1093 bp, Emericella nidulans
ctctttgagtaggtggttccggacggaactgtccgcccaatgggtttagacatctttttttcgagaggcatatataaaacagtgtggtagttgtgttatcagtcgagtacatgcgcgcaaccgggtgataaagaatgtatcagtaggagagccgagagccgacagcaatatcttttggagcatcaacaaagaaatgaatacgcatcaaagaggtgtaagcgagtgtcagcgaaggaaagctggtgtatctgaaactatcggcgtaattgaagtggtcacaacgaaagatatctcggattggcgggctaaaagtaggaccaaacaagggtcagacagacgaaccgagcgctgtgagaggggcatgctcaccttggcagaaggagttcccagcataatcgggcgttcagatagagattcagagattcagctgatgagttgtccggggtactcgtaagcagggtatatgtaatcggcgcgtggcttgctgacgggcaaggtttaaagaaagacaatagaaagaacgtggaagcagcagctaggagacaatcataggcataaaaaaagaaaagaaaatcgctgagcggcaaggcttgctcgtccaacaggctgaagcgaggctgactaggatcaaaagacaaaagaggatagtcgttggctgcagccacgtccggcaaagatcaaagcggtagctccggcgctccaggtgggaaaagaaacgacaggcgggaccagtggagcttatcagacggggccgcacgcagaaaaactcatgtcaggcagagagtggtggatgctgagtcgcattgcataaccggcgaaacgggcgtttgagatatgtggaggtacgccaactggggggagagttcaggcacagttctggctgcgttgatgacgaaagtaccgaagaagacgattgcatagaattcaaaacaacaaaataagcaatcgaccattaaaaattgagatgaacagagcaggaacaaaaaggagagcggatggaggggaaattgcagaagacgggggaggagggcctgaggtctgtgcttgtttcagatcgcgtgtttgagaatccgtgcctggaagactactgagt

SEQ ID NO: 12012 - DNA, 1205 bp, Emericella nidulans
cgacaccaaagcccaagcctaggtccaggtttgttctagacggaggtcaagatgcatcattcccacgccattgccgctagactccgccttcgactcacgctgaccatacgggccgttgcgcaaccccagatgatttaaaattcttcagattctgcagtgttactagcgcgctcgcgagtccgcccactgtgaagggggcactatagatggggtgagaaaacggagtcatgcaggtgtctttcacacctggccaggtggcattcgcttattttggagtggggtagccataccaatcaaggaaacaagtaaacgaagtattgtgggtaaactgcatggtaggctctaggattcggagatattacatgactctgagtgctaagtattatcagatcagatggtgggaaagcacgtcattgtgttcgtctattgcatccgcaacgaaccaatgcaggaagttcttcaggatagaggatagactagaaatctcacgggcagcaaaaacagagagtatggtaaggccgaggttgacattgacaaacgctgtcttcaagggagactgccagcaccaagtattgtctgaaatctgttgagccagtttattacaaaataaatgtgcactaaactagacagctatatttggacgctgcacttgcagcaacattgaaaacttccttcaccacaaagaatccttgtggtaaaaaaacctggctattgcagccattagcatggaactaccttaagctgcagcaactgcagcagaaaccccaaacaaccgctctcgcttcatgagcaagctcagcaccgcaacaagagcgccggcagcaatttccagtgcatatgctttgctgataccagatacgattgcgttgagtacttgggtgtgggtctcgctgctcagcgtgtccagcagatcactggtcccttgaattgccgcctcaatgtccgagcgggagacattcgggaggatcttggggatttcagacaaacactcgttcaagaatatcgcgttcgcaatggccatgacgatggtgataccggcgaactgcgctagtgtaatgaatcctacggctgccgggacgccttctggctcgacgacggcctgtgctacggcaaaggatgcctggataaaggcacccacgccgacgcccatcagaacagtgtacccgtagattcgactggtggaggtggctagatcgacggtgtac

SEQ ID NO: 12013 - DNA, 1276 bp, Emericella nidulans
gcctcgaatggtttcgagagagagtgcaatgcatgtccgattttgttgattgctttctcctttggacggcttaggatgctctttgtgggattagaaggatcgggcgtgaacgcgtccggctcgaagaagaagcgaatcttgtcgccgctggtgaggaagtagtcgtcgccgacgtgaggcttgttgtctttttcgtcatcgccagtcgtaaattgtgttagggggtgtgtggagaggtcgaacgatgtgaggagggaggttgtttcggtgatcagagcgttgatttgttggggagtgaggtagtctggaaggacgaggtagccgttctcgtggaaggaggtgacttgggcgggggtcaggccgggcattttggatcgctagcttctcaatttctattttgaggcactgaatgtgggtagagaagcaagagcagaaatgaagcgaaagttggagaaacggccgtacgatggtgggaagatacaacgcttatctgcggggttctggattggtcgcgatagcttcatgctatccgtattgggcttagggcgctttatagtgagcagtggagtttgcctcagagcaagcctgtactcggagtactgtggcactatgattgaatgggacatacatgtcactgacttcacgataaatatcctgtcttcttcgaagatgtatcaattgactggaggagcatgaaacaacccaatccaatagttgccccaacaatgacatcaaccctggccactcggtctatatatcccgtcaagagggcgcctctagacatccaaaacaaacacactctacccctctatataacaaaagacgatttaaacaattatatctcgaagcagaatgcccttcagcacaaccacctcctcaacctccaccttcttcagtagttcttccagctccttttcccgcgacggccaacaacccgaagaacaccattctgcccaccgttacagcactcaaactcagacgtctcctgacggcacaacgaccgttcgtacgatcaggcaggacttgggccagcctgttattgttgaggaacaccggtacgataaagatggacgggaacttgcggcgctgcccgatgcgcagagtgatgggatgaggaggattgaggacgtgggcgatgaagagttcgaatgaggtcgatatcagaaagattcgagggatgaataggttcaactagtggataatgaatcaaacgacaatgctatgctatgcgtgatgatatgactatagttacgttgttttatttttaaataagacg

SEQ ID NO: 12014 - DNA, 458 bp, Emericella nidulans
ccctcatatacttcatgcctgcgacaccctgacgtacgcgactcagttgtcgagcgacatctccggagcctacgttgcgctcatatacctcccgaaagggatccaggccctctcgagacagcggagatactccgataggtcgtcactcaaatctagcttgatctgagctcgcctcgtattaatggcctgcaggatccgcggacagctcagtgacaccagcgcagttgacaggttttgttgaagctcttggaggacttagcactgacgcgaccatggcagcgtgtaatggttttggccatgtcgggcacatggggaacttcctggttgcggcctatggctacctacaatgccttctacccctcaactgatcatggctggctggtcccactactgagaatcttaacctcacagttatcatcacgcgccgataccgcgtgctttagccctcttacaatctc

SEQ ID NO: 12015 - DNA, 484 bp, Emericella nidulans
cctcatttccgcgggacttccagacccacccgctgccctcatgggccggccactgtgccgccgcaagctgtttttgggcgatggcaaggaccgataggacattgtccccttagcagaatgcagcagcagtccgattgctgttactcaagactgctcgcgctagacagacactattggaggacacgatagacacaagctcgatcagctggcccggggcactgcacaggccatccttgcagctggtgcaactaggacaactgacgcggccatgccagagtgcaacgattatggctatgagcgggacatgcgggccttcctggtcagggctggtggggcacccgaacacccaagagccgtctaactgtgtaatgcgcgcgaggatctgcatacaaagcatttctaccttgactaatgggctccagagcgacatccgggttcaagcgcctcgagtcgacttagcatcataatccccacctaaacgaag

SEQ ID NO: 12016 - DNA, 122 bp, Emericella nidulans
agttttaagtaatggattgttgattgttggagtagaatagagaagttgaggatggaagaggggataaagtgtgagtatttaagtggaattgtttgtagtagtttgaaaggaagtattgtagg

SEQ ID NO: 12017 - DNA, 313 bp, Emericella nidulans
acgaaggagccaagaaaaggagcaaaacaaacgcgcaaaacaggaaggagcaaacgggcgggaccccccccagagcacgaaccaagagaacgacgacacaaaaagggcaaggaaagagcgaccacgaggcagaacgaaggaacgcgaggccaacggagggagagcaggcgacaggagcgggcgaggagccgccgacgacccaggagcggcgcacgccagacgagaaagagagaggcaggagagacccaaggcccggagacaggacgcacccggaggagcacggcgaggaagccggaggaggcagcaggcagga

SEQ ID NO: 12018 - DNA, 571 bp, Emericella nidulans
tgcccggaacttagtgggggtgcgtgcggctgttatgatggcgctgggtgagacacgaacttatgtctggagtttttttccaagcagccaggggaggagaaagaggatccatgcacaacgcacttgattggtaggacatgaagggtagcatactcagggcaggtgttgtgataaggctaaaggctaatggggagaacgcgtgctgtgcgtaatcttgacgacgctatttgacgcacgccagatggagtgaaagctgggaaaaagtagacggatctgcagcagagaacggtagccacgcccgtcttacagaataggttttaggaattcgaggctgtgagcaggcacgcgaagagagctgattgcaaaggaacggccaacggtgtgggctgacagcgagagggtacctatggatggggctggacacttatttgacccaggagatggagagcataaaataccgagctgcgtcgccgatgaccgcagattccaggcgcaaggttgttgggggtggagcaagtccatgggctaaggttgcgtcgggaagaaggtcgatactgtttaaaccgtcagc

SEQ ID NO: 12019 - DNA, 192 bp, Emericella nidulans
cttcttagtagagcagttcacagacagactgcgatatgtcgccccttcccgtggccagacagcgcgaagatagggagcagctaggagagtggaggggggcgaacgcgacaagtaaaggtagggctggatcccaagagagcccctggggactgcagaagcggcaagcggaccccgcgcagggccaggagacag

SEQ ID NO: 12020 - DNA, 128 bp, Emericella nidulans
ggctatacaacaatagcattatctagatatgagtatgtcgacaataccgaccggaagatatactgaacgctgactaacagtaacttggactattgttgactatcagcagtacagaattgatttgcaga

SEQ ID NO: 12021 - DNA, 2913 bp, Emericella nidulans
tcgcaccttcgttggtcttctcggccggtcctcgcgatatcggcgccggaaatagctcctgtcgtgttcgaagattatgcatttcactagtttactgtaggggaatctcccaaccaccttttccccctctttccttgcatattgtacttgtgcactgctcttttccttcctcaccaggccctttgcactcatccttgctaacacataatcatactgccgtataaaacatgctaacgtcatctctagctacgggcgacttgttcgatgtgatatccctgcaccacggactccttccagccgcttgtatgccttatccagatagcgtcacctggccttcccaatattgacatctattccaggtttgcatttgtggagtacgaaagccgtcgtgatgcagatgacgcataccacgagatgcacaacaaacggattggtcgcgatgatctattaaagattgaggtgagttacttgatggaggtgttttgttactgttctaattctaatttcatatctagtgggctaggactcccccttctgcttcctggcgctttgactctggtcgcgaccgccgccgggaccgtactcctccacgccgtggccgctctccttctcctcgtcgtgctcgtggggagtactcgccgcgtagagacgacaggtacgatcgtgactatgacagacacgaccgtgattatgaacgacgtgaccgagactatgatcgccgggaccgtgactatgatcgccgggaccgtgaccgctctcgagaccgatcccgcagccctgacgatagggatcgtgacgtgaaggaagatcgagaaagacgggatgacgagcgcgagaggcgtgacgatgagcgtgagaatgggcccaatggcgaagatagaaagggtgagtctaacctggacccccacgtcagaacgtctactgaataggacagttccgttagagcccttgacgtctgctcacgatgagcttgatactgctgagtagatcctctgccacgaaagtataaatgcttaatttcattacctgccgagtttacgcgggagccggtggtacactgacatcttaacatcaagcatggaatcccccctccttttttggaagatggaccggcacttagcgtaaagtctgttcttatccgtctcctcgctattgccgcgtcctttctctgttctgtttcattcaattcgtctcatattttcttccgtttgttggtcattattgtcttcgtgcgtttgttctcaaaatcccgttgccacacggacaaggtgaaacgaaggttcgaatatcgggtaggagaaagggtgttggtaaagatatgacggctaagtgttcattacctgtgaaaagggctttactattgctttacgtggtattcagaattcgcatagcagcgggaacgagtgccgaactcacgccgaacggtctattttattttaccattcccacctccgccgaatcctgtcgtccttgcgttaatctcgattaagccgtccgttcttcgccttccgttcgcagatttaaatttagacgattttaatcccagatcctcgtccttgccgttccggtcgtgattccctgtggccgttttaagactgttccgattgttgtctatagtagccgtaggattttactgtatccagagtctcggacgaggcccatatattataggtaggtgcagaggaagtgaattagctggaatcttgattagtatgaggctcagctgcccttgctcgctaagacttgacaggctgggtcatttggaacagggccgttgccatccttgacagggtgaagtgctcgatgagtttcgcctacgcctatggacattctaggtacaagacaaagctacggagcactttcggaggtagactaaacacctcatgtcttcaggcgtgttgagcaatacatactatcggcctactacttatcgtgctcttataactcgtcctctgatgcgtcgggaaccaatcaccggtgttcacctgggcccctgctggctgagggagttttctcattggagtgttagtctaggctgcattgctaagcgttgatatcgacgtatgaaattacagacatgcggcggagcacaatgctgcagaacccctccctaatagttcacaggctgcagccgtgaagcattacattttttcgtacgtagccattagagagcctagaaaatactatttagagaaacaggtccataccagtgcaggtactagggcaacacttaccaataaatgtagtcaccaggcgagaccggacctgacagatatcctcaggcaccaaccagatggttgcacccagcttgcgagcgatactgatgcttaatttcgcgtttgcatacgcctgttcatcagtctgaccaggagtcacgagatcataatcgacgtaggaagccttcatgccgttaagaacatcaagaaggaacacgcctgatccaattgactggtccttgaaactgcgtatcgaagagctgcggccacctttgcgagtcatgtcattggcccatttaatcatttctgagtcggtgatctcgtgtttgcccaaacgacttgcaaggcttgagagggtattggtgatatcccgctcatcaattgccataccaaccctagcgtgagggtccgctgaccatcagtaatatcggcaccctgcacacccaccaaagagaaaccatgatgtttgcctagttcgatagcataattggtattctcgactgccttaaagcgcatcatctcttgcccagatgccggaggtttgttgacatgcctacagttgacactatgaggaatgactttatcgtatgcctgcatcaagatggtcccgacccgaagatcgtcaaacaacgaattgacagcaggttgtacatcgagcgagttcaccacagaagtgacactctggcttcccgtcccc

SEQ ID NO: 12022 - DNA, 784 bp, Emericella nidulans
aggctacttccgtcctgtatgagaatcggggctgtacgctactctctttctaccggtttatatccacgcagcggttcacggaacggtaaggctgcggcacatatcgtgattatataagataacatattgtgcataaatgctgcgtaaaaacagacggagtctgaaattgccgatacgagaattgccaaccggcagtagtaagaaaaaaagttagccgccgacatcaaaagaaggcttgggaaattcgatcggagtttccagattcgggcccgagggtacatattcgagcatcctttgttgagttagatcctagtgagagtctaggcggggcctagaactctgggtttcgattttaggcttcgggtaacaaacaatgccaaagaacaagggagaagcgaaaaagccctttgcacttaacccgggtaagggaaacagagcgctaaacgcttacctgggaggggaaaggcagaccaccggagggagggctgacagggcgccattttttgggtgggaatttagcgccactcttcaaggttaaccgaagagtaaaggtcgggaaaggttccggctttttcatagttagattgccagggctttgggcaaatttaggggctccgggaattgccgcggcccaatggggggtttccctagatttcccaattaaacttttgcaagggggcggtttggccgtccctcaaccattaggtgggcttgctggatattctctccagactatggtgataaaccccgtgtgtctcatttatgttttgaaaagctgctctgt

SEQ ID NO: 12023 - DNA, 583 bp, Emericella nidulans
tcgggcgtcgcttgtaaatgtcacacaaaagctcatgaattccatggggcctcagcttttgcttcagactgtactttacgccagaataggcattgcagcccttcacgggttatatgtttcgagctaacctggcattcaactgaaagtgtactcaccttgcctggctgagaagatgcgaaattccacattgataccggagcagcgcgccttttgaagaccacctgtaaagcaccttcccgagctggcaacttgtaagctctgaagccgtaattccctttcaaggccgattacagtagatagctagccgcatgatgggttattttacgaggggttacccccaaagggagctatgacactttgaaggattccaacccctaaaaccggaaaaaaccgggggttcttttttgggccccttaaacctaaaccccaaaaatacaaaatgggcttttccccttgccccctttttccaagggggtccattttaaaaggagggttttctttcttcgggccccgcgaattagaaggcccttctctttttaacctgagatagtgccccttgaagggacctcctccccccttcgtt

SEQ ID NO: 12024 - DNA, 3369 bp, Emericella nidulans
ctgtcatcttctgcgccggcctgcatggttagggctgatctgtcacgtgaaatacatggtcaaacggacgaagtagttgatactaaatgaccatttgataacatgttttatactcatttcgatccagtaatcaagaggattgattcgttgtgccgtaccgtgccgtatcgtgccgtagcaaagccgaaaacgaccccaggccagtttcaacccaatagcatctttcagaccatgagggtttgcgattgcttcccacgcagctcgacgcaattggttatatctgtactgtaaatcccagcacccgatattgttgatatatttattcagactttggctttaacaattctttctagtgggagttgagcgactgaaagcgagtacgtgccagacccagccaggccgactgtaaatgcccctataagtactctgcgctaaaggctccctctgcaatatcgcttggggcgtgtgctgcagtcttgcaatggcctcagccacgcagctggtcactaccacatctgatcccacgtagcatcgttcaatatgtcgaagaatccataatcaacaggcaacgagtccacgggcatagacagttccaaatggctgggcaatgagttcatcggactcagctctggtactccgtgctcagacatttcataagagtcgtaagacagttcggcattcaagtccagcggaattgtagcatcgaaatcacctctgtcaacagggttgagttgtgtcgctgtagagaacatttcgtcggatgtagccgagagcgagagtctacgaagattgcgcgcaatatattttgccggactccacgaattggacagttcatcaagcaccgttaggcaaagattcagcttattcttcagcgaggcgatagcgggtgagactaagcttgttttggcttcagcttcgacttcagctagcagaactaaagcagctgataatgtgcaatgggtggccgtgatagggcttttctggaagccgccaaagacgtgacgatatttttgggcagtgaggcagattgccctggctgattcacggctttccgtcaaggcaatgttgactgcttcgcgatccgtttcgggttgctttcttgtgatgtatggcttagcgaggaggattcttgtagtatgatagaccatatggagggtgtaggcttggggataggtgtttggggttgggcgattgattcggagttcggtaggtaggtcatagaaccatgatttgaggtcaagcaggcaagaatggaggaaagaagaccgctgatgctctttcaataggggctttggggcccatctgaaggtgttaggtgctcgtaagcgtgttcagtggcctacttacagtgagagtataatcctttcctgtatttggctaatgccaattattgctcgtcgtagctgcttaaattctttctgagcggagctatctgtatccgggacttcttcatcctctggggctttgacagctccttgcgagttctatagacgttagagcttattcaagaacagactaaagagcgtaccagcatagagcaaatccgcccagtgtaattagaagacagtttatcatggaagtataaagaccaataaatctgccttcgcagctgaatttctcggtgtgataagatattcatctcttgaaatccggctgggtccaggttcaagcccatgtccaggcacaagcggttcgccattccatggtggagccagcccgcggcgtcagcgccagtcgcctgttcatgtaagtacgctaatcatcatacgacagggtccgctcactatataaaacatgcctaatatagccagggcctggattgtagttagactgggggtttccatctccttgtgaagatagttctttgcgtgctcaaggaagagtttgcctgctgtgttaggatcactaggatctgatcggacatccacgcggtctgtaaaccgcgatcccaacgcaagaatactgaaatgtagcagcggactccagtatcgcccgccagagctcataccatcgcggaaaagacgttcgtcaacaacagaaaaccacgggtgttcccaagtaaagtacaacccgatcaaatgatcttgtatgtattcagagatcccgttcttagcagtgaccgcgtcggcacggtcacagtctgcaattgaaggaacggtctcttcggcatgcagagcggacgagctctggaactggagccggccactcgtcggcccgaaatagcgcagctcgccatccttttcgaaattcagcgactcttcaaatgcaagtctaccctcgaaactctcggtgagttcatctatcgcctgcccacattcgttgtctttccgtgggtcaatcccatgccgctctaataagcgctccagtgagtcaatcttctgcctcagcgaaagcacatacgccttggaggctggtcttcggccatcttcagcagtagagtattggcacgagatttgccagtggacacatctggagcaagcgggtttcttgccgtcacactgttgagtgttagcataactcggtgagtgagagctagaagaacctttgcgcggcggcgtcgacactcttcacaggctctaggagtatattttcctcggtgagacatttgtccaagcagattgaagggagagagcgaccttgaggtaactcgtgtagaggcagcttactatagctgctgaataatcgaatcgacaatcagccaatcatcttcgagtccccttctcagtcttgttccacctcaagccacagtcagtttgtccagtatctatggacagtggctaattctcgcttgaagggtactgcgtgtccagcggttgatggtggacaacatgatgtcacggggattgtgtcggtattgaggtaaatacaatgttcctggtagtcgcattacgcacaatgactgacggctcttatccaagagctacttccgatctggcaagggagattcgctggacggccaaaattagtgcatatcttttgtctgtattggaacttctcactccagagttgcttgatcaatactggggaagaccagtccaggcttcttgggctttgatcgcgctatgaaagaagccgtatcttcctcacttgactcttcgcatgcgcaaagcaaccaccattgccgcaccatgtcacaatcttcgagacgcttagcgtttacgctcgatccagaaatacactgtcttaaggctggttataggccatgtctggcatgttcaagtacttccgacaccggttatagctgaaatgtgaaaactcaagaccaggttcatcaagataccactcgtcatactctatatcctataaataggtctggtcgatacatactaattcatttgtggacaaattagtacttgataactatatagg

SEQ ID NO: 12025 - DNA, 866 bp, Emericella nidulans
catctttcttattaaatacgtccatgctatccagcttgatgcagtgttcgctcctttcatggatgcccgcctcactttctccgcaatcagcgtcgcttcttctcgccgaacttgccaaatcaatctctcctgctgacgaaccaggctacatctatatgttctggatcacaccatcgacatccccaaagtccgccccgccaccatcagatattgcaccgtctcttctcccctcagcacacagagatataaactctgataccgacgaaagtgacgagagccccgagcaaatccagcgtagcaacaccgccatccgcagggcaagggatttaaatacattctcgtcagcttcgtcgcccaacagcccaggaacagtgaagctgaagatcggccgaacgagcaacgtcacccgacgattgaatgagtggtcgaaacaatgctccaaccatctaacattgatccggtactacccgtatacctcgtcatcgcagcggcaggggcggaatggtggtttggaacccggaagaaaagtccccatgtccatcgcgtggagagactcatccatcttgagttggcggatatgcggatacgcgatctgggaccatgtccagagtgtgggaaggacacagagaatggtttgaagttgctgctgaacgggccgctttgaaaagagtagatgagtgtattcggcggtgggtgcgctgggcacatactcagaaataggtatcttgatagatttattaaaggagctcagtcatgacagtccatagttcactcctcccccatcatgaacaaggtcatatatggagttcttagaactagctgagcaagaaactcaatccttcatgaccaaccctcgagtatagtta

SEQ ID NO: 12026 - DNA, 138 bp, Emericella nidulans
cccattctggatgtaagtcttcaattgcactacctgagagcgtgtatacatggatcgcgatttcgatactgtagaatttgtcggagagcgaaatggtttaccatattgatgcactgaaaccggtagtcgactgactga

SEQ ID NO: 12027 - DNA, 325 bp, Emericella nidulans
ggggatctctactaataaccgccactagtctccacaaaatcaaacgaagaaagaaattgataaaaaacaccatattcatatatcaaattagaatcaccacatttatcaagccctgagattagaccactcccaccgatcgcctacttctagagtaaaacgatataacgaaataatcctatagcatataccatccgaccatcctcataaccaactacaaactcctactcaaatcaagtcgataacgacagcctcgcttaagttctcatcatacatttcggtaataccagaattatccgaacagccggacagctcaaccaatgctgcg

SEQ ID NO: 12028 - DNA, 126 bp, Emericella nidulans
ataatagcatagataataacagcatcatcaataaatagcaagacaaacataataatcaagcaaaacagcaaagagccaaacaacaaacaacacataagcatgagataatatagaacaagcaaacaa

SEQ ID NO: 12029 - DNA, 631 bp, Emericella nidulans
agagaagcgatagcaaggggaggaggtgactgagctaattatgacgacgatatgttatccaaaccctacaaacaggacatatcggtcaatcgacgtgccctatgctactaggcggcgctaccaagctacactcatgaccattcaccagaatcgcgggggcctctaccatcgccgccagcttatcgagaccctgaatatcaccgtctgccaacggaatcacctcatgaaccatctactcacgcacaccatggtcagtctgctgcaaggccagacagcggttctacgccagatacatttagggacccacacggcgctacgatagagatggtagactgctgttgttcgatacggctggaagctcactcatacacaacagcttgatacggcaagagaaagaggccgacacttgttaacgacatacttgctgataggaccggcatcgagactgctgatagctgcgctcttagatgctggctgaacgacgaaactcattacctgcaggcctactttctcagaccacaatggagacagactcatctatgccgcgctgatctcggcttgatgacctacgacgcaacccagcgagtgatatctccgtgtgggaggcttgctactgcccctttcacagtga

SEQ ID NO: 12030 - DNA, 598 bp, Emericella nidulans
gaagcgtcgatcccacagtctaagactcccatgaagacaggacaatataacttacgatccgtcagaagataatcctcctttgcctcggtctttgtaagcaagctatatttctccggaaacttgtccttgcacgcatgacaaacgcgacatcgtagttcctcctcccaccgccaatcaatctcgagggagccacactcgcgacagaccttctgttcgctcttctcatccagcacactgatccccggctcgaagggacctgcacgatcccgacgcagattcttgagcagctgttgccgctcccactccttctgcgtcatatttgcgggcttctcgtccttgccatcctttacgtgcaaagctttgttgaagggatcgtcttcctcggctaggaagccgccctttgtgtctgtcatcttactgaagtcgtattctacatactttgtgaagttgcgtgcgggcttgatggcgttgagcgggcgttcagaggcattgtcggcatcgcggagggtagggggggtctcggatgttatagaagagcagcttgggcttaccgcctctgttgcctcaaaaagcggccgggccgctgctcggaattccc

SEQ ID NO: 12031 - DNA, 106 bp, Emericella nidulans
tcacattatttcaacactaatttcctatacacacttctcaaacataccacacctatctccatccaaattacagaattaattacaacaaaccccaaccctacataca

SEQ ID NO: 12032 - DNA, 860 bp, Emericella nidulans
tccattagtgattagtagattggtatagttttacatgagatccgagactatgtccattgttgtagactgttggctaatttcagttgtagatggatagttgtaggcaagtataagttgtaggcaagtatacttgcctaccctagacctcgaactcgtcttgggctcgtaatttggtctaagaatagctcaggcgggccgacaacggcttgccgaactcgccttcattagaacgtcatcccgagcccgtgattttgttgccagtccgactccatcatacaatatgcgcaactcctaggctatccataatgatcttcaacacgaggcacactagcgagtttagagttatcacactctgtcgtgggaccggcccgaatccggaattacattgtgccctaatttcttcccttatcagcattaataaaaaaaaattggtaccggcaagcgctctgaatgctcttggaacagcctgcccctagactcggaactgatgcgtgtagcaaacagggattggtattatatctattttcctggcgaacagcagaacctttacccaccaagcttgaggaacggatttcgcttggcgggttctgtccacacgccgcttacgaagtttcagccacatttgtcgtggatgacgcgcaattcttagacgggaaatatggctctgcttcggtgctagttccaaggttgaggcgtagtccgtgacgagtccatacagacagctttaagtatgatcattatggggccgtaggcattttacgtggttataaattgaggtcctcttgcttttcttcgacggccacttcgctcggtaccatctcacctccaattcattcgtttacggtattcgtttgctcttg

SEQ ID NO: 12033 - DNA, 141 bp, Emericella nidulans
acaaacatagcaagaatcaacaacaaaccatagaatcaaacaaacagcataataagcaacaaacataacacccaatcaaacaagaataaacaagcaacaagagacattaacaagaacagaacaacaacaacaaatagagac

SEQ ID NO: 12034 - DNA, 556 bp, Emericella nidulans
agctaaatcctgatagtccctttttgagcgcgcagacccttcgtacagacattacttactccaacataagagagagggtaaccaccttccaatcgataaaaaaaaaaataagaagcgagcctttcccgttgaattgtaaggctaagtggacctgggttagatgcattgtcgtaaccatatgaacctctctattgcatgccatgtgggtgatgagagagtaagtagatcgctaatcaactgctattcccattatacactctattcttcggtgccactagatgattgggcccttcttatgcccccaaaataagcataaatagccaagtatagcataacccgctccccaaatagaattatatgcttaaattactctgaaatacccagttctattttagttgataccgcttatgctacttgacaagccgcagtttctcttctacaggccctatcgagcattcgtctatatatggcaacagacgccaagtgaaacaccacaggctggaagatgctcgccttgaaccaatggattaaacgtctaatgcaccagaatctttgg

SEQ ID NO: 12035 - DNA, 120 bp, Emericella nidulans
  unsure (1)..(120): unsure at all n locations
acacacatacaagaacagatacaacagacatatagatagcatatatagagataacacagacataatacatagatatcanatatataacatacagagataacaacaatacacacacagaag

SEQ ID NO: 12036 - DNA, 2436 bp, Emericella nidulans
agcgccccgcttgcttgatttctcttgccgggaccaaagactcgcttatatcaagggggtcatctgaagtagccgaacctgggtgtatatcttccatgagaagaactgagagctggctcctgcgagacgctttggtacaatgacggcttgcagttgtcgggatttttttttgcggcctttcagaaatattctggccccactcccgctctaagttctgtgcaacatgcagaacggaatctaggcttagcaaagacggaacgttccgtattagatctactccttgcaggattgtcttatcgcaagtcgttacagaatttttcattcaatgcagggcacatattctcaattggcaagttgacaattgagtctcgaaattactctattttcgggcgggttaatggatacaagcttgccaacagactggaaaggcctggaccacaaacggagctacatctgagtatagtaccaagtaactgacgtcatgcaaataccgtaggaacccctccacatcatgatctctcaggaaatgatcttgaactattggtttatggcggagtgcgctaaagctcttccattttcttgttaatggctgggggttcttgtatcatgacgacgtcactggtcacatacattctgtgatgcaactgggatcagcttactcgcactagtagtcactgcctacattatgtcactttacgatatcagaaattctatataaagagttacattgcctctggaatcaaaaattcattactttttatctattttattgattttgttgacttttttcaccacaaatatccaacagaccaaatcagcaacaatggcaacactccactgtgagcttctaacgacacccttgttcctaattaacgctaagaattgcagacctacccccggtgaagccctccgctatcgctgcgggaaccatatttacccacactgcatctctgggcattctagcccctgtctttggcgatacatatcaccgcgcccaggccgccaattcgaaggaggaatttgttaggtctaaggaggctgctggagctgcggcagcttggggtagctcccttgttgggagtgccgtgcagacttatggagttgcggccctgattaatgcgactggcacccttagctataaaggagcagcctaccttggtagcttgattttcttcgccagctccgctcccagtgtatgttttccgctgccagtctacgcatgctatctaaccggatattttagttcgtcagccagatatttaccgagaagaggcctctagacactgttgccgttggtgccgtcgcaagagtcttcgagacagttggcctgagtttgtttctcacttggtggggaacacgcacgaacccatttgattaagtaggcttctgaacctatcttgtactctgtgctgtgatgtctgcctccaatcagactgaacttcgatgatgctatgtttgtgacctactgtggattgattcttgacaattatattacattaaacgttttctgcgcttccgaccaagataatcaaatagaacgtagtatcccgtccatttgtgattgatgaggcaatatacaataaatcttaaaatttaattcatcagccaaacaactctctagccagtaaactgacccttcatgaaagtattgctatcgtacgcaccatgtttatactgccacattctatggaaaagccattcctcatctacatgagcgaacgggagtgtaatgattatttcaggcatacgagaacacagtatatatttgtatctaataaacaaagtttctagagctttaggcaaaggtgcggcaaggataccttttatgacgttagccacgctgatatccgaaaaggcaatgcgaaggagaacgtacacatttggatatccgtgatcatcgtcgatctgatactttgaagaagagttcaggttacaaggtgttggtggcaaaccattgggacctaggacgcctctaatgccattcttgtccttctggaataaacccgccaaaccccgctcctcaccatgttgcttgagtgaaatcagctgtttctcgcccgcctcgccaatctgcaggacttcttccttaggcgctgcctggcttcccacagtaagaaggccaacagcatccgcttggttcaccgtgctgactctcgggtagtttctgcgaacatcacgcttccagtatgggttatcagcgatgtcgccggctgggaccgtgacggggtcatcgtaagacagcgggggaagagctcctggggtgggcagacggaactgagagttcaatggcacaccggttgaccgttcgggatcgatagcaagtatgcggcggaggcgctcccataaaccggtagattgacagagtattctacgttgctgatagaagtaattggacaagagtttacgatcctacatgttgatagaacgacatcgatg

SEQ ID NO: 12037 - DNA, 101 bp, Emericella nidulans
ctatacactagtacataagaccatactctcatcaaaggcaggctacgcaacgcttcgcagggaaatctgccacggctgaacacccatgctaagtagcaagt

SEQ ID NO: 12038 - DNA, 614 bp, Emericella nidulans
  unsure (1)..(614): unsure at all n locations
cccgatggggttatgtatgggttcgcattgaggccgttggtgccgccgattgaagatgcgaatgggaaagagttttcttggtaaatttggcctgtacataatgcttacatgaataaaacatgagtggtttgcgcgtatcaacttagcgggagtatgaaagccggttttgcagaagaatgggctgctggctaggaccgcctgggccgtgccaagctcgctgttctctgggaaaagggcataatagagcgtcagaattgaaggcaatactacagtgggagcctgaagatctggaaacgatgtgaaacttagcaggcaggaagcccacagacagcgaagcccaatattccttatgaatcatttacgagcctggaatattctacctcaccgnaccggaatgtgtctggttctgctcgaattagataggaacccgatatgttcttggatccgagtcggaaccttaatgttggcttcttcattgttcgccgggggctttggaggactaaaccggccgctttggcctggctacaactttacataaatactaatattgcgagtacgcacttgacagttactagcgagactggtacattgtttgccaatcccaagagcctagg

SEQ ID NO: 12039 - DNA, 4290 bp, Emericella nidulans
  unsure (1)..(4290): unsure at all n locations
aaaaccttcgattacgctggcgctgtccgggcttagtgatacatagtcgaaaatttattacctttgcatatgaaattaccatacttgttactctgattcaaccttgtaaaatatttcgtgacccctttgaaacttatagtaaataatcaaaatatcaaccgtattcagtttagttcggctgctggtacggagcagatatctatgtcatatcaatttatgctattcacgtgacgaattccccgcgatctcagcgcatgccgcaacaagagtagacctcgacaaacacacagccggcatcatgttcaaaaaagagtgcgtatattcaatgctcggatattatttcgactttctttaacttccagatatggaacattatgccgcattaggcaggaaacctagaacccaagctaacaggcactggacagcatcccaccaagcaaccgctcaaaggtcaaatcctcagtacagcgcgctctgcgccaaaagctcgtcgaggctcacccacgatgcgaaccatatattgacgagatcctacctaagaaagcgcagctcgatgccgtgaaactgtacattgcttccctctccccaacgacccattcctccccttcctgatctgttgcaaaagaaggaagtaaagcaaactaactctctctgaactcaataggcccgacagagttactctctacacgattgattcaactccgctcttctaccaacctcttgatggcccacccatcccgcatctaaaactcctccaccagttcccggacatgctaccaacaatccaaatcgaccggggtgccatccgattcgtgctctcgggtgcggcgcttatggcgcctggtttgacgagcccaggtggaaggttgccggatgcagagcatgcgctagagcaggggactgttgttgcggttaaggcggagggtaaggaggaaatttgtatggttgggacgttgaaggttggaacggaggagatcaaggctaaggggaagggggttgcaattgatgatgggcattatctgggtgatgggctatggaagatgcatttggattagatccccaacagtgtgcggattgactgggaagggagattcagtatttatgaaaatttttagctgttcagagtgagctaatcaaaatcattggctatgcctatgtacatatatatcgattgtgcagtgtatggtaagcaagtttgctaagtgttcgtgcttccgcccccggatttatcggaggtggagggtgtagcggattgcgaagaccaggatggagagcgagcctccaggccaagtcctttcagattagctccgaccccgctgactccttccggttggttaccatatcgcagtcctgcacgcgacacagcacggcggagcatatcgccagagccatcgagagcaaccaggaaccgagcgagctgtgcacataactcccagtcgcttctctgtgacgccaatatcatcagtctaacaacataatcttcaaccggggcatcgtggccctcagactcgtcttcaaacgcttgtaagacgagcagataccccacagctgttttgagggagttgagcttaagagcttgttcgaaaaggtctttcggggcggggaggtaggcgaataaggtacgccatgatcggagctcggttttgcgcgtacattgaacgacaacatctaagtatatgctgggtggaagtgaggcctgaagaaatgagatgaccgagggtagaagagggtcatgtttaggaatttgatcatcaaatttgctatcacgcgccacattgtccacttcttcgtccaaaacatggtgtagaaggatttccaatgcgtgcgggaagtatgaaagatgggagaaatgctggcatagtgagtgcgctgcagggatatcaccctgaacaagactgtgctgcaagaagtatggcaggaagagatgtgtctatcgagtgttaacgtagcctgcgtttgaactgtaatgaatttgagaacgtactcgaatagcaaatttcaacactacgaacgtgacatcgcgccgttgaattgtttcgggctccactcctaatacaatccctttgttcaagagtactgacaaggggtagaaatcgagaggcacttcaatcgacttcggcacgtcctcccgttgcaaaacctcctggacgtcaccccacgccgtaagatctttcccagaaaatgtccacagagaatcacgtaaggagaggttgctgtggtattggttgagagccaactccgcggctgggctaggtggtagtgattcctcatatggtggtgcaaagttaaaggaaagttgatcacgcatcaaaatatagtactcgacgtcgtgcgatatgacgcgcatgtcatatttaagatccccgctatctgacatggacggctgaaggagcaccaaattcccgtcgacgagtaaaagcacggacgccactttcacatcttgagacggatccccgttccctatagaggtcagattttccatcacagaaagtgtacgctattacgtacgcaactgttcttcaggtagaacccagctgatggaccggacacgggtcggtgccctcacaatgccattgaacgcaatctgaccaacagcgactagaccaatgcgagattgtgtcgaagtgatgatatagtggtaaagaatattctcgtaggtgtaaacaaggagtgaatcctcgccagacggcccaatgaaaaccaccggtgatggaagatattctacatggagaacagaatggttattcagcggaagttcgcgagagaacatacataactgtttccaaaaattagtatcaacgcacttgttgttttttgcggaactgacctcgtatgacccgtcacgatctatggccgcaatcaagatatgaccgtaccagcacatcccgcctcgaacagcaaaagaattctcgacagttgagtcttcaaagactttccagcggccgctgttcacactgtagtgtgcaagaccccgttttccagctatggcaacatatctaccatcttgggatactgaactggagcggatgggccactgggaatgaaggtaagcgggtgggtactgtgcatggtgccacagtgagtctttgccagagattgttatgagatcaggcaagtcgtgtccacggtatatgattacttctgttcctgttggcagaagacctctagcgaggttggcggaggaatagcatccagtaagagcgctgcgggctgtttcgagaatccacaggcgccggtcatctcatgctggttagaatgatatctgagcctccacctatccaacaaccatgtgatgtgccagtcagccaatcttctccattcgattcggcaagagaccgatctattgagaagctgttcccgcctggtttgccgaagacactccaagtcgtccaaccgtgttcgtaacctgcgaaaagacagtacccgtctggcgagtagcacatgaacgttaagtcgccggtggtgccgagcgaagcggacggttgaagcttgtgtgacagaggaacatttcctagatagtctttggccgtgtagacaagaacattgccgttggcgcaactgacggtgaggagtgagaaccgagcatttactgtaacattgacagcgttctcgccatcgttcgtcggtgcgtgaaagcagtggccgtggaagagagctttgcgagattcggactggtgcgttgtctcggagacacgctgaacggcgtaagcatgaccctcattggtcacccagaccatgagattgatcgcccggtcatacaccatgtccacgatcgaagtctgttttgacacacctagagctcgggttaggagctcagaggaggtttgtgtaccgtgctcgtcaggcgtccaccgtatgcattggatagctgcgggctttgcagttgcaaccacaagctcgctgtctaatgctaaagccttcacaattccggattctatcttgattgccatccgaaaacgaatgctaacatcgtggatgctgctagcttcctcatcggccgagagacgagccagttgttgccgcctataggtgctgctctggtcgtattgctgctgataaacgcgagtgttggcgtccgtggcaatggtataggtaagcaaataccctttctgagtctgaacaaccaggattgtggcatcaggacgcatcagcagagctatgttagagccgtacgtctctagtgatgtggaagatcccgaaaacgctgaaaaaacacagctgggcttaagccggtcagttgccgtgcgacntgngggtgtaaacagctcaacacaccctggttcgccagac

SEQ ID NO: 12040 - DNA, 114 bp, Emericella nidulans
  unsure (1)..(114): unsure at all n locations
ggattaggtccatagcttcaataagtgggagtacttctgtaggggtaattgggcgcctaagacggctctttattgcactgttatctgcananaatgatcggaggtacttgtttt

SEQ ID NO: 12041 - DNA, 228 bp, Emericella nidulans
  unsure (1)..(228): unsure at all n locations
ctttgctggttggtcatgacgatgtgcacctagctcaggcggtgacaggtcaatcacgaattgaacgcataagagtaggtgtcacttacccaatctangtcgagtcttgtanaacggatggngaanattgagttcgaggatatgcctgctggattcacganccattccngaagagantcgtagnagcgttggatacngcatagtaatagctctcccaagttatggctg

SEQ ID NO: 12042 - DNA, 185 bp, Emericella nidulans
  unsure (1)..(185): unsure at all n locations
gcgtcagaggattagagggcgttggtacaggcgatgtttttgcggtctgtgcgatccatgtgtcgaggcctagtggtaggcgagcagacgttggngtgaccggtgtcgttgtaggcgctgtcggagtcatgagataccgtgaggcatgctactcgtgcatcagacggatgcccgcctagcttccc

SEQ ID NO: 12043 - DNA, 552 bp, Emericella nidulans
tgtctgtaagccttacgagatatccgtgcttcgatggcctgatgacatgtgcgcacggcagactgtccactactccagtgaccttactctatcctcctttgacgcggagtccactggcggacagtcagtgttttgcacacaaaagaactgcgccatgggccatactctggatcgagactctcgcacctgtcggcgaccacgattgtgcctatttgatagacactgattacaaaagcagggcgcacctacttcaccacatcttgaccctgacatgggcgattggcccacgacagggcctgtcaccggttatctgctgctaggcaccagactgcactgactgtgcgaatggtgggacatgaccatcaggctcggggatactttcacgaacgcaccaggaggcctgtctcaactcacccttggcagtcctattcgcgacactgactccatggaatactatgcggtctttcaagattgctccaggctatcctacgattcctcaatgaaggaaggcacgaccagagtctctcagatccaggtccccattcacaatac

SEQ ID NO: 12044 - DNA, 113 bp, Emericella nidulans
tcgttgagtctaccgtttcggattagttcccgacggccccagcaatggtctaggtagtactaagcagaacgatgcggtgtgaactgttgcgcctgcggtgttgcttcagtacc

SEQ ID NO: 12045 - DNA, 219 bp, Emericella nidulans
catcggtatttgtgtgatacaccctcgatgttttctccaacgcggttgcgtacccacgatattagttggaactagcggattctgcagtagtgttacccgactgagggatctcatccgcgggctgacattcgacttcagagtcctctcaacggacccaggagtccccaatttcgtcttagtcaacccctgttgcatcatttagtatggtgacattcgggt

SEQ ID NO: 12046 - DNA, 166 bp, Emericella nidulans
gcaacacagcagacgcgtggatgcagcccgcgagccagaaccaaggacgtgaccaacgcacagcggaacacggagcttctggaagacggacgaacgcgaaaacccagggcagcacgaacccaagggccgagcgaggccaccagagccgggggagacgaataaacca

SEQ ID NO: 12047 - DNA, 186 bp, Emericella nidulans
  unsure (1)..(186): unsure at all n locations
ttgaatttgctaaatgcatatcgagancgccatacagcgatacgggtctcgaatacatgtcggttcaccccgttatctttgcgctccagccgtcaccgcgtcatgtagttcacactagcacttgcgtgagtccttcaccggcgttctagggagtaatgcaaactagattgatctcgttgtactccc

SEQ ID NO: 12048 - DNA, 167 bp, Emericella nidulans
  unsure (1)..(167): unsure at all n locations
gctccgatcctnggggtctggtgtactttgtcgccgtttgacgcgggcctacgatggtctcacactcgggcggtcagacggagcattagcgtgacagccctcggctacggtggatctttgacgagcgcgtcctgttttgtcggttcaccttcgacatcttcccccga

SEQ ID NO: 12049 - DNA, 194 bp, Emericella nidulans
tgtctaggttctcatgtttatctgcgaccttggatttcattcttatcgtcgtccgtcgtattatctgcaagagggccatgcctgtgtccgagccaggtgcggattgcatgccccttctacactacacgctcggccccatccggtgcatgggagggtatcagggcatagctccctggagttcggagtccacggat

SEQ ID NO: 12050 - DNA, 250 bp, Emericella nidulans
  unsure (1)..(250): unsure at all n locations
cggcctgaattcggatatcctcatcgggctagtcaatggtggactgctgtccctagagaggccgnggagtgcttgtnccggaagaggcaggggncagcgnggctgcgctggctcatgngcacgcacctantctggtaagatcnactaccgncgtaccatcatgctcnttgaagttcngcttcaaatacgacgacacngctaantctacaacagaatcttccgttgagataacccagcagatcgtaaggtc

SEQ ID NO: 12051 - DNA, 1137 bp, Emericella nidulans
aagagtctcacccactccagaaatcctccgacatggtacgcccgtttccacggtttcagcatatgagaggcagattggtgggacaacggctaataaagggtagaccttcgcctgcaagaaatgcaagaagtgtttccgtaaggacgcggcggagtttgaggaaaggtacgctggcagcacttactttgcgaaatggaggtctaatgggtatcgtttagtgacgagtactgcccacactgcgataaccacttcgtgatcgaggctgtcacgccgaaaccgacgttgcaggttgagggtgatgacgtgcggataaactccaggtatgcgacttccgcggcaacaaagcgaaggatatgcgctgatgacaatgtagaatgctcaaggacgaccgtgtgcgcggcgatcaagaacggtctatcttcaacgccaaagacactgcagaccgtttagggtagacgagcgtatcatagataatgatgatttacgaccttacgccctccaacactttcaactccgccaaagcgaattagattttgaaatacactcttgaagagttgcttataatcgtagatggttcgtttctacagagccagaaattgaatgatgggagcatcaaccttaggtttaagtagcccgcatagcccttctgatgacagtaaccagtgttacctactcccgagcctcgctggactccccaccaccggatcgtgttaggatggccgccgtagtagtgccggcccgagtcttcttctttgctgcttcttcctgtttctccgtctctatgctcttgacgtaagattcgatctggtcatcgggaagcatctcaatcgtcttgcccggtgacattatggcaacttcaatattcttggcgcctgtttgcaccacctccagcagcgacttgatcgtaagctgaatcgtctgctctcggtccatatcatcctggtggttgcgctcaaggaattctcgcacggtcttgctggaacggccgatagcattcgctttcctgtataaaccacgtctcagttacaactcaacccaaaattccacccaaccaataaaatatgacgtaccaagcagagtagatacccgatggctccgtctggtatagtctgggcgtaaaaacgttcggagcagatc

SEQ ID NO: 12052 - DNA, 320 bp, Emericella nidulans
  unsure (1)..(320): unsure at all n locations
tatgccaccaccatcatntatgaaatgcatcctacatatctaaattccaccgccatttgtaggcctctgtctcccaatatctaccaagggaggagaacaggtagttaaacaatctatatatttaacccactgctcaataacctacattctgtatccncacaatttttactntctactaccctcctatcaaatcctggaacacgtactctgctaagaacgtctttcttattttgctccgcgcactacgaccgggcttctattcacaggcaccgctagaagcaatataccatctggactcgctgaagaatagctcctgacaa

SEQ ID NO: 12053 - DNA, 215 bp, Emericella nidulans
  unsure (1)..(215): unsure at all n locations
ggtcgcgatggtcantanaagatatgagtgngtatattgatggtggagtatagttgctgtactcgttctggttacctgtctagtgggctagggctcacccttctgcttccaagcactttgcctcatggtcacgaccagccgccgaggaccgtgctactacacgccgtggccagcacatccttctactcgtcgtgatcgtggggagttctcgccga

SEQ ID NO: 12054 - DNA, 294 bp, Emericella nidulans
gctagttgagctcaatacacatcgtagtgacatcttacactgcctagtaagggatcgcaagagcgtgaaaaagaccattcaagcgttgggaaactgatcgacaatgacgtaagtaagcactaagtatatatgggatagtatttccgttatcatcggcactgctgcatttgtgtaaactcaatgtcgcaagtccagggaagagtttgagatcaatcattgatagtgcgtcgaagacatttctggtgtaatggagtgcattccaaatcatgccattgtgtccccgattcatgtggg

SEQ ID NO: 12055 - DNA, 101 bp, Emericella nidulans
cgcaacaatgacaaagatagacaaacagacgatataggctgaagcggaccttgtcttagcttgggggacagtcaacatcgggctcagttgccagtcaaaaa

SEQ ID NO: 12056 - DNA, 3260 bp, Emericella nidulans
ttcggccctggtcgaaactcttgtgcgtcactgcaagccatttgacctcgtcggagagaaccttgtcgccgccctcgcctaagaagcgaatgtagaactggtcgagaacctgagggtcggagttgacgggaaagtcgggccttttggagtcgaagtgtagggagaaaggagccttcgcgcgggggggcgtgtacgaccatcgcggcttgtttgtgtagtcgactggttcctgttccgcgggcgttgaatagttgcggcgagagagaggaagggcaagctgagccgggccagaggagatgagagagcggcatgcggagcaggaagcggtcctgaacgctcgtatcggtagcagtgaggccatggcgtaaggaagtggtagagtagcgaaggcaattgatatgaccgggacttttcagaatggccggcgtgaattcgagatgtctggaaagaattcggagatgaggcgctagtcccaaacaggtatagtaccacattgtaccttgaacgtcggctgccaccaactacacgcggcgatcccatgtatcctgtacttgtgttacgcagcaacaaaattctgggcaaagtctatcgcttagtgtgcaatcaccttgccgagctaatttgtacttatttcgtccttgactggctaaatcatgttatggctatttagtgggaaggccaaccaatgtcattactcccggggtactctgtcctctcaacataatggccgatgttccgaatcctacaccgcaatatggtgttggcttgagggttggaagcatgcgcgagccaaccctgccagtgttacttcaggcgccatgaaaagctaatgcccaatgaggccatgcaaatacgcgcagtcatgcctgaagatatgcgtggaaaatctaccctgtctattgacgaggtactttctcaggtgcaggaacagtgcattttcccctgcaatacttggattttctcaagccttgtcacttgaccccgttgatgaagagaaggccggctagaaagcggtctgcggcctgtcaaatttcgtatgtttgacgccgggagacatccgggcccagcagcaaactcaacgtacgcttctagaatattgccacggcgaagtcaacgtgacagccgacggggaattattgccgtgttctgatcaccctcaggcattcgccacggatgaccggggcagcgaggcgaagcgacggtagatcgaaactgctccatttttgtgatgctgctgctgtctgttcagttgatgttgactgcaaggttatatttcggcgttctagctgtccggctatggagtcctgctgaaaccaaggcagtatcccaaccgcttgcgcattgagtgcaaggatgatggattgttgctctttgaggcgagacattgttcgagagagactcctggcatctattaccagaaggttcgccttgagtatgttctctttttgcggctcctcgcagatctaacgctgttaatatcccgacaatgagcagtcagcagccgtgagagcccgtaggagcccgtgagagttgattcgaagatacatttgacaacgaatggttctatctcattctcatacgacgatgtgagagacaccagcaaggtccctcaaataaccgttgtgcaacccttggagagggggtacgacatgcatcatgaaaccgtccacgtgttcgtgttgcttgcattacacaccgtctttagcttagtagaagcctgagtcgtgcagaaaccccagctcgccttcctgaagctgcggtatatctgccctttgccaaagcacacggctcgaaggccctatagggttagtgaaattttcccggcatgcctgacaatggcccgttgaaaaagaatccaagcaaattttcatgccaagggcagttgagagcaaaagccgacgaagatataatcggaaagctataccccctaaaccctgtgggtcatctagcattttgaccagcgtccggttcagagacggaccgccctgaagctccccccggtatacccgaatccgtgcacctaattacaagagacccagctatagaaagctcctcgaattggtccggagacggccggttttaataaagtttagagccagagcggcccgatgattccggggagctatgggcggatcattaagggcaaggctcggtttcagagacaaagtcggaggatgaagcggacaatgtggtccaaagaaactataatgtttccactatacagctctcgttggccagctgcctgcctgaagagcacaacatggaccaaccatttgcattctttgcaagttatttctgcgactaaccgaaggtgttaggcgcgtggtgtgttgagcaaaggtctgcaggcctgagcggcaagtaaaacgtatgatcttgcataggcctaacatgttaagcctcctgaggcaacagaatttgtagccctgctatggctgcaaattgctcttgtagtatattggcggagccggccggtaggtacgtacatagcaagcaccttgtctaactcgccttccgtcgggcccttgcagcaggagaagacggcttcgaacttgacgccatcagagtatgaagatcgactgagaaattgtcattatccagcagtctcttcccgtaaatcggacgggtgctgtcgtcggttctagcggtgtacaacttgttcaagggaaacaatctcttgaagtcgtggctgcttaaggcctggggtttaaatagagagtcagcctgggcttagagtcgagttgaataagttttttcggatcaccgtgaagtgcctttgttcctcctttctcttccttaccaccaagtcactgtagagcccgctagaagcagtgtgaacttcattttgtctcgcggcaatattttcgtcaaaactccccagagaagcgttttctgctccagcatatcatctacagacacgatggcgtcagaatcaaactcatggttttccaacgtcgatatcatgcaccgcatcagcatacggttcatcagctcggacaatatgaacaccacaagccttgatgatttctccgtacaagacccaccatcaccccgaccctacccaccaaacccaccaaacagcccggcgtaaacaagagagattcagatggtcaggtcgggttgggcttttggagttcattgcaggtagattagtacgacccatcataggtaatgtgccgacctggctcctgtgggaagaaaggagtttgcagaaaaaaaatttgggaactgaccatggcgagcagagccgagcggtccct

SEQ ID NO: 12057 - DNA, 331 bp, Emericella nidulans
tagaaattaatctaaaggattatcttataaatttcttaattatgttagtataaatatagtagacttgaagatataatattactactaatattattataagaagaattagaacagctttaaatatataactatttaaataaaaatttacttttactctgtaagatgatgattagatataatcaacattggtccttcctaacagcttcatcagcttggcttaattagtattaggtagtaggattttacttctctgaactgaaagattagtaagctcgtaatttctagtagatttgcatggtatatgacctctagatatggttacaaaaaaatt

SEQ ID NO: 12058 - DNA, 2904 bp, Emericella nidulans
attttttttcggcggctgtcggaccaagcaactctaaaacattgatccatctatccgttgcaatgccagtattctccggttccttacctaataatgactctctgtagagggtagctacatagacgggcgaaccaaggcatacctttccagatacccaccccttgcagagcagtgaacactgagcagtgaacgctggccatatctcttccaagtccacaacgcatgattagcggatcgtgatgtgcgacggtatttcccgtgccgccagctacggagtacggtaatgcccaagatcggcctagggatttgtgaccacggaccatatacccacttacatggctgcatttcgttttctcgccttgaattaccgctagactctttgccaggcgttcccccagcgctcaaaatatcccaagtcgtcaaactgctacgtaggttaggagtcgagactactgtgagtcatagatgtaacgaggttcgcgcccggacgcgttgcgtccttgatgacaacacccgattctctccagggtttacaaacgtccagagtcaatgataactgctgcccagtgtccactgtgacattgtccattgccgcggaagccgcccagcggaggacacgatgtcatttccctcgtttggatctaatcccggctccacaccccagcttctccatccgatatccggtttcgcaggaggccatgcagaagctgaaacagccttctgactacatacatcgacctcgctactttctcgtataatcatgcatatctagaagaagcgagtacagggtgttttccttccttcctgtcgacaaaccgaggctaacctacgcaccatatgagttgactgtaggtaaggtgagctccaaggtatgtatcagaagcctgacattaacatagagtgatcgagagatggaggttggtgcactcctcaagctaccccgactacttaggaaaagatgtgggtcagcaatgaagagtgtacgaaagctctagacttctcaagtggttcaactgatattagggcctcgccccctagcctacatagaggagatgggtatatgcaagacttcgagatacagtaatctgttcattcctcgccaatgagtctaccgatcacagctgtcaggtattaaccagatagtagctgtctcattctatgagaagcgatcttatattacgatgttcttaaatacagatcaaggggttgtcgacactgctaataaatgggtagcggatcgacgactcttgccttcatgaaagccataatccggccacctagtgcgatatcaacagcatcgcggttgccacgttcagtggtgcgccactgtcaatacaggatttgggagccgctacttggttgttgaatccgtcacctcaattatcagtgaagcgaaattcactaccagatccccgcccgcacttgatggcctcgctgcgtacacgccaatccaggcatcacggacatcctcctcagcaaatacccaggtgacttcccggatgggggatttttgtaccccttgaataaggtagctttcaacgcgtcagcagcagctccatcatgaatggataaggtagggtaaggatgtgtacatccacaagctatcgtctggctctctgaccacttctagggttgcgccagtaccacctgatggaaccgggagcaggctccagtctgcccagcggtccttggctacggtactcagatgcggtttgtcatgagtgaattctatgccagttttcacccacttccgatccccgctgtttccgttgagaacgatgatgagtccgccctggtcgtatttctggctccagttggccgagaatgccactcgagcacgcttaaaagtgtccagtggaatggacttgtacagaataggagcgttgaatcgctcggttgaaggcggtttggcccaaatatctgtttctggcggagctttgacggtgaattctgcggggagaacttcgtcttcgggaactctctccagcagatttgcggatgcgaagccagccattgtggttgcgattaggctcactctggcggtaatcccggtgcaaatagtgtaggtggtatatatggactcctgttggttgcgggggctgctcagaaagaggggacaaactgcagattcatggagggcgaaggcgcattaaatacctaaccatacgtcagcccatccggcgccttcgagatctagattacgctgaagaacatagtacacaagctaaaatatgagtcgcacgcctcggtaagacaaggatgaacgccaatcatggtttagcgactggcgtgctcgagacacctagtgtcttgaaggttgtctccagcgttggctgttcgggtcaaacaccgccggtcagtgtttctgcggccttgttgccttaatatggaagtcggtggcgcaaccaactgaggcggacgacctgagcagcatcgtaatctcgtaacgagatcttgttgaaacttaatgtaattaaatcacagatttcgtccctgcacgatgttcctgtaccgaatctctcagatgacggtcccggattgcgacacatctcaaattcgttcttatccaactctatatatacatggagataggcattttggttgggcgcaaatgccagcgggcactgagctccggccggtaggatcttccgtgatttatctcaggtgcttaattaccatcatcattaacaatatcgactgaagtctcaaccagcgactcaagggataggtctttaatggcaactctacgaatgtacacacgggcgccagtgcccgccgtttctggggctatctggctgacataatccaagtcgtcgatccagaaaggaggagcttgaaacagagaccgcgcttgcgtgttaatgttggcagtcttatctcaaactttgttgcttggactttgac

SEQ ID NO: 12059 - DNA, 292 bp, Emericella nidulans
ggcggtggctggctatagaacgtgagtctcgtcacgcacagcatagatattatacgggcggtgacatggcatgagctacgatgcccaaagtagtgttgtgtatagacgagtgtgcaagatagacccgaatctgtctatacagacccagatcgacgcgtatgctatacaagccaaatcgtcaatcattcctctcataacgcaagaggctcagagtctggagcctccagacatcagacttggctcagcacaccaacagccaactcctggcggttaaatacgtcccaactagggc

SEQ ID NO: 12060 - DNA, 111 bp, Emericella nidulans
tacttgccatgatccttcagtgattgggatcttccatccctcttgatgattatgctcttgaagctgctagtgatcaatcccgtaatgtactactcgaatgtcgatctcgag

SEQ ID NO: 12061 - DNA, 200 bp, Emericella nidulans
agcagaggtgtcgacctcgcgcatccgaacgagaagatacagagagaccaggcccagagaagcaggaaagggtactgcacatgcgaagaagaccagcggaacgggccacaacgcgccaggatcaaacatgacatcacacaggtaagcgatctcagacaatgagccacggcgagaaaagatgacgtaacaaggcagaggca

SEQ ID NO: 12062 - DNA, 2781 bp, Emericella nidulans
tctccaggagaagcaattgagatgcgtcgcagtcagcgatgcgatgcgacatagacgcgacaacatcatccgcgccaggactctagccaccaagtgtgcaggcctggtacaactcgacgagtcggactgtctacggctcgttcactactcagcagagaactacttcagacagcaccgtgatcggtggttcccggcagggaatgtgacaatcgcatcctcctgcctgacctacctgcagttcgacgtcttccgctccggcgcctgctctggtccgtccgaggacatcgactttgagagccgcctgagcaaatatcccttcctcagatacgcgtccattaactgggggaagcatctccgcgtagcggccgacgaccacctctctgctcgagcactggcccttatcacagatgcaggctgcttagccaccattgcccaagcattatggtatctagaggatcagcaacagtccaacagctggtcgtcgaagaacggctctgcccttcacctagcaacacactttgatctcgatatcctggtgaaagacctcctctcccagggctacgacccgaatatgcgcgatatcaatggcgtcacgcctcttgcactcgccgttcaacgagatttgttggacatattgatcactctcaccaatgcaggcgcatcggtgaatatgcccgacaacggcggccggtccccccttcactgggccatctatcataacttgcctgacgtcgtcagatttctgctagatcataaggatattgacgtcaatatgcccgccgcgcgctggtcacactacacgccgcttatgctagcttccgcctatgggtttgacgactatgtgtctatgttgctaaccaaacccaaaattgacgtgaactacgccagcccagagggtgcgacagccctgatcctcgccgcgcgacatggaggaacaggagccgccaggctccttcttgcgaatcaggagataaagataaactacgccgacagcagcggctcgactgcgctaactgtagcggcggaaaatggttactatgatctggtcgaagcccttcttgacgcaggagccgacacagaggtgctgcaagaaggaagcaacggcacggcgatcatgcgggccattgatgatgggcgtacatccatcgtacagctactggtagacagaggcgcaaacgtccatcacaaggacgtgtttgaccgcggcctcttacattcagcggctgtaaaccggcgagctgacatattgcggatcttgcttaagcatgatccgaccctcgacgtgaatatgcaagatgtacacggcaaaacgacattacacgacatcgcgcgcatgggggatcttgaaacggtcgatgtgctccttgaggctggtggtgatccgaccattaaagatatccacgggcgcacgccgatcctcgtcgcgcacgagtcgcaccatcctgctattctggaaatgcttcgcgctgcgaggcagcggatgaaggcagaagggcaaaactacaaacttcaacgaacccccagcggtacaacagtcgacagcgaagactacggcatcaaacgcgccgacacgggcctctccattcatggaaccctcccgctctggtctcttgtggtctccaaacaattcactgaactgaaagagcgtctgccggagtcctcacccgaggatatcaatcaggttgagccggatatgggccaagcagcgctacactgggccgtttccgacagcgatgcctccatcgtgaagctcctgattgactatggcgcagacatcaagcttcgaaccgttacgggcggacgccgctctctcttgccgttatcgacggtttgtgggacaaggcacgactcctcttagaggccggcgcagatcccgatatcgaagatcagtggggatggccacctctctggatggcaggaccgaggcttgggattctgcttattgagaatggggccaaattgccgcccccacctacgttcacaggcggaggaacagacgaaggtgaaaatatcgagaaggctgctgggaaggtggatctggaaaacttcctaagatgggcggcacagttcggctcggagaccgcgctccgccgcctcgttcaggcgggagctgatgtctggagtaaggacccgagcggcaaaacgccatatatgatcgcgaaagagtacgggtatgacgagctggcaaacctgctggtgcagcttgcgccgatgccgcaggttggcgctgatgggcccaggccgaaaactgatgagcgtgcggagaaaactgccacgagcggtatgccggaggacaaatctgaggatggaactacaaaggttaagaccgatgacattgagaagccaaagaaggaagaagacagcgttttgccggataaggggatggcccttgatgggctggactctactaccctcgtaccggcctctaatgttaacaagactaagcctggctattctaccttattgcttggctccgcgcatggacggtacctgtatactatcctgctagtcctaatcttggttacagcgacggcgttggtgcgatcgtgatgacgataatgcatgatgggcgtcggttcgattgaatagcgagtcatactcttcgtacaagtaatgtagttatagtgtcccgagttattgtcaattccatctgagagatattatacaggattggtattgtgctattccttcctccctgaacaataaactcactcacccagcggatacggatgcaggatctgtccgtctgtgtatattgttagaagctgaccactctatcca

SEQ ID NO: 12063 - DNA, 136 bp, Emericella nidulans
gcttagcgtggtgcgcactaataggctggaagagtgaagcgttctcgtatttgttctggtgtgttaggcctagtgttctttgtatggaagagcgatggtccggcggcagatataatagcaacgtagggtttattaa

SEQ ID NO: 12064 - DNA, 777 bp, Emericella nidulans
tcgtagctattgtttgagattcctcggaaggccagattgaggccgccaacggacggatccttgagtgctcagctccactcgccccgaccctctcctccccttcggctctccatccgtctcctctttacacctctctttcattcccgtgagcctctcaatcgcgaaaccctgcgacccgtcatacaattattctctgtcacgtagtcaggttggggcccgggttcgcttttaatccctctgcgagagggaaaaggttttttccggggcccatcgctgtttcatcatatccacccgttctccgtgtcagctccagtaccaaactcccgtcttgaacatcatcggaatacgggtagttcgcatttccttttccctttaattcaccattagacggccgtcctgatcgatcctcaacctctggttgaagcaacaaaaagaagatggctttaaatgaaccccccccatgggccggccaaaaccatgcaaaaaacccgggtgacttgaattcccattgtccgctctcaaaaaccgtttccagggacgctttttccgggggggagggccaacatttttttttttctggggaaggcgaaaaaaataatgggggtttgtctaaaaacggggccccaaaaaaggaccctttctttttttaaacaaagattgggggtcccccccccccccccaaaggaaaaaaaaacccatccccccccgttccccatgtttttatagagctaaaaaggccacccttgccctttttttttctcttaaaccccaccccct

SEQ ID NO: 12065 - DNA, 1394 bp, Emericella nidulans
ggaacaacaagatctgtttaaagcacagcaacagagagcaggcacgcagcactcaagccaacagcttccgcagcaaagcggtgccagaccagtaacaacagctcctacaacttcagcaggcgcaccaactgccccttcagcggttcatcctgggccgacaccagcagcacatacgataaattctgctgtgaatgctgcacggaatcaagcagcgcaagcagcaatgtctccaactccgcaaccaggccaagcgtcgtctaaccagggtcccacccctgcacctgccgttgctgctggtacgccgcaacaacagcctccgcaatcgcaaatgtcagctcaacagaatgcttctggcttcaaccaagtatctgcaccggatggctctactccaacaggctccaccgcgcaagccacaaacgtacaggggccgccgcggcctctgtctcaacaagctgccatggctcaagctgcacaaaattattcaaataataccaacgcgaataatactaacaatacgaatgctgtccagcagcaaaacatgaatcaaccctctgtcaatagtcatgctcatcctcaaggctatattcaaaaccgatcaaccgaaaactcggcccggaacgtcaatatggtgattccaaagaatcttaacgtcccgcccccaaagccagtgcctatggctccagatcggccgacattgtctagtgggcctagccatggtgctatgggtatgatgggccaacccgctatacagaaacatcccgggtatgttcttgaaggagagggccagcgagttctcagcaagaagatgcttgatgtcttagtccgccaggttaccggcggaggtgaaggtgaagggctaacccctgacgctgaagaggtaagctcaaatatctctgacccattaaccagtccttgcacactcgtatatcagctgaaggcactcactaaaatatgtggaaattacagttcatgcttcaaatggctgatgattttgttgacgatgtgattactgctgcctgccgactcgctaagctccgtcattcgtccagccttgaaatccgagacatacaactagttctggaacgaaattacaacatgcgcatttcaggattctccactgatgatcttcgcacagtcaaaaagccgcagcctacgcaaggttggactcagaagatgtcagctattcaagctgcaaaggtgactcagggtaaagccgaataattcccgggctgatggtgtgcgtcgctggagcagtcatcacaacaatctaccaattgacataagtattctataacggaagaagatgcctcaaagcatctgttctaggcgtcttgatgattatatgttgcagctgctgtcgccgaatgtttctgatcgtttccgatatcacgact

SEQ ID NO: 12066 - DNA, 99 bp, Emericella nidulans
cgtcacaagagatgatcagcaacaatctcctaatctgtagagttataggggcaaagcgaacctaccagcactgccgacactctacgcacagaaagcaat

SEQ ID NO: 12067 - DNA, 3373 bp, Emericella nidulans
tagctgactacttcggcttgtaaagctgagtaccactgccaccatactgtcttattgaattcttatgttatagacttctatatatgagcttctatatgacaggactgctctaaccgcgtgagtagccgcgtaaatatccaagggtacgctgtgcttataaccgggtgggcacactacttcaattcagacactagaccctgaatcccagcaacttcatgatccaagagatgtataccaaaccatttcgaaagggcctccactctatcgttctcattctccagagtctgcacaatctccgtctgtccatgtactcgtcttttcacctgcttcccagccataacatacaggcctttgatggagctctcatcgtcgcccaaaatgtgtctaacgcagacaaccctctgcgtaaaccagctgctggatcctttgctggtgttgaaattcatcatggcaaaatcttgcggtaggaactcggtctcggcaaatgcgtacataggcgcccagtctttgtccggcccgtacctgacgctatagacccagaattcctggctctggtcgactgcttcggggagaggcgttttgtctaatttcatctgtgctggtgggatgagatcccctgatacgttccttaagagcggcaatggagatgttggtccattgttcccaaaccccacgtcgacctaggtcaaattagctggttttccgaagcccaagccagctttgctgcgtgcccataccatatacttttgattactgataccaacgataatcaccatatgtcctctgtgcatatatcagcaaagagagctatggggccaatcattgccaagggacgtacaaagaaccatatcgaacttcagagccggcattctctgggtccgctgctgcgttcgatacccttcctgctgcggggtacgcctgatagccgagtgaccgaagaacaacatacagtaggttggtgttttccatgcaatacccatcgaggcggcgaacgaccagcttctcgaacaccgccgacgggtacgtggagatgctatgatgctgagagtagtgaatggccgaatttccccaaggaatagatgaaatatgtcggcgttgcagttcttctaacgctttcagagcgtcttgttcgattgatgcctggagttgatgcagtcgggggcattctggcccagaagcagagtttgcataaccgatgcgctgcaggtatgcttctagctgggatcgagtgaatgttgacgccatcgtatcgatataaagagatcgtctagtctatacagaatatgtcgaagatggagaagccttgaatacgggggcgggacatggccgctgagactgcggggccctgaccctataggagacaggtacctgcattgttatgagtaccacctttttggcccctagttaccaaacctccaatctgattgccatcacattcatctatccctcatcgttcaatataggtatactttcaattatggatcgatctctgaacatcttctactgtcctggcaatgcttgcgagctagagacagccaatcagcgagctggctccttataccgcggcccaggcactgcgggcgtgaggggacgggccacccatcgactggagctgcatgtgcctccccaataaaagatgcagccacctccctgtccctttcattcttgtgcaacgctcgcctttggggaataaaatcagtttatatcgttgaataatcgctctataccgacctctcatcatgggcgccatagacatccccgaacttcagttcacccctattgaggagatccaggaacgggtgtcgcgggtaaagaagacgttcctggagcacaagactcgagacgtcgaattccggcttgtccagcttcggaagctttactgggcgtgagttctctgaaattccccggttgtatcatgcaattgtgactgaccctgccggtagcatcaaggaccacgagcaacagatcgtcgaagccctccggagcgacctgggaaaaccgcagttcgaaacagaagtcagtgaaagcgtctggttggaaaatgacattgttttcatctcgaagaatctccacaaatgggtcaaggatgagaaggccgatgatatcgaccttacattcaaatttatgaacccgaagatccggaaggatccgctgggtaccgttctagttattgggtgcgatataccccggcgatcgtgtagtcctggtctaacagacagacagtgcctttaacttccccttccagttgactcttggacccgttctcggtgcgatcgctgctggaaacactgtggtgatcaaacctagtgagaatgcgccaaagagcgccgttgtaatgcaacagatcgttgaggctgcacttgacccgtcctgctacaccatcgtccagggagctattcctgaaactcaggctttacttgcagaacgatgggataagattttcttcactggcggtgcgactgttggacgcatcatcgccaaggcagctgccccccatttgactcccgttgtgctggagttgggtggcatcaacccggctataatctccaagtccgcaaaccctagactagtcgcccgcagactactttggggtaagcttatgaatgcaggccaggtctgcacttctcaaaactacctcctggttgacaggagcctcgtcccggctgtggtcgaagagttcaagaaggcatacaaggaattctatcctaacggagccaaggcgtctccggattatgctcgaatcgtcaacgaaggtgccttccgtcgtttgaaggggatgatcgataactcccagggcaagatcctcatgggcggcactatggacgagaaggacctctttattgaacccacgctcgtccaggtcgaatcccccgacgattccatgctcgtgcaggagagcttcggccccctgatccctattcttcccgtcgataacattgacgaggccatcaacatcgcaaacagcattcaaagcacccctctcgggctctaccccttcggctcgaaagccgacaccgaaaagagtacgtcccctacaattgccgttaaagtaaactaccaagctaactattcccagttctctcgcagacccgctccggcggtgtttccgtcaatgacgccgccctacacattcccaccctcccctttggaggcgtgggcgaaacggtctatggcgcgtaccgtggccgtgcgagctttgacgtcttcgtgcaccgccgccccatcacgagtagtacgggctggctcgagtctatcctggcgatccggtacccaccttacgcaggtaaactggccaagttcaaggcggcgagcgtttccgccccggactttgaccgttcatggcgtaagtccatctaggatggcttcgatatat

SEQ ID NO: 12068 - DNA, 2305 bp, Emericella nidulans
tgatcaaatgtcgcttccagctcacgagtcgggcatcttgggttccgtcgctggcgtccacgaacgtggatattcttgccttctcgcacgaacccccctcggcacctgagttttcgatagcccctccacctttcggtcaatgtcttgtgctacaaaatcatgttctcctcaggcgggagctgctgagtttatgcacgacgaggaggttccgcttgaaggccaacgtctgggggacctcccgaatatagaccagatggacgacgtgggcatggattggagccagtataccaacatgggctttgacttgtacaatctagacgcgccatttttgccaaaccctccttctggctttgatccagacgcagcaatgaaggataattgcgcagatagaaacacatgatcatcccttgggaggttttctggtttgcaactagcgttctgagctttgtgtgtctttgattagatcgagcagttcatggatattattcacacatgggcgagtcatatatggccgcatccatgcatcttcaatcaatgatcaaccgctgaagattactgtcctatgctctagtctctatcctgaaccatcttgagaaatatcttcatgttttcactttctagatgctcttccaagctctcctaggaagtttgtggcgctcatactgctgctttccatcgccgttcgtggagttagctggtgactgggaattttcagtagtcggtataagtcggaggagtcccaatcgttcaggccgtggggagttttgcgattggttttcgatattccatcctatattagaagctgtgcagagtcgtataacctatatccatatatatatcttgggcctataggatttccataatgtagctaggtatagaaacaccattgttactagaagtcagaggggacctctgttgcatttcctccacgattctgatggaaaagatccaacaagcttgttgatagaacaattattttcccgtttcccatcttgagtttttaacagcatcaaattttagctttcacaccactttttgcatttaagaacatctccagccaagttaagatcagagcaaaatagaggatgctaggccacttgcaaccaagatttttcaacagactacgaaaagaaggcctttactgatggcctaccggccgctgagcacactacatgagcagaattccaactggcgatggcagaagcatctgactaggcagaaattagctcggttaaagaggtgccgatgcttagagcgagagcaagtgtatatggcagtgctcctttccatctggcattacgacgttgactcgagtggtttgctctctcgtctcaaaggtgctgatcctaattgcagctgacaccttcgacattgcaagataatacatctcatactatgtgcatttcggctaaggccgtttcatgtagagccatgtatgggatgcatcaacaaccgaggactgtgaaagaggcaacgtatgggactacggacaggtattctaagacagggaggatttttgccagtagtctgaacggacagttgcaccgggactgggatcggtgttctaaacagtgccttactttcgttgctgggagagatgccatataacgcctctctcgtccccataccaattacgtgtcagtgctccttgtcctagtacagaaacagtctcaaaataaacagatttggctagtgcatattatatacattgccccccgcaattacgcaaagtgaagagttttggcaaactcctcgatggtaataaggcgtcctgtgacctgctggatcgaccactcaaccaccttttctgtttccacaccatagtacccatagtcctgaataaacagaaacatattcacaatgctgtccgcaccatcaggaggacagaaggatcggaacttggactccggcatcaccacatacttaactgtcctgccagacaccttgctgagaatctgcgccacctctacaagcgaatgaatgcaagacgaggccccaagcaccttaccgtcgtacttctctggctgctcgagaatggcaccaacaaacttccccaggtccgccacgacatccagccagggaaaccgcgtctgcggagagtggatgttggcgatggcgtacgtgccatcctcacacggctgaggtgccatcatgtcgcgcagattctgcatgaaggtagccggcgccacaaacgcgctctggatggggaggcgcgtatgtactgctcgacgtcccagcggacatcgaatgcagggactgaatatttcccgccggacgtgttcccggcgtgcgtcgcagtactcca

SEQ ID NO: 12069 - DNA, 1739 bp, Emericella nidulans
gctatgtcgataaggacaagatcaaccaattcaacacggtttacttcgcaggtgattcctccattttggacaccaaattgacgattgtggccgaccgggctggcaagacgagcgtactgagctgaaagctcgtttcgcagatgggcagcccactctcgtttcgtgactagttatcaccactgactttcagcctttatacgtcttaacttcattgtcagctactcaggtcacggatgtatgtagcatcagcaggtgtcaactgtgcttacacagtatacgcaggatgtacagacacaatatcaaagcagcttgcgctcacatagcaccatcgagcaagttaggccgcataatcccacggccgaggctgcgaatgcgctttctcaaccgtatactaacagcattttctaatgcaaagaccttggggcgtctcggggtcagcttgggtcaagcatgtgccttccaatctcctcatagccagcaactagccccacaaattctgtgaagtactaggcacgatttggctcacccggcccatgaacgtagtcatggaaaccctcaagtgcgcatggctaaaccacattccaggttgattaccaatatgcatagccgacagcctggcaattatcaagcgctcaatcgaagttaacgcggaagctattagttgcgaatgctcgtgctttaagcccctgagagccggaactctgtcaggtatatgcgagaacaggtgtggtatatatggaggtttagtcggttgaggcttgggtcgagacagcctcacgaaaccaggaccacaaggctagcattacttggcgtagcaatatcaaattcgatggcacaggagcgcttagaggagtcctgttaacatgagtcatctagccaagcgtgtacatcttccagctgcacgaccagttcgtaacctttgcatagtaaaagtatataatccatgcaattcttgttcatatataggaacgtagacagctgcaatcacacccttcagaaaataaccccagaatataaccttagaaacctttaatataaaaatgctcgctcgtctcctccaacacctcaaacttcatgccaactctaatctccccctccgaccgaggtacacccaacatcccaaagcaaggcttatacttcaacccctcgtcaaccctcctgtaactcatcatcgtatcccacggctgcgtcttatgtttctgcgccgtctcgggatcaacattcgggacctgacatctaccgcaccttgccacaatgtcatatgtcaggccgtcctcctcttccagtccagcaccagccgcactcttctcaaccccaggaccagcatgagcagtacgactgttcccgatccgcaccgtcttccacgagtcctcaacccacgcatctcccttatgcccacggataatgatattcggtctgaaccgctcaatcgtgatctcctcgtggccctgcgcctttagccgctcattcagttcatcaatcgacgcctgcgacgcaacgagcacgggcagaacatcggggaaattcgtattctgcacccggcctagcagcctcgggtccccgttacccttcagaacccgcggcgtgggacccttgtacacaaggacgacggggcggttaagaaactttgaaaatagctgattaatgccgacagattccccgtagacatatccgtccgtagtcgtgtccagatcttgatgtcgttgcgagggttgtgtgtctgcgagcaggtctgggag

SEQ ID NO: 12070 - DNA, 1737 bp, Emericella nidulans
ctgcgaaatttgtgcactagcgcgaaaacgcggatgactttgccatccttctcttcctcgaccatttaggagccggctgagtggcttttgctgaacatcatagcctctcttcttgctcttctctcgtccagtgagtcatcgtctgctcccttctttcgtctctggcgcgtgcggaccttcttgacgatcttccagcccagtagagcgattgcagcgagagctaccacagcgaaaatgctcgacgcggcgatcgaggctttctcatatttccaatccttgaccaagtcactttcacttgctgtatggttcaaagctgggtcagacttcgtgtcattggatggtttaccctggccagaagtcttgttgggaggtttggacagtggatcgcgtttggcgatttcgtgaatggcgtgcggatagctcgagcggtcgttggactttgagtcataaaagtcatcaggatgatctcctcgaccgggatccgcagtctcaactgcttcttgtgtgtccgttttttcgtcgtagaggatagaggtgctaaatgaggcacttcgagggtcagcagctggggacagtgcgacggttagtacccacaatgtcatcgataagaggaatatttgggatgagtaaactggtataaggagctgggcgaatgataatcacatcgatgagggccgtctagataggagtgttgctgaagggcaagacggcgatggcggcgacgcaggtaatggcaggtgtctgcaagcgcataaggcaattgcgaccccgaagtatctcactctgagaaggaggacacatagagcaaaaacgctgtctgtgaagctggtggtatctatctcttaggcagatatgtattctgcatcgccctatcttgaggcagtgtagttgcatccatcatggtgactcgttacgtgggttagttgctgtaagggtttagatgcgaagctccaatttctcgttggcaataaccattcagacttctcctcatcgcctaaaattagacaggtctgaagctgtaagcagcaagacagtgaggctttctgcaatgatacccaaattgatgtgcactccattgatcaatcactctccataccgctctgaaggcaaagcggtaccattccctcaggaggtagtagatactcttctgaagatcggactgatcttcgttctcatcgacacccgcgtactcttagagcccagacgcatggcttcatagtcttcgattcagtagttggtgtagtccacacggaccgatatatacaatgacatcactcaggaactgccgaagtatccttccctagcaggttagcgcattacgtgtcggatacttatcgctgacaccgacgtcaccctgactagcccttatcgttagcttattacggtataactatctgtctgcctagtctcagcatttctatgctttatgagtccatctcacattcgaatattatctcagaataacctctactatttctatctctgtctcactacaaagcactatcatcactcaactaaagtcaaaatgccccttgttgtccccgggattaccaacaccggtagcggtaacagcaaagacgactggctcaataagcttgttgggaagaagatcagcgattctcataatgagactgtattattctccctcattgtatttgtattaactcatgtgccattgatactaatagttttcgccgacagtgtttcgcaaaacaagacctccctgagtctcatcgg

SEQ ID NO: 12071 - DNA, 105 bp, Emericella nidulans
cctctagtccggccgccgtgtatcttgcgcgttatttttcctgttttgcctctgttttgtttctccagtcgtgcgcgggctggattgtttcctgcagtgctttgc

SEQ ID NO: 12072 - DNA, 460 bp, Emericella nidulans
tcctttggatttgtgttgtagcggcgacggttgtgttcttcgccacgtacgttgcaactttgcacttgaacttttttattatcaatacaaggatactttgactggtcgatgtcaaattgtgacaggccaagaccaataccatctgctagagagtattctttgtgggaaccttgcggatagtgaacgaggattaaatggttcgttttcgatccctggatgacgctgggagtcagcgctggatagcaagtgcaatcagtcgagacacctttatgaaaccagaggtggatagcaatacacggtcgcgagatttaagtctctgcatggtctgcaatacgtaaagccctgctgcgcattagatgctcttgagttatgatgcacacttgcgctggccccgaatacccctatcatgctacatgcgtagattgcttgctgatactgggcttacgctacgaccatcctg

SEQ ID NO: 12073 - DNA, 134 bp, Emericella nidulans
cgtgcagaggacaatatatccgcttgctgctcacgacgagatcgaaacggtccttttccaacttcgcaccggccaccctaccgatctgatttatgtcaatagcatgagaacgctcgtcggaacgtcatcaaccc

SEQ ID NO: 12074 - DNA, 1184 bp, Emericella nidulans
aaaaaccaatgctcagagagaaattcatcgcagcaagttcaaaagatgcttaaacgttttggaccctgtcagaattgctggagacgcacagcattggcccaaggcatgttacatcctatgacccattttagagatatagacatctgaatggccctaaacggaatgaactttattgttgacatagtgggaatgggtaatcgcgcgctgtatagaataattcggtcaagtcagctgtcctagcatgggcggcggcaaacggcagagtgcattagagacaaattaccggtaagatgatgctagaagagattagtagtggcggcgatcgtcaccccagcaaacccgtgcagaccccagtcgcctgacagaggctgtgggcacctctgagcttgggcaattgcagacagccaatggtttgctcgcccgtgggcgaacggccttggtcgagcaccagacaggggtcaaacgaggcctgtcgttctagatgggcggagcaaagtcccttgacgatctgcttccaaaaaagtcttttccattttcttgactccgctgttctcgcaggtgttcgaggcacgagaaagcggccatacggcaagatgagtcgatcaggcgcccaagggcttgggctgaacaaatggccttttcccccgttcccggtaggtgatgtttttgtcccttactgagccagaggaagagttggcatttggtgcataatgcaccctgttcaaagtaccgctagaaggacgctgctgttttggatgacacgccgggcatttctgacaggatttcggaatgctcgagaacaatggtcattttccaaatgtcacacccagatgatccagtaggcgcaacgtatgtgggggatttgccgtacgaacggagtccatagcaaagcttccagaataactggctcgccctatcggcaggacagcacagagtccacaccagctgagaagggactagtcaaatttcttattccctaacactgacagttttcgtgccttccccggcgagcctagccgtcaatcgaatctccccctaatctgctttctttgtctcttattcgcagtgcgtagaacgatgtgtggctgagatgatcacccaaacttgcaggaagctagttggttcaaaggtcagattgagaaaaaaaaagtaaaaaaaaggagccgaccctggtcagttggcag

SEQ ID NO: 12075 - DNA, 550 bp, Emericella nidulans
agccagcagagaaagtctatatgtgtctagcagaggaaaataaattttaagggtaaagcaaaataaaggtgaccaccgttcattaacagcatcgaagacctaccgtataaccttcattgagcctctggaccctgcctgcatatcatatcctcaagatagctggtgggccgtcgtctattgtgccctgggggtttgctcagggcgtcaacagtctccttcaccaacgataatttctcttctacgagtttggtctgctcagcttccactttcgccagcgccactcgtgcttcagcaagcatcttaacagacttcccatcattctttttctgtcgctccatgacagaaataaatagcctgtgtaatgcaccaggcatgcacctatcgatgtggcgcttgtcttccctggggaagggctgcacgacgagcatgcggacatcgacgccaacattctcgattactccagtgcccttattgtattgcttatcttttatccaccatgcaaatgcctggtcaccaggttcacgaaccaaggtccagctcttgatgtgct

SEQ ID NO: 12076 - DNA, 129 bp, Emericella nidulans
gtggaaaacttccagaaggccccttatgaccaaacccaggggagtctggcccaatctcgaaccactacatcagaattgccggtggatctgtagaaacgcggccagttcatagctgcagaaccaggaccc

SEQ ID NO: 12077 - DNA, 222 bp, Emericella nidulans
tttacacttccccccatctaacataaccataccactcaacttccctcccttaacccatgcactatccaaccccgtactctactcctgtaatgacagacccggcttcaagtcatgtccagacagtactgtcatcacaccaggactcgactcgagagggtatgatgttagttgtagagcaaaacggcgttacttgactggacatttcatttgattttgtaatgc

SEQ ID NO: 12078 - DNA, 147 bp, Emericella nidulans
agctcggtacccgggcgatctaccagtagcggccgtgagctgaagctaaagatcgctcataataccacactccactgcgtccagccggccgcaaaggagcccacgtgcaagctgtataaccagcgtccggcagcatgtgacaacccg

SEQ ID NO: 12079 - DNA, 859 bp, Emericella nidulans
tcatgccagaagcgatgctcatggttccacggatatgatggcaggtgtggaagggtagctaatgtaatatcctgcgtcgatatcccgttgacacggtcaagatcgacagcgtgcccagttgcccaaaggaaaccagctgcctcaagagctgcgcgtccggcgtgctgtccagctaccagcatcgacctatacggcggctgtgtcggaatgtttgggccgatgctgctcaggatctgttgaatcggaccctgtagtgtcttcgtggggccaatctcgaggatggcgctgtattgtgtaccagaggaaaggagggtctgcagcgcccctgcaaagcgtacaggctgaagcatgttctttacccagtatcccctgctgaggccactactcccaacggcttcttccgttaccgaggagtacatgggcactgtggccgacagagtgcgttccggtaatcgagtcagcgcgtggtccagatctggcgcaatgaccgccatataggcagagtggtaggcgacaccagtgcggaggatacgtgaaaatttgccatcccgacttagaacatcgtgtagggcggcaatcgatggcttggagcctgaaaaggtgacactgcgtgggctattaatgcaggcgattgttactcatctgcacagtcaatgttggccaaatgcctgttcgcttttgactctgacaaaccagctgccaacatgctcccctctaccccattgcgagatgcgacagctgccgaaagatatccacgaagaatagcgatttacatggtcccacccgctgattgattcctgcggcgtaagcgggccttgggcacatcataattcatattcactggatgaaagcaaaatcc

SEQ ID NO: 12080 - DNA, 122 bp, Emericella nidulans
ctcacgttttcctacaccaggcagtcacgcttgctcttttcacttcttcttcagtctataatgagccatttgttctgtccgttccccgccattgttgaaacgctcttttccggtccaaggtg

SEQ ID NO: 12081 - DNA, 161 bp, Emericella nidulans
tcagtccaccacgttcatggtttagttggcaagaaatcagtacaattgataacaggcaaccaaccgtttcagcacacaaaagtatctagaacagagcttgctctgctagccagcatacgtaactttcataggcagcctaatagtgcaatacatagcagtat

SEQ ID NO: 12082 - DNA, 160 bp, Emericella nidulans
gggggggaaagtgcttggccatgagatcgacgtttgtcaacacatgaatggtgcgctgaccttaggagtctgactcgcgtgcgaggttcagtcaggccgagatgtcaagatcctggctggcagcagttgcaggcagaacgatggcatgaggctagacagt

SEQ ID NO: 12083 - DNA, 105 bp, Emericella nidulans
  unsure (1)..(105): unsure at all n locations
gtgtgtgggtgtgtgtgagnaggcgcgagggtgcgcgcgngngggggtgggtggggagtgcggcgtgtgagtgagcgtggngtgcgaggcgtgggcgaggtgtgt

SEQ ID NO: 12084 - DNA, 2393 bp, Emericella nidulans
gccagtgtgagagtcttaatcctaatatgggttattttccacgagataatgcaaactggcgaaaaaactttcattcgggatatcaccaagatcgagaagagctaccttctcgagtatgctccaaactactataatatgcagtgactcgacgcatttgatatctgaacatgaattgtggacaactgaagtccggctcctaatgcatttagaaagcactataattgccttgcgtatgtggaatgcagttcataaaaacatggcatcaatacgccccgaagaaatcagtctcactgtccaggcatgattcgtccaccgacaccgttcacaccgggaatcgcgacgtgatcattgggattagccgctgcttcgtacagaaagctgacgggctctctgtttagggccatgaattggcccttgagtccaatgtacccgacttttgtcacttcttcctcgccacggctccagttgtcttcgaagaataaagtgactgaagtagtagcgttccagtgtgcacggttcaaaggcagctcgaaaacatcagttccagggatcggctgtggcacttcaattgtttgtgtcggcttgagctccgacgcggttgagaagtcgaggtcatcacgatttttgaaaagtttcagggtcctcggagcggatggtgtgggtgcagtgtatataaggatagaatgaacgttgacttggccagtgaatctatagaaaaaaaaaaaaaaaaaaacgttagagtcccttttttcctctttagcgtggcatggctggtgaaatgcgtcatcaatatcgatgatattgaaggaggggcgcggcggggtagaggagcaacaatccggtcacaaaccccaacagaaaagtatttcgtgtttaaaacataggtaaaacgtacgggatatacatcaataattgctcatccgcatcactttccagctctggagtgtcattctgcctttcagcccatgtctttttcacgatcgcagctcccgactggggagtagcttctgcatcatatcccagttaggttccattacaagatcgcttcagagcatcagcataccgttcaacgttgtgattgaatcgaatcgaatttgagagtagaggagtgattggagcgctggtgtgatgtcatttgagtgatcgtggccgtcgccgccgactccatggcaggggccgggaccgttattgtgggagtggtgatgatgggacatggtactgatatgcgaatttatggggtaaaagatctgatatctttggagactagatgctggtttgataaacaatactaaaaaaccccaagtgtaaaactgtaatcgcggtgctagaaatttcttctggtgaggaatgtcatcactggagcatcgtgaagctcctcgagtaacaaatagtctctatgtaaacagtcttcagatcactactctaccttcaagtctctcagggtaattatgattcctgttatatgtattgattctagtcgcgtatttattctagagcctgaccttttattctatgactgggtgcatttaaatatagctgttccccaaggctaaatatttctattattgcgacgcatgagcatggattgtctaagaccagggccgtaccatcgaggagatcgaaagctctaatgatgagcccatcaacaaattgaagtcataactccagtaatgcttgtactgccaaaagatagagcttgattagggctggatttcgtgaagctttcatcctccacatatgtaaaatagttcaagactactcaggaagcgggaatcgcagcttgttctctggccctagcttttgccctcgccttctgcttcttcagctcctcttctgggtttccacttctggcggcgctgttgggacattagggaggctgaccggcccttgtcgttcgcgttgtagggcctccagttcatcttcaacttcatcctcatcctgattagacaggttcccggcgagcatctgactgatctcctatacacgcagttgacttagtatgccgaaatcttaccgcatatgagccttacctcctgataagccctggcttcttccgtctcccccagtaacttctctactccttcaatgccccccatttccttatttatcatttgaagtacctgtgttccttgttgcaatccatagagaacatccttctgtacaagggcaaattcaacttgactagtgagttgttctagttgtgctagctgtgcatcggtcttcgctagaagagactcttggtacttcttgcgacgcaaggcaaggagggctcgcttgcgatcatttcgggcgaggcattccttcgcgattgcggtctcacgatctgtgagaacggtgatgcgcttttgatacttctggagtttatcacgttggtttttcatatcaagaatcgc

SEQ ID NO: 12085 - DNA, 2178 bp, Emericella nidulans
catggtgatgagcacatgaaggtcactgagcactgatatcttttgggcattctcaagataatacttaaaagacgtcctgagcttcgcattattgttagtagcgcgacacttcaggcagaagattttctacgctattttgccggagacgaatctcagcagggtccgaatggtgaggttggtgggaacaccggaaaaatcataagcattgaaggtcgaatgtatccagtcgatactctgttcctcgagtcggcggcagaaaattatgtggaacgaagcgtgaaaacagtgtttgatatacacttgcaggaaggtgagggcgatatcttgatctttttgacgggcagagaagaaatcgagactgcgattcagttgatctctgaacgtgcaacgactctccacccgaaatctcagtctttgttacccctcccactctatgctggcctcaccacggaccagcaaatgtatgtgttcgaacccgcgccggagaatacgcggaaagtggtcgtgtcgacgaatattgccgaagcttccgttactataaacgggatcgtctacgttgttgactgcgggttcgcgaagctcagagcatacgatccaagcacaggtattgaaactctgacagcagtaccaatctcgaaggctgcggctgttcagcgcgccggccgagctggaagaacaaagccagggaaatgcttccgtctatatacgcagcatgcatatgagcagttacccgatgccactataccggagatacaacgatccaacctcgctcctgtgataatgcagctgaaagctctgggcatagacaatatcgtccggttcgactttctcacttcgccgcctgcagaccttgtgatacgtgcatttgagctcttatactcgttaggcgccattgatgattacgccaaactgacgaagcccttgggtatgcggatggcagaacttgctgttgaccccatgatggcgaaagtcctcctctctgcgcaatcttttggttgtttgagcgaaatccttactattgccgctatggtcagtctccaaggggcagtgtgggtccatctagacagccacccgccgatggatcacccgcggtaaccatctttgagatgtacccggacaccgcagcgacgacgtccatggcgaatggaagattgaaaaatgagtaagtagagagcaacaatgtagcttggcgaaatcaaggatgggagcttgaccatgaggagctcggagtgagaacgatagtggagcgccaagtggagcctggtggtggtcggccctgtgattccgtcatgctgtctcaaccctcaagtgtccgacctctcgacgtctttatttctctcgactcttccaaacactactggtcttttccttgtttcttctcctacatgctgccattcctgtaatctactcccgctcgggcagcaactaccatgcttccaggcatcgacacttgtacgtctctcagttttttttttggcatatgcacttggtcttggtgcatcagagttggagcttcagatcgagtcaactaacagtttcctcgcttgcttctagtgttcagttatccagctgagataactggagcgtccgttgatgagtgtatgtctctctgattgccccttccccatgatctgttcgactagtccagctaacaacggcgtctttatagtaaagctcatagcctcgttcctcctttcataccctttggcagcgcttctgaaaagaattccagatgctcagccatggaataaaaatgctttcaacattgcagtatctctcttttacctcgtcggattatttgacctgtgggatggtctgcggacacttatctatagctcccggggcatatacgctatcgcctactatatagaccgctcaatgatgccctggattggcttcatatttctcatgggccatatggcaatcaacatatcagccgccaaatcctgacgatccgaagttgtgggtatacagggccccagaggtcctttgatgaagcttttggtttcttgtggacctgctggatggccgtgcctaaaaccggtggccatccagaaaatgcggggaaccacattctttttttgactccccggtctgcttatttccggctttggggcccgttgccttttccactcctgggggccccctttgaggcccggctcccccaaaggcccccca

SEQ ID NO: 12086 - DNA, 540 bp, Emericella nidulans
taaataatttttttaattatcttatttaggcctgagtaatcaatatatataaatcaaatattttaattttttaggaaaaaaaaaaggggggccctggtaaggcttatagacaaataaatataattataaataatattttttttaaaatagtcttacagggctgtaagtttagtaactaaaaataaatatatagaattttagtaacttaataataattaggataattatataattagtaatatataatgggggtatagtttcagccttcttagtaaaagaaatatctttatatataaagaattatatattatataaaggcccctagtaagaataggctttttttatctattaggtagataggctccttttaataccttaactaataaatatataagctttattgtagtatacttttatagatttatatttagatgttttaaatcctagatattttaaactgtatttagattaaatttaaaaatataaatataaaacgtaaaataaaatttcctgttacgggtcctaataaataattatata

SEQ ID NO: 12087 - DNA, 438 bp, Emericella nidulans
agtgaaggctcactacaaccaatacgttggatatatggcgggcatatgtgtcactacttgacagccggttgtcagggggggaacccgtagtctgaagcatggcagcgaactttctggcacctgcctgttttctaaaagctgactcgacgatccctactttgatttcaacttcgtttcgcattgccacgcggcggaccagtgacaacaccagttcttccttactctcagtttggcctccattgccgttacaccggcatacaatctcacgctttacattggaaactgtgaaaagttcaagccgcgctccaccctgccggtcatatttaccatcattcgcatctctaacaatatacatatattgctatccctccccccctccgctctaatccattatatatctatcataccctcatcctactctatctcacttctgctcta

SEQ ID NO: 12088 - DNA, 3897 bp, Emericella nidulans
cacactcattgtaaacgtggggaaaaaatgtgggataagccgagtcgctatcggtgttgggctcggaagacgtacacttctccacaatcgtggggatctcaatgcttaagggcagcctccattataatgtcaataaacgcatacgtatactcttgagatcgtacctggggacctaggacctgcagaaggatcttggctgatataaaaatgtcaagcgtccaggctatgtgccgatctatgagttgacgggcttgtttgtctagactacggatcatattcagagaacttgtacgaacaagaacaatacgaacttgtaccctacaagataacgacattgacctgtctgtgctcatcgacaatcatctgcattcattgcttttcccatagcaatcgcaggtttatcgcggccagttgttgagcgctgcagaacatgcccacgtgatttctggcttccttctcgtgacacagattatattcacaccaaacactccatcagtctttttccccacgaactatcttcgatggtcatgcatagcataatttcattggcaatatccttatccttccttttcgacattgggttcgtaattatcgccttcggcagcgggcttctcaacctgttgcttcgttgccttgcatccatcctcgtcctccgctgcaaaaagcaccatcaaatggacagaatgagccaatacatctctcactgcctgcggtcggccgactctgcctctcgatccgtgttatggccgcgctcctcatatataaacagcgtggaattacgccgttttgttcgtggccattcctcttcatatttcatcatgagactggccgtctagacaggagtttttcttgagcgtacactgcgtaagttttgaaggtgtttccctccatcgtgcttgcgtcgtgcttgaagacagtagaaaggagactttgggacacggcggttcgagttggactggtatacccacaaatgtgttaacagtgcgctgtctagtctgctgcgtcgaaatcggctctaagatcaaagaatactatcaagctgctacgtgatcaggtcttttctactgcagccgtttgtccccctcctcaaccctaaagtcctcccaagacggtctgtcaacgccgttcggtcgactcgccctctcgaaactgttatccacgccatcgatctccgcgattggcttgacaacctcaatctccgcgccataagccgtagaataccacttctccgtcagtattacctcatgctctttatcagaaccgggagggagatacagatgcggaaagcgctccttcattccttttagtacagtcgacgagattcggtcaacgctgtcacagtgccgcaaggagaagaactcctctggctggctcgcgcgcagcgattcctgcacatcttggtcgtactgtcccacggcgaagaggaggaggtcgtagtgcataagactagctttgccgtggtaggaaccgccgaatttggcgcggttgtagagacctgttagggcggcgatcgcgcccatgcaaccggtgccgtagtcagaaatgggaaagggaggaaccaccggggtaggaaggttcatgaatttcccttgcgcccatgctacgcctgttacctgcgcacaagttaattttcgggcaccgggatacagggggtggtggagacatacacaatcagctatctgctgccagccgggacgacctgcccattccccttcgtagccaaagcagttttcgttgacataaacaatgccctttccgcgcttttcggcgagcgcggcgagagcagatgcgccgtagcctagacggtccagcgcgccggggcggtatccgtcgacgaggacgtctgcatcggccagcaaggcctcaaagacctcgcggccttcaggtgttttcaggtctagatcggcagcatgcttgcccatgttgccgtcgacctggaagaaggggacatctgagaggtgggggctcgtgatctttagaacatcggcgccgtactctgtcaggatgcgggcgacggtgggcccggcgatgatacggcagagttcaaggaccttgatgcccttgagaatcttcttgttgcctccgtcggctgggaatggcgttggaggcaggttgccgggaagtttggtgactttccaaggaggttgttggacgttgagtttgccctgcagatgtcagtaagatcttctgtagtactaggtttacaactacatacgtgaggtgttttgataaagtcctcatacttgaacgcagtcacgccggcttgtctccgttcgttgttcatctcctccagctccgctgcagagtacttctgcacgtggctttcgatgaccttaatgatctcctcataatccgtgagatcgggccggtggccctccaacccgatcatgtttaatgtcgttgtggcctcgagcgagccgtgaatatgaaagaactcaccctcattcttggtcctgtacaaatttgccgacattcggcggtatccatttgactgcgccgcgagcaagtccgtatctactaaatcagcacggcactttggcgctggcgcagaatctcataccctttaacttcttcttgacctcggggtccagcttggacatcccgtccaccttagccatatacgcctggcagccgaacgccgtcgcgcgctctaggttgattttgatattccgtttttgcgcagccggtccatatctcaggtctgcgatcgcagcagccacggaaccctccacgcccttcaaagctgcaagtgtctccgtctctttaaacggaatcgggaagtagatcttgtcatgggttgtgttgaacgagactgcatcttgtcccgcgaccacctccggggggagattgagacgctcggcttggtcgcagaggaatgagaagatgcgcattgcttctttgacgggcgaatatgatgccatcttgctgtcaaagtccagaaatcgactcggtaagcttcttgtaatagctagaattgcgtggagtcgtagatttatagggttcgtttcagcgcgcagacatggattcggaacggggaggtggtatttaaatgacgtccgcagacgattccgagcagccagtgtcgggaagatcacgagcactcgactgatcagcgctggtaggcgtcaagaagcgcattatccttgtcactcgcgccagaagcgaatcaaagtctctggacccctctctctcacaacgcttctgcgcttccgagtcggggcggatgaggtacgatcggatggctgccgataagatcggaaggcgggaaacctcttgatatcaagtgttactagtatcaattttagttatgtgaccgggatcttcaacggaaaatgaattcaaggtcttactatcctttactacataagtttgatttgtatatgcaatttactactctcgagacttcaaaaacgggtggtccttgataatcagggagatatgaccagtcatagacaatctgaaatgtcgattgaggcgctgagtattgattagtaaggagagatctctacattttgcactcgccaaccaatcaacgggctctagtcacatttccaggcacagagttttcgtgcctgaggtggatgtctgagaacggctagcgccactcagccgccgggatcggagtgctgtccaatcacaggatagccaaaaaaaccaatactgccgaaatattcactccccgactttttgtccatttctccgcaattcattcaattcagcactacgctagaatcgagtgaggatgttgaggcagatcgtctcgcaacggagcgccgcacgcagggtatgtttaatatgtggattgttcattgatacagcagctaattgatcagcttgcaaaaaacctgcgccgcggcctggccgccgctacagactcgactcccacgtcgtcgcgca

SEQ ID NO: 12089 - DNA, 167 bp, Emericella nidulans
agacagtcgcgaacagctgtatcgccttgaatgctgagataagattgagaggcgaaagcgtgctcagcaatgaccccacgtaggctcaaggatctggcagccggagtatctcattcgcgtgagcggcgtcccgataacgcggcgatagaggctctgcccgcctatga

SEQ ID NO: 12090 - DNA, 3666 bp, Emericella nidulans
ctgggcttcatccacaacttcccactaccaatatacgtgtcgatgcagcctcgcagcttttgtctggtctgcgtggctcggaatcggagtcccagcgcgacgcaagctgctcgactctaggactacgaattactctgtaggtacggtacgtgcggtcatcgtcatttcctttctctggcgaaaggaggtatcactactatcttgagtccttgacatgtccatacccgcgcataagagaacaaagtcagccggtcttacgcggctgcgatcaacatggggccgtcaaaagtgtcaccaacccagcatcctacagggctcagaattatgcgtatttctcagcaaccgaaacgcgttcaagaggagaataaaagtggttcggcaatgtcggagacgtgcggcgaaaggccgcaaaatctcccagactggcaataaaagtgcatacagtgggtacttgctttttcatgtttgcccccagatgacgaatcccggccgggtatgcggttgagagtacgactagggcactggagtagctcgtctaccggttgctctcatgactacaagagtagttagtgcccttgaagtggacaagcttgcaattggcactatatcgggctcgggagtatcgggcagacgaactgctccgactcctccttgctccttagggtaagaaccatccattgctaaacgtcagttgaatggcgtggatagcatggatggcatgaatggcatgcgatcgagcgatgatttttcgattcgactatccgagtccacctgccacaaactgcaagtgactcaacacagaatttcattttgtatagatgactgagatatttccgagtggtaagcgctctcaatctcaagaagaacacgcggcacatgcaccccatcacgatgccccatcagccgtgattcccaccaggaggtcagacctgtttttgtgagaggggacgcagatgttatgcgagttgcgtatatatgcgtaaaccaattcgtgatccgtcttccaagatacagagggttaccgcaatactgggcttgaatccaagaatcaaggcacattgcagcccttgattacttcagggtgatgtcgccgactcgctcagtgctggcactcgcaccgcaagaatgatgtggcggagacgcgcaagcgtccgtcttggcattggacgagatctgcgctagtctccttacggtttcggcagggccagaccgatccatccatcactcactcagtgccctcacatacactaagaatatggagtatttcgccataagccgatggacaatccgctcaggcaaaaccgcttttaccagaccctgttgctgacagaactttggccgctgtatcgagcccagctgtaatcgcagcgctagagaccgagctctgtcagacagattggcaacattatcgacttgtctcccatttggaaagtgctcggttcaggactagcttcattcttatgccgctagaactgcgtctagactccagtcaaggcgggatgtcagatttacgctatgtctcaccacaccaccttttctataacagggatctggggttttctgcagaacacagagtaccctgtttcaggagaaaaatgccctgggcttcgagcttctcggctccatcgatcctgaacccttgagatctcccttgaaatccccacattctagaacggtctactctgaatatgtcttcacttcgctgcatgctatagcgtgcctctgggatttggagtacatcctcgggaacactcgcgtacgctccctgtgcagaaaggggcgccgcattcgggtgcaactgagatccatttgcagtggcgaggttccagtggaatctaagtgtcgaatgcggttccgttcgcttgtctatgcgaggggcggtcattctgtgagctcttgtttgagctgctgtgacatctaagaccgtgaaacggtccagatcgctctgctgtcagttcacttttgtctcctaagggggctcctggtcggctgatgcagatgcaacctaggacgccttctaagttcgatcaaggctttgccgacattgctcaactcggtcacggcatggaggatttaaagacctctcatcggcctcgactcaggtcgactggccggtagttgctgttaccccttaccttggagacaccgtccgttataacaaaaacgtcctctagcataacaggagcaagcaaactggctagctataagataagggtattcagtgcatacatggaatgattggcttgtgctataccaacaacgtcctacttgatgtaattagtgagaagtggtctgacctagccacgataccttttagactacgtagtgatgagcctagcagatcacagccatatttctcatcagaaagaacgaaacttacgcagaaagctttctccatgtcggtagatttctacaaactggaaatgctgagagctgaacatatatatatcagcttggcatgtttctttagtatgaattacaagtaggcggaacgttacaatttccatcgcatctgagcgtccctcaggaaatataggtaatgaaataccacatgcatatgtagtttaatatttggcatgaaattatagtcaactagcctcatatggccaatatagctgtacagaatatgactttcactgcctgtgacacattatataaagtcggtagatgggaaaagacggctggctggctgtagccacatcaagcctttcggtataaataagctggaagtaacggtcaccttattactcataatctactattagatctctgtaaaagaagatctcctactcattgtatacccactttttttgacatgcctacctgaataacctgatgtgcttcattggcggaggaccagaggcgggaagcgacatgattggtgaatggtcggcgcgttccaaccacgacaccaaaagacacgatcggctctccatcaactcctatcgatacaaagtcaggttactttcaaactgttccatgctcccactctttcaattctctccgtctgttctgcagcgtagttgcttttgatgtggctccccctctcgcgacccccgtccctcgtcggcccctgatatccgcatctcccgacgacttgtcctaactcaactttactctgagctctgacaactcctctcaacacaatcaccacacctaccattatccggctatctgttagactcttccaccatcacgctgcccggcctacgcccttctgccctcccggatcgggggccctatcctcatcatgaaggccaatccattgctcatcgcctggcacaacgacaatgcccccatctattccgttcatttcgaccccaatggcaagggtcgcctcgccacggctggaaagtacgttctcaatcacatcctcgcaatcccttcttgtcttggctaatacctctcgctttagcgataacaatgtccgcgtgcgttcgccctcccggtgaaccctcctcgtaccttcgatgattctgactttcaaggaattatagctgtggaaggtggaaccagttggccaagaacgaaaggtgacctacttgagtacattggtgaaacacacacaagccgtcaacgttgtccgtttcagtccgaaaggtacggagtctggatcaaacgccctcatttcgggtctgctctaatactcttgtagggagaatgcgg

SEQ ID NO: 12091 - DNA, 2536 bp, Emericella nidulans
caaatgtatcttatggaaggccgcggcggtgtaacccaggacgagtgtgggagaagcagagctctctgcttctctttcccgtgtccgtgggatatatctgttggtatactttttggcttctacctgtatcaaagcttctatatggcggtgtcgtcacgcgcgttctattcttttctacatattcatattttcaacttattccccatattgtttctgcatttgttctcttctactccttgtgacagcgcagagttctgccaacacaatccttctctcatcactttcgactctttctggatactattctcctcgtggcaaatatgtgcccattctaccttgatctgactctatcttttaccattttgtttgtacagctgtatagtgaagtgaatgtagagaagcgatgagctatggttggcacgaattagacgttaatattgttccgactttaagatataccttacaatgtgccccattctcgtcaaattgatgctcgtagtatgtcatgtgcaataagcgaacgcaaagtgcagccggtgaccgcaatcttttgatagcacatgagataagcagagaacgggcgagagagggaacaccgtactccgtatatatatccgaaagacatcgaagtcgagtcgagtggagtgcgtcgacgtttcagggtactttttttatggcaaccaggccccgtaggaaggtactcactccgttttacccttttcttccttctgtttcgacccaaaccccaacatagccaggatccctgactctcctctttcctctcgttcacgcttcctcctttccttcgcgcgcccgcagttcttctttgtattcgtcccagcttacgttcgcacttgcggcatctgctacctcgggtgctttgatatggaaatggcttagcgaagtagaatcctcctcgtgcgtcgttccccctgcagcatgtgggtgctgcggtaagggcttgacggcgtcttcaccaccgtatatgcgcagtccggtccggaaagtccaatcgaccgcttcgtcaactggatggtcgaagatgtagggtaggaatggcacaacagagagaccgagctgttacagtaagttatgggccttcataccaggctttgggaatcatgtacataccccgataggaacccatgtcctcgcaaatgtactcttggcccccttcagcgcgcgccccgaatacctcaccacgctgtggattgtgagcgcaggaagccccatactcgcaatactctggaagactgcgcgcttcgccataacgacccggtaatcctcgatgagcggaatatgcgcagtcggccagggtgttagcgtatccgagtctacctgcttctggccttcaccccaatcagcagagctcaaagagcccccgacatttccggtggccatccccatcacgatctgctggtgcgtgagatcccttgaatccttgtatgcttcgcagggcggcgctaagacgcggcgattgcgcaggtacgccttgtacccctcgtgcccgacatcgccgagaaggtatgcccaggagactgcgtaggcggagcgtacgagaataggatgcgcgactggacggaatgactcgcctacgtcggaggtgtaagccacgtagcgatgagctgagagaagcagtgtcctgaggcgagttgcgtaaccggcgtacgggtaattggtgtcggtcgaatcgacggagctgttggaactgtcagccatggctagaggattgaagtgctgcggtagaattaaatcgaaaattcgaagccatagccgatactcttaaaacaagtagttgcgggggtggggatgtgacgacattcagggcacacgcgacactcactaatatgaatacacatcatcatatggattagtatcgtcgctatcgacaatcttctgtagctggggcgagagcttgccccgtttgacaggtggcagagctggaggctcagaaggctcctcctttcggcttccccagaacatgctgtccgaacacgtcgggtatctgttagttgagattgaggagaccagtaggtaggagctgttgtataagtacgaagggaagaacacgagagacgagaacaggtaaaaggcaggagcggccttgtgggaaatattccagcaataagaataaaattactattctgctacgagcctaggtagacactagacagccatccttgcgtctctgccatatccgcgtaaccggcagattcaatttccagggatgaggaggcactgttcctttggttttggtgagagatgatgccacgaggctgacagtttccggcaaaagccttatacagccggccgctttcttctcttttagtgaagctgaaggattgatccttcctgcctttgatttgagtccagcgaaccatagccgagtcattcttgtgacatacaactgcagtcttttttcgacgtcatttactccggagtattggcgggaactacccgggacattacgtgcgcttacatagcttggttgcattggcttacttaataatcaacccctgctaccagcttcaaaaaa

SEQ ID NO: 12092 - DNA, 837 bp, Emericella nidulans
gagggcgaagtgtcgcctttgaaaactaaccgcaagcgtggtttatttttgtcaataacctctcccgtgcgctctttaccaagacttcgcagcttcgttctccctccgcagaagcctcgtgaggctgaatctccacctcgcaagtcaccccggctccaatatggatcaacccggagatctctgcctagtgaaacccccagcaagccagtaccacctccgcagaccaaccgcgcccggacaccctctcggtcagtaagtcctgtcaagtcaccctacaaacaagcctctggctgcctctgtggtgcggtagtctatgtggatgttcacactacggaaggtgaggatgcttgcggcattttcattgaactactccagcaaatgggagctagatgtatcagggacctgtcatggaacccacgggtgagcgtgtccccggaagaggatgccagttcccgaaaagggcagggtgggaatacccaagttgttttaaaggccggggggttccgaccctggaaaagggccgcaggccccgggcctttcaagtgcgggggggtcggttggggtctgaataagttttcctttatccccaacgggctgttttacttggacacattaaggcaagaaagatgggagaccggccccccccttgaaaccgtcaacttcccgggggggcaaaccgcaagagttgagcccctcctcagaaaataaccgactttgtaaaccatgttttgccctttaaccacggcccccgttgtgaaacttctggggcacctctttacatgacctctactggttatctcgggcgttttctcctcccgaaatttgctccaaccctcc

SEQ ID NO: 12093 - DNA, 579 bp, Emericella nidulans
taacgatgaatgcacacgaactgtcgggaggagcgaaggagtggcgcaccgacgctcaaatgcacagttttttttcgtggctggggacgtactctattcacttgggatactctcaggtgattgaacaacaggcatgctagctacatacgcgcgagacatatgccatctgaatgtgtgcgaagtcagaccggcacataatgtatgctgatgggacggcgacgatatgcacaaggatgctggcagacactgatcgtgcagtcataagaccgagaacttgcatgcgggtcaatatgactactgtaggcatgggagacaggaaggcacattctgttgcctttggggttctgagagcgaaggaggaagcatgggctgttctgtcagaccaggaatgactagaaggatggctacgggagcaacggtatgacgaaccaaactatcggctgatggaatcttctctcacacgacgttggccacttcacatgcggtccgggggacgatactgggtgagtgcaagacaatttggcgtaatatcacgatacagtaggaagccacggagcgaagaaacatgaggataagtga

SEQ ID NO: 12094 - DNA, 154 bp, Emericella nidulans
cctatcgatgatacgcatgcacgccctcgtcatattccgataatgacctcatatgtatccaatctgctcatgccgagaacacccgattttccgctcaaggacccgagtaacctcaatagctgtctgagagtggctttcaccattagacagatta

SEQ ID NO: 12095 - DNA, 103 bp, Emericella nidulans
actacatacactggtctgccgcgcgaatagcaagccgatgatcagcctcacttggtagactccgactgtcaaatgccgcagaaatctcaatcaatgagaattg

SEQ ID NO: 12096 - DNA, 147 bp, Emericella nidulans
ctgtgcgccagatgctaatattcaacccacgtgtgtaacggtgtttcgtgtcggaccggctgttagagaggaggcagacgacgtacggaatttagctcaatgtgaggctgggcttatgtagactaatgcaggttagattggtctgtc

SEQ ID NO: 12097 - DNA, 1549 bp, Emericella nidulans
cggccgccagcgtgcgcgaaagggacacgctcgaatagcgtgttgactttctgaaactcagcccgatacttgatcgcattgcggttcttcagatgctttgttcggaattccaagtactatagattcgttaacaattgactcaaatatcaatcggggactcagagttttagataccatcttccaaagcttgtaggatctcgggagctgtttacaagcacgttccatgacctggaaatcgttcagtatgctgataatcaacgcatcaagagggcgacccacgaaagcctgctcgtaaagagtcccattttgctgtttatattcgatatacgcaagccatggcttgatggtgccaggattccggagaagatcttgctcgtacacgctatcgttatcggcctgaaataacaaacataagattagcaaccccacactccatcatggaatcaacccacttacaattagatatagatcaggccgggaggccgacgatcgatccatttctgcgtgttgcctgtgggatctcgggggcagaagcgtccctggcattgcgccactcaatagagcgggaccgactcacacggtcagcacgtattcgcgaggaaacgtgatggcatgagcgggaaagtcttttcgtcgcgtcttgggcgagtattgaggagcgcttcggcgacgaagttagcagatgcatcatcacgtgatttatgtcatgcgggcggccacgggttggtccaagcttcctgtcgccggtgatgttatcatgtccctctccgcctttggaccgctatcgtggcttgtgcctgcctcacttgagctttgtttcgggtgtctatacaatgtccggagctgtggtgagtgtgattatcatatccgagcgtgacaataacttatgacttgtacttgaaatagggccgtgaggcggttttcccgacccgccagtcgctcgggttgatgaagagtaaactcaaaggtgcggagaccggccacagtttactaaaaagaaagagcgaggctttaacaaagtgagcctcctatgtctaattgctaagtccccaatactgatactatgtaggcgtttccgaggtacgcccgtctagttctagtttccgacgacttctccgcatcaacagcattaatcaataccagagataaccaggcgaattgatgaggccaaacagaagatgggcagggtgatgcaggttgctgcattctcccttgcggaagtgagctacgctgtcggtggtgacatcggctaccaagtccaggagtccgccaaacaggcgcggtttcgagtgcgagcgaagcaggataacgtttccggagtattgttaccacacttcgagagttatacggaagaatcaatcaatgactttggcttgactggtcttgggaaaggaggacagcaggtgcagcgctgccgcgagacatatgctcgcgcagtcgaaaccctggtggaacttgccagtttgcagacggcatttgttattttggatgaagtgatcaaggttgttaccgaagaggtgagtgtcatcccaatcaatggatatggata

SEQ ID NO: 12098 - DNA, 1243 bp, Emericella nidulans
ccaccagagaacagcacggcaatcttcacattgctaccccctgcaaggggaggctcacggacattttgaattctcagcgccagcgactggcggagtctgtcttccagctccctgagaacagacgatgttacagttagttgtgagggcgtgccctctggaatagccttgttcatcggaggaatgggacttatctagacacgttcaatcagtcacccgcccacagcaaagagcattcgctaggccgtaccatatgatatttcggcagggcttcatggctccaaggtatcctttgtatgttcttgacgtcgaagcaaagaggtcccgcagccggggctggttcagggtccgcgctctgatcatcttgaaactcaatcatatatataccgtctgcctcgacctcttggaaagaggagggcgaagaggcgtcgctcaggctacatattgtaagattccccgccgcatcgagaccccaaagtaacgatcgtcgtcctaaacagtcccttccaaagtacagcctgaagttgacggcatcatagaagacgaaggcaaagggcccagtaatcttactgatagcatctgccactctttggactgggttggaaactccagtgtaatcttccgccaggtagtcctgcgtagtagcttgaagcaaatggttaaaaacgatctcagtgtcgtttttttctggtataggctgtccatcaatcttccaggcgtccccgttccaggcaagtatagacccagttctgccactatccgtgagtggctggcgaacgacatcgtcccccctcatagagagcacagtgcttgcaaaggaaagccacatgcgaccattaccctcatgattgaaaagattgaggccggcaccgcggacaccaatgctgtatgagccctcatctggaccacgtttagtcaacaaatagcgaaggtctctatccagaagcacggggttctcggccgcggtcagcgagaagaaaattccacacatgctctatattttctggctcccgtaagggccgaatctctcggacggaaatagaagcaagcaagagcgaagggagagataaatttaacacagatggccgggctcggggtaactatgtcccgccccaggcttattcggtcaacacttggaagatcaggagctcaatataacttgattccataggactgattcctaagtcacttaagccatataacccggcttatcataactgccgagttggcgtctccattcgtgctg

SEQ ID NO: 12099 - DNA, 1593 bp, Emericella nidulans
ctaacgacatcgtgatgttcgttaacacatctaagcaccgctcaattaagtttgaccgaactttctcccttttagagtccaagtcctcgacagtgatcaagtcgcgtcgcctggtaggctgctgatcagtgcgccgttctggcgagacagctgaactgctcacgcgagcattgctggactctggctgattgctcgctgcgttatcatcatggatatcatctgcagatcttggattcagaatctgggttaaagctctcgtgatatcgtccggcatatctgcgtttgtgtcctggcggccatctacggcgggccgtctatgtgcctgggcgagaagcatagagatagggtcgctgtcaaaaaatgcaccactatcgaaagcagtgacatccgagccaaccgggtcctcaagtccctcaccagcagatgtactagaacgagctgcttcaatctcattggcttctggcggtatcagctcgggggctctcaagtacccctgtgctctgcaatactcctcagcagcagaaagcgtgttattgcagcggtatagcgcctcctggactagttcactgtcaaaccctttatcctgcaacgtcttaactctgtccttgtggataagaaatcgctttctttgtacatcggccaaggcggctggtgggtcagatcgtcgagctgcacccgtttcatattcaccatcaagagacgaacgcaaaatatcaacgaggcatttgacaacggagcttgtagactgggttgcaaagtcagaattccacatatcgcgcgccattggtaaaatctgcatccgaagatccaccaggaattggcctgcattgaagtagtctggccgaccccgatcccggtcacttgacatggcctgtgtttggttcgattccataatgctctttccagaggctaactcggcaaagaaactcaggattatcttgatgccaccataggcggacgtcaatcttgcagacacgtcattttcggaatcgggtacagattgcggtggcgtaagaaccttgacctcacgcacgaagagatcacagacatcctttaagactcccagtccgttactcttcttgaaggcgaacaggacaagcgtaaggtaataagagtgatggcgatccggtgcagctagaacgatgagttagatgggggacaaggaaaaagtaacatgaaccgaacttaccctcgaatagcaagtgagaaaaagacgacaggataacaataagataagcaaatttgagctttgggttgctgctggagttggcaggcttgaactgcagttgttcaagtacagcgccagcgataacgtcagctaccgtcgtcgcattctgcttctgataagcatcaattcttctctttccaatgaggcaaagacccaggttgcggaagaaccctgtaattgaagacggcagagaactcagcaaataccgaagtgcttgcacattcctgaatgctacatcaccgtctgtgagcttaggttggatgtcactagtcggctgaggggtctgcgggttaggagagttgctgccggtgggtacatctcgacgagttccaccattgagcaagttggaaatgttgtctgcaata

SEQ ID NO: 12100 - DNA, 3504 bp, Emericella nidulans
tccatgattgtaaccgccaaggtgattgaaaaatgattatgtggctccggcttatgaggcggcttgacggaccgtctaccgtgttgcgcctctgcacctccgcaagcacaacaatcagccacatatcggtgaattcgaatatcctgcggcttcgatctcttgccattcactcctggattgatacatgacttgatcaagagctgttcaggatatatcctcagtactaaggatcaagtcatagacgctgctcactctgcacagccagtcgtatgcaagccactggctgaattcatcgacagtatggtgtcgcactgtactctctgcaggctcggtcggactatcaagatgacagatatcagcagacgattccattcggtctcccataaaatcctggtgggccaggtctgctgcagcgaattccagcccataagcatatattcaacgcactgcagctcccagcgtcccccctataaccgcacaggttaccgaaaccgtggaataccgacaggacgctgcgttgggtatcgatagccagggaagtgcatatcagatcctttgtgacgtcctccgctcccaatagagaaagaaggaatgcaagcaggtaagctacggaattatataagcactgaatctcatgtacccctcttgagctcacagtctgctgtacatgcacaaccacagcattaagctggggcgatgtattcagaatacgacactgcgtgtcagctgaatctcacctgtaagggaaatacggaccatgctacaactttttctaggaggcgcttcgtattcgtttaaagtagatttggaacggacttgggaattagcgtccattcttttcaactccacttatgtccttccgctcctcaataagcgcaggaattagagaccttcgaacaattcagaattctagaattttccttaggacggtgactcgagaccagagtcgcgaaggcaacactagcagctgcacagttggccacattatgagcaggctgagcctgagacattcacaaaaacattatttcgcctcaaacaagcatttaggcgctatgacaggaatggctatttttctccgccggcgttttccttcgggggtcttgggacccaacttcggggccaccaggctccaaagtgcgaacgaactgtggccgcgtaaccaagatcgccaacgaggacgtcagttccacatcaaagtctgcttggaggaatgtcggggtacggacatttcaagggccgaaggtcaaggttccagccactgcgtcaatggacattatagaatagtaagcacatgcagcgtcacgggaatactgtccaaccaatgcatgcactgtactagcgtgcacaagaaaatttacaattatcacgctaggtctctattatctattctgttgatgacagttacagtcagtttcaggcagctagctcgacacggctagataaattaatgagtcacctccgtctccagctgaacccagcaatcatcatctgatttcccaaaaggggaccccggcgtcgttcacaggagtctatgcagtggttctgcaaggactgttattgtttgaattacattattacaagaaacaaaggctatcaaatcatgtccttttgtttataattcttttccctctttgaaatctccgatagagacaacgacagtcaacaatattaagatgctgtagcagctgaacgaagtattgttgctgctggcaaaagctggaccataaatgatgatacctgctcgggggttgtaatccccgactgacgggtccagcttgaaggatgcaggatgacacttcgcttgcacaaagatctcgggaagttggggctccgatgatccagactagctcgagtgggcatatgcatgtagtcaagcattgattattttaactagcgatggatgtctgcgctttgcgtctagcataggtagcctagatattgttgattatttctcctagcattgtgcccctatattaccatcaagtacgaacactgcgatctcaattatatcgaactccgactccgactccgactccgcgtacaactattttactattttactctagatcctctgcgaacatcctcgtattctgattttgttaaaagatttctgaccacccgaacgtctgtcgcgcagaagttgtcggcattctctcatggagtggtaatcctgatctaaaccgtcgacgtttcctaattcggcaggggcttagcctcccggcttcgaacgcaagatgtccccgctagagacaaatcccctttcgccagagactgctatgcgcgaacctgctgagacttcaacgacggaggagcaagcttctacaccacacgctgcggacgagaagaaaatcctcagcgacctctcggctccatctagtactacagcaacccccgcagacaaggagcaccgtcctaaatcgtcgtccagcaataatgcggtctcggtcaacgaagtcgatgcgcttattgcgcacctgccagaagacgagaggcaggtcttgaagacgcagctggaggagatcaaagtaaacatctccttcttcggtctctggcggtatgcaacaaagatggatatacttatcatggtaatcagtacaatctgtgccattgctgccggtgctgcattgcctctattcacggcacgtatttgttcctgcaggttttcagaagctcgcggctaacttgtccagatcctcttcggttcgctagcgtcgactttccagaggataatgttatatcaaatctcgtacgacgagttctatgatgaattgaccaagaacgtactgtacttcgtatacctcggtatcggcgagtttgtcactgtctatgttagtactgttggcttcatctataccggagaacacgccacgcagaagatccgcgagtattaccttgagtctatcctgcgccagaacattggctattttgataaactcggtgccggggaagtgaccacccgtataacagccgatacaaaccttatccaggatggcatttcggagaaggtcggtctcactttgactgccctggcgacattcgtgacagcattcattatcgcctacgtcaaatactggaagttggctctaatttgcagctcaacaattgtggccctcgttctcaccatgggcggtggttctcagtttatcatcaagtacagcaaaaagtcgcttgacagctacggtgcaggcggcactgttgcggaagaggtcatcagctccatcagaaatgccacagcgtttggcacccaagacaagcttgcgaagcagtatgaggtccacttagacgaagctgagaaatggggaacaaagaaccagattgtcatgggtttcatgattggcgccatgtttggccttatgtactcgaactacggtcttggcttctggatgggttctcgtttcctggtagatggtgcagtcgatgtgggtgataaactcacagttctcatggccatcttgatcggatcgttctccttgggaacgttagtccaaatactcaagcatggac

SEQ ID NO: 12101 - DNA, 109 bp, Emericella nidulans
actcctaactgaaatggtagagaatactgcatcgttcaaggcactggatctaatcgagagaatcttacgcaggcagctgtgttcgagggagagtagacttcacgtcggc

SEQ ID NO: 12102 - DNA, 940 bp, Emericella nidulans
gttggtttcatgctctttgttcctgtacgcatctctaattatgggtacgactcgaaggacttgagactttgtagggctaacctgcttctttgttgaatctgcttacttattgcatgtactaaactaggcaccaagagcgccaccttactgcctttcttcgcctatttctcttcgcccctttgcggtatattctatccttgttgttaacctaccatattcaacatactccagagctggagctagcccttataattctgttgctatgagctttctacagtcgttaataggaaatgattcttgtccaaaaatcaatatatgcgatgtcctcttcgctaaaacaaccagactctctcctcttcggctggtgagctttactaagattaagttatgcaatgaacatgcggagcgtagcacctacgtgcaatttatttggtatcccatgttgtcacaactaggttgagggtcaggcagaactgaaggcaagtgtatgtgcatccctttgagtgcatatctccagccctccctcttggatttatgaggaacggcattttaccaatctattttatggctcagttggtacatgctggcaccaacagacgctgtcatgttgtacgggtactttcctgtttcaatgttgatattcataacatatataggcctgaatgtatggacgttgcacatgagacttctctatcaaatagtttagtgatataaactacaactgcgcgtatagttcttggtacaggcaggggattctaaagctagagaagaaaagctagaagattcggttagcgccctgaaacaatatctagtttctatacagagcgcagtggaccaatctcttgaggtacaggatatcacagttcctctctgtctcgccttcaccgaaatttcgctcgtcgaacccaataagcttgttcgctactacttttcatagccc

SEQ ID NO: 12103 - DNA, 3939 bp, Emericella nidulans
agagcgagactccaacgttcaccaagttccagagccaagtaggcatgatggatgtcgacgcggggctaatgaccttgataaactcggactggaacagcttgttgccgtagaaaaagacatcgttggcaaaccaagcgccggttgttgcgaccagacggaatccaaagtgttggaaggtcagtttcagcgagtttacatcataaccagtaaccgacgccttcttctttgcggcctgcagctgtttgctggcggccttcatatggtacgtacgatagtagacgagccataaggtaccaacagcgggaatggcgaaagaaatgcggtaggtccactgagcagagacagtagaatagggcgggtttccgctcccgtggtggaagcaaagcagtaaaatgatgagcaggacctggttgaaaaattgaccccagccctgcatcaagaaagcactggtgactttgcggccacggtgcagacgatcttctttggtagagactttgccagagccgacagcattttccataccgctggtggcagtcatggggtattcacctcctgcagcgatattagcatgatccgtggcagatgaaaggacttatccataccaacaccgataccgtaaataaatagagaccatgcatagcaaataacccagccattttgggtgacaccccaggccgccgtaagcataacgagaccgagaagcataatcgcggcgtcctgaatcaaaccccatcgtcggccgagcctatcgaaagtcagaaaattgccctaaactccagtctactcctgacgcataccagtcacccacaataccgacgaggatctgaccaacaattataccgcaaatctcgagatattctatcgcattgagccattgtgcgttacaaatatgttctccttcatagtcgtggtcccagcacgaggcaaaggcagcttggaaaaggggtttcaggtttccgatcgaaaagaggacgtagctaataataaaaaccgggttagcaccatattcccgcccagaatcagaatcggcagactcacccttctagacccaaaccagctccggggaggaccatattttggaagtaataagacattggcgacaagggatcggccttgaacatcttccagatatcgctaagctcgcgcttggcttcccccgcatcgtatgagctcacaaacttgattttcctgaaaagcgacaagtccgcccagtaggtcccgtccgcagtatagctgtcatcggggcgaatgagagcgtcaaaagcgtccttctcgtgcgcatccatattttgaaggggatcttggcccggcccatggggcgcatgaagaaggccaatatcgttcatcttgtcttctcgtggtgtctctgaactttcgaggcaaatgaatgctcttggccgccgaagacaagacggaaaccaagcacgacaagacttttggcggtcttgggaagagtgatgagccttggaatgatccaatggctgtttggatgtgttacacctgggcaagatcgaaaggatgcagggaagataaaatataagtaccaagaaaacttcgctggaaagaaagcgggcagtccgagccaaactggtcccgcggaattggcacgagtcttaaagtggcaacctgataggaagctggccggtggacatccggaactcagcgttgcagccactggtccacactcagccaagaggaaggtgcgacggtgtctggcgaggtaagtggcactgccggggcgcaggatgggggagcttagaatcccggatctcaattcgctccattttgattttcctaggcatcttcatgttccgagttcgtgagttgatctagcactttgggacttggcggcggagagtcaaaaattattttacagtagctgaccgactcctccggccaatcatttgcgcacgtgttggtaggattggctgttagcgggcggtagaccaccctttccgcaatcagatcatcgctgacggcggggttgaatcatggaggccctcgaaccagaccagcaggcaccatcttgcactatgcatctccctgttattagtgcattggcatctcatggaagaggcagttggtcgcgtgttgagttaccacattgcgacccgagacgacgtgggggtgcccggtatagcatgcacaggtggacagctcagccaactgatgagtgggctccaggaattttttttgtcctgcttggacatcgaatgcactccaaagaccgtgttcttgtgtattcgtcgcgctcttggcagcccgcacattcgtggaacactagcaaatcgcgctcggctcatcgtgcacaactttgacaatgtccacgataatggccattagtgacgccgctggcgcctctcgcgctggcggcctatcaacgaccgacttacgtgaatcgtggaatcggctgtcagtcaaatcccgggctgcatcttggtttatggatgtcggggtccgcaggccgccatcaatcgcgtccgatatcgatccccctagcataggcacgtgcgtctgttccgcaaatccataggactcttctaatgatgttacgtgcccccaacaacccatcaacaaccacatcaaccgccatgcagtattgaaccttgcgttatggcactctgatagcggtacacgttccatcctatgcttctgcctggcagcaaacatcatctttcgagtcatttgtcgcagtcatcccacgatcgagggacacgagttttgggagggcaatcccagcgccggagaagtatacttgcttctgccgtagttccactttgtttgggctcgtcagatgagcacgtgctgctgtcccgtccacccatagggaattgcgtatttgctgagcggaagcactgtacccttaaatgacgatgtgctccgtctctaccaggatgatgataacctagtgtctagttagtgctgacctgcgcttgcgtgttgcatcactgaatctgatgagctaggtatatgggccgcccagccgtagccaagtttgtttaagcacctacaaggtgtcgaagcactctcggcgcatgacacgctgaggcttgttctgttggcgccttgtcacgttcgtgaatgctcgacattgactgggcgtgtaatataaacagggcgctcctggcggtcgcactggaagatccctcaaacctttatggaaaaagggggttttgatgaaggggaatggatagacagggtcgggggtatcggttatgagcgaagtgggaaggagtgggatgacctctgtgtttgtgtttgtaaccacgatgggaggagacagatgtatacccacgtgggtgcgattttggagtgcatgagagtggtggccgtcgtcagacggtcagcgctgccgaccggtagtttcatgctcatgctgttaactgctcatcctcatctcatttaccacttataatcaacgtagtttccaggagaacgccagcggataaatttgttctgattgacaaagagagcagttgattttacgttgggcctcctccgagggttaggattcaggacgaaaatagtctctgccattctggtcatttgcggtcgtcctcatactgggcacaatgtatcccggctggtccggccagtactcccaacgtgtccaactggttggacatcctcgcggttttgatcatgccccctttgtaataccttgccctgcacccgccatacctgagccgacattcagtcactgatcgtctgttatggccatcattctagacttcacataatgcctcccataggaacttaaatctgaagcaggaacggcaggtaagtctgagaaacgtttcgcgccgtgctacttgacggcgcgggattcttcttataagtcggcaggcacgaatcgacctattccgagatcatcaagaaccgatttttctctcgatgactagttctttccttccacgccgatgtagagcaataagccgt

SEQ ID NO: 12104 - DNA, 2650 bp, Emericella nidulans
agctacctcagactctcactctccttggtttgcgagagaatgggaggccatcaatccaattgattgtccagaactcctccgcgagaacgcctggcttcttcaaagggccgccggttattcggacttctgcgaatggaatcagatcgttgaagccaatattcaaggcccgtgcagggtctgtgtacctcccaaaccaggaatcctctggggtcgcgacgcaaagggtcgggtcaaggcatacgaggatccgtatggtgctgctcggtacgaacgtgagatcaagtcccggccgtccgctttcttgatatttcgcagagagtgttatcaggatatcaaggctatctctgcagagcttcgcgttacgattaatgtccagacccttctgcatcaggcttatggaagactgccgcacgttcagaccggctcacctgccgcgtccttttactggcgccttgtaccaaactcgtatgacgttcgagattgcctatatcccaagtttgagttgagaagtaataggaatgatccgcaagcttcgcagccgccgcagtttactctcgaggggcgacccaaactgcggcccgagcagttgcgttcgttgtcatggatgatagcgcaggaaaaagagaacgttgagccttttattgaggaggaaacggaagaggcgctgctgggatcgttgatgtggcgtgcagaggggagagtcacggtgccaaagactgtccggggaggtatcctggcagacgacgttggctacgggaaaacagccattattctaggcttgcttgatgcatcgtttgcaaatctcaacatcgacctgtccgtctctcttaacagcactggtttcgttcccagcagagcaacactcatcgtggtcccgcgaatcatggtgcagcaatggcgcgctgagattgccaaatttctaggcgacaagtacaatgttctagccttttcctcggcagcggcgttgagaaagaccagcatcggtgacattcgaaactccgatatcatcctggtatcccggtctgtctttgacaccgcggcttactatcagcatctacgaaggtacgccggcgcttctgaagcccccgacaagccaggacgtaaattcgatgactggttccatcttgcgcacgggtttatgaaacaacatgttcgtgtgcttgctgaatccggccctctcgctttcttgcagtctctgcgtaatagacgtgctccgacgaaatatccagaaacccaccaatacgcgccgtcgaagcggttacgggggaagcagtatgcgcttgcaaacaaagatcgggacttcgagatgaaagatgaccgaccgtacgctgagatatctagcaacgaggaatcttccgggacaagcgatggcgaatatgggaacccaatcatgcttaaagccaaaatcgaccatctcctccgactcatcccgccaaaacagtttaagaagaatgaagggctagccggggaacagtcttcctcgcatggagagatagaggacgactggaaaggattcggtatcgatggcgagacccagagttgggaagcggtcctaggccttcccttccacgccttccacttcaaccgccttgtgattgacgaattcacctacgccaaaatggaccggctcacgcagttgttgacgctccaggcccggtcaaaatggtttctctctggaacgccgcctttgaacgactttgaggacgtgaacaccatagcaccattcctaggcgtgcatcttggcatcgatgcagaagatgatatcaactcacaacacttccgattgaaagagctccgtaagcagcgctctgatgctgaaacttttcaagctttccgggctccgcggagcgaagcatggcatcggcgtcgacatgaactcgcgcagatttttctggatagatttgcacgcagaaacgttgcagagattgacgaaattccagctaccgagcatattgtcctcgttcgccagtcacccgctgagaaggtcatctacctcgaactgtataagcaacttatgacatataatcggcagctgcggagggtgaacggtcgaggaggagaccaggcagaacgcatagacgagatcattgcatatagctcaacacctgaagaggcattgctcaaacggtgtacatcgcttgcgctccagggccgttgggacgatgatggacagccggaagccgctacctgtgcctctcttatccggactcgcgaagagcagctggatcagacgaaaaacgcccttaataacaagctaaagctcgctgcgtggctctactgctcgtgcaagcatgagcacgataagttcagccaattcatgaatagcgtcattatgcataattttggtgataagtctgttacggaggaggtggacccattactcaccatggcagtcaaagagtccaaacgcagcgactggaggttcttctattccggctctgactctgatcagaaaaccggcgacgaaggccagcatggagacgtagatgaagacagtgaaactatcgaggaagaagacgaagacgaactagtgctcaaacaaaagggctctaggtggccagcgtaagactcaatccaaatttacggctgagtccaagctcaaacccagacacaagcagcagtggaaggctaagccatctctcacctgagt

SEQ ID NO: 12105 - DNA, 950 bp, Emericella nidulans
tgaggccggctgtcattgccgaccccggactcgaggtttggtaaagcgaatctagcgttgaactcaaccagaatagtcaaagattttgatccgcccgagatctatttctgaaataaatttgaaaaagcctctaagggttcagagtacttagtgcagtgcgtccgcgagcctcttgacggcagcgtttctgggtgtttggcaatcagtacgtatgcctctagtatttttcagttgctagaagcgacgagacaagggaccaggagatcattgagaaaggttcagcgtttgcagcatctatgaactaatatatccagatgaatgcacatgacggcagagatggacgctgagaatagaacataggggtaataggttgagtccacattagaccaacgaacagtcagcaacaaagaaacaaagcaaataaagagaacaagagcctatcgttaaaacaccgtgcaatgaaagcagcatactaaacggcaccgtctggcttcggagacggcgccctcggtcctcgagcatttgacgccgtacccgttgtgaaagcgtcctgacagaccggccatctctcaggctcctcccaatacttcgtatggtgtttgttctttttcatcaaacccgccagatcaaggggatcgataaacgtctcgaatctggatcgcgagtcgacccacccgggacccatgcgctcggtcgccccgtcgaaatcaagatacctcttcttgtcgcgggacaaataccgtccaggatgaagaaggttgatccaaaaagtgaagaggaccatgggcgctgcatcaagcgcgtagaggagccattctttccgttggaagtactcgcaggtatcgctgcatgcgacgcccggtgggtcgatggtgtagagagcttcgacggcgcggtagatacaccgactaggacgagcgtcgaggtacagtaaagagtgtagaagagga

SEQ ID NO: 12106 - DNA, 518 bp, Emericella nidulans
ctcatgtggccgtgtggcgcctgcgtggactgacgattggcgcagctctccaacacagggacacagcgagatcttaattgcctacagcacacgaaacgatgtgccctggcggatccacgagcggtatcgtggaactgatggttatgctgagttcaacacggagataccacaggctccagagcactcgcatgggcacggtgcactgtatcaatcgcaaacaacccatattactgtagccactgcagaatacatacgcccttgagctcgatggcaccacggccacagaaagccaccattgatagccgttgtgacagcgccacaagaaagctaccatgaacctgaccgtctacatcacgcagtatatccaccttgacctgtgataggaacggctggaggacatatgacacgaccggtggaccggtgcatgaatctggcctggtgagcataatgcgcacccactaggatgaggcaagatgcgcacctcgatagcaacctggttcacgggtctggccaccagt

SEQ ID NO: 12107 - DNA, 588 bp, Emericella nidulans
  unsure (1)..(588): unsure at all n locations
ctggactagcttgggctgaaacatactatggactggatctcgtgtgtcattctcacggatacagagagggctgacatagggtgcaacatgggtctgtgggtcaacacctgcttgtatatggtatgcgcccaaatatggtatttactgactattatagtccataggcatacgtggtagctgccaggtactacacactcattcgctgtcgatacggaatcctattaaagtgagagacagagcgcgctatcggagatcgacccccactgttaaggagactgtactcattcacctgacaaaggctatccgattgctgaacttaggtgctacacgaggcaacattgtggacgttcttacatctgccgagatcctcaccagcggttacgttcctttcagaccgcgatcggttggagtaggagtccacaccagcagacgagaacgaatggtgtgttacatctgtaancacggcgcccgtacagatgatgttctgcatgatgcgtcctgtttgggctagtgcgtatagtcacctcttcacgtagacagcgacgcataggttcgttcaatgaggatagcataactggctaatgagag

SEQ ID NO: 12108 - DNA, 509 bp, Emericella nidulans
ggagtgagttctcactcttagttcctgtcacaattggttgttgaaaagaggctggcaccttccccctctctcttgctttcactcttggcatgtgatctctgcacacaggctccccttcaccttccaccataagtggaagcagcttgaagccctcaccagcagcagatgctgacatcatgcttcatgtagaaccccgagccaagtaaacctcctttctttataaatcacccagcctcaggtattcctttataacaatgcacacagactaagacacaactatcgcttttctctgagaaataaaaaaaggccaggcacagtttctcatgcttataatcccagcactttgggagactgagggtgatggatcacttgagcctaggagtttgagaccagcctgagcaacatggcaaacccctcctctacaaaaacaaacaaacaaaacatacgaaaattagcaggggcatggtggctcgtgctgtagtccagatagctgggactacagcaagact

SEQ ID NO: 12109 - DNA, 205 bp, Emericella nidulans
tatatatgtgtatgtgtctcttgtatatgtcctctatatgtctatgtgtctcttcgttctatgtctgtgtgtgttctctgtgtctacttgtactctatgtgtatatgtgtgctgtgtgtgtgctgtgtctgctgtacttgtatattatctgtgtgtctgttacttcgttgtctactctatctgtttatgtgtctatgtatatatg

SEQ ID NO: 12110 - DNA, 193 bp, Emericella nidulans
cggacgcctgcccctgatagcagatcgcaataccagacacgtagcggaactgctgccagcacgtagcagaacgattcgtccgctactgctgggcagagcggcgatttgcccagcgtccccaagtagaatgccagcatcaactctgagactggcactcagaacgatccctgtctgttggctgaacagagattgc

SEQ ID NO: 12111 - DNA, 268 bp, Emericella nidulans
gtatgtactatgtatatgcctatatgttgtactgtcttgttctgtgtactattgtgctgtatgtgtgctgtatcgttgctatgtctgtcttatatgtcctgtgtgctatgttgtgctgtctgttctgtatgtgtgttgtcgtatacgcctgtatctgatattattctatctctgtttactatgtcctgttgtattgtatacttgtcttcgtgttatctttgttgttgttcatactgattgtcattgtgttttcctagttgtttaatat

SEQ ID NO: 12112 - DNA, 217 bp, Emericella nidulans
  unsure (1)..(217): unsure at all n locations
tatatatgtattatgtctatgctatatgtgtgttgtgtgtgtactgtattatgtatctgtgtgtgtatatatgtattctgtntcgtattctatatgtatatatctgcgtgtgtgtgtctatgtgtactatcgtgtctgtgtctctgtctgtatatgtgtgtgttgttctctatatgtctgtgtctatgtatatatatatacttgtctctgtgtgtat

SEQ ID NO: 12113 - DNA, 997 bp, Emericella nidulans
gctagccgttgcgaagtcgtcgcaaacgcttctatgctcccgtcctgaccaggagctctgcctctatttctttcaaagcggcaactagtgtggaacggcatgtgaaagttcagacataaatacccaccaggcaggcctaaccggcccccccccctgttccttttggataatgctcggagtctatttattcttttgttgagtactatttcggactttttagggcagtccgcttctttccgttttgtgtagttccattggcccaggtttttgtttatggcttggtttgtaatcatttctcatgtacgcctggagtgttgccttggctaaatctttgggacttttacttcatggtgctcttctgttgtgatcattggtctttgatgcttattcggtgttgcattttatttttgtttattcttacttggttctttcttctgctactgtcatttgttgtggtttttacttccgttgcttttgttttcctagattttttttcttgtcttcttcctatttatttttgttttcttacttttcagtcattctcttacgtttttggctcccttttttgcctttgttcttttgctctcttgttttctagtttatacttgatcggctttggtattattcttgttggattcatgctttttttgtcctctttccctatgtatcttgggttaggtttttttatctgcttctttttatttcctttgttgtcctctgatcatttcttctttttcatttttgtgtgccttctttgctttttgtttttatctactgtttctcccctgtttgttttcttttattttgttttctctcttctgaccttattttaatttcttcttttttttttctttctttcttcattgtgtttgtttcttttttctcttatgtatctttctctcattcatctttttcttattgttacttattttattctccttacttttttctttatctttactttcttttcttgatctctcttctctttcttactatt

SEQ ID NO: 12114 - DNA, 167 bp, Emericella nidulans
tgtgtgcctttgtgtgtgtatgtgctttcttcctgtacttgtccttttgctgtcctttctttgtgtgtcttctggtagttgtgtatattaattcctgtatgtatatctctttatgtcattgttagtctttctgttctatgttgttctctgtatgctgatacatgtgt

SEQ ID NO: 12115 - DNA, 2135 bp, Emericella nidulans
aggaggcttcgtcgccgacgaggtcgccagtcaagagcccaaataagaagggcggacttaatgatttgccgccgaagctggatttgaaaatcgatattccggtcggtggcggtggtgggggtaacaggaagggagaccctattggggattggttgtgaattgccttgtaggatttcctactttatagagaaggtccatactatgctatcattacagcttagactcgactcgactcacccgactcgcgtcctcttactcatcgaccttttccatcaaacactcatcttcatcttcgtgggcgttcagcatcatccttctgcgctccattgctcattatcttcatctccgagcccatgatggactctcaaagttatcttgggtacaccgcgcagcactactatttcatcttggagaacggcgttggcattttggcgtttttgttctgttctattttgggttgcatccatccatcatctttcccttctatgcttcgtctccgttgcgttgccacggcgaaacgacacgatttttatgacatgattaacgggcccttccctctcatctcacattccctcgtttgaaacttgagctttggatttgatgcactgcagctacgcagcaatacaagcatagcactgattgcccagcacagaacagcacagcacagcacagcacagtacagacccaggcaattcaatgcagatattatgatttcattatttgtatgacaaggctggatttcgggatcagtaaataatttgagaattgttcgtgtcaatacaatcgattgattgagtaatttggtctgcccccgcgactcttgttcgctgcgtatctacgtcttgcgtgaaagtcttcaagtgtaatcgactggatgcctgagaaaaagctcctgaactgtagtataatcgcggcatcttatatgcctcctacgcctagctggaacgatgctctttgctaaccggctactgtgccatcaggacacgttcccagtatgccggtgttcagtaacatttgcaaccctcaagtaccactcttatgcgtgatatatacagtagaaaaataccgctgcaatgccaaaaccgaaatactatcgtaccgggactcgttctgtagatactatactgatccaggagttataaacctactcccgctttggagtgaagtcttcagaccgccgcatggaagatgaaggcggtggagcagaaaatgcacccttgagtgctccaaagacgtatgtgcgtagctacagattcagtgttagccatacagccgagagaaaggcctgagggaagtggtgagcgacgtacatcctcaagcggtgtcccgcctctttcatcccactccataaacagcagtgcgtaaattataacgactgtttcaaagtggttagcatatcgaccacgcactctatcccagattctctccttgaacaacgtatacaaagggtatgaagagagtgcatacatccaatagttccccactgtacaatcttagttgccttcgtccatttgggcctcgcatacttcagcgccgcgcgccgacggtacttgcgctcgaggcggaactggtgttttggcgagagcttcgacatgtccggcggccattggcgctttggtgggtagcgggagtagtctttaacgggtaggcccgtgttggggtcgatgtagatatgcgtttcggtttcggcttcggggaagggtgtttcgggtgattgtgattgtgtggttgatgaggatgaggagaggcggaagggagagtttgaagtagtatgggaattggcaaagaggcaggattgtgagaacaatctgtagtgcggtagtgtttgacgtcggtagttctgaccggagtgttaattcagttgtcagtgggagacggagaggcttgagtgtactggacatacagtaggcgcacggagatgcggttgatcttgaagtttgctggcgaaggtgattggtgaacatgatgaaattgagcgcgctggcaaggcagcggcgaagatagtctgtggtaatctacgcatcgttgaggtgtaactgtaaagtagtggaagtggattggagtatgctcggagatcttgaagcttttcggaggccctctgatgaataaagatcggctaaacctaatacggttac

SEQ ID NO: 12116 - DNA, 1219 bp, Emericella nidulans
gcactcgggttggggtggtagcaactcctgtacatgtccttctcgcccacacgagggcccggttaagcaaagtgtccaggatgccgaagagatgccgatagcatgggccttccttggctttgacgggagtttgagcagtctacacgtcgagcctgagcatcgcgggagggggcttgcggttgctgtggggagggaagttatgaaacggggggttaacgtttttggaccctcatacacatttctagatttgcattcccgaccccatagcaatagcaacggcaattcgagcgcagacttggactctaagggggatagagctgccagtgaggttaggcttacgtcagcattggatggatctacaggggcagctccagagctaccagtaaggctcagccagaagatcgaggaggaatggttcttcgccgacgtggcagtggggaatacagctagtcggcgcgtgatggagaaaatggggggtaaggcgctgtgggacgttgcgtggatagtggtggaagtggaggtggataactgatttgatatattatatacctgtgtctgcgtattattctatctagcctcgaaatatgtataaacgccgatagaccgctaatgcaacctaacccaacccaaaaatgcaaagaatgtgcagatctaactctaatacaccgctacaggccagccatccacatactccaaccgattatacccaagtcgcgcgtcagcaaagtcataactgactgatgagttaagataatggtagtataggatatccccgaactcatcggtcaggattccctgccctccaggggcaaacacatcgccgtttgagccgtagacggtctcgccgccgccgtcaacaaggtcaatgccctgtttatcaacgaaggggccccgtgcgcttgtggaccggccaacgcgaatgcggtacctaatttatttgttagttttaccaatagagatactaggttgacttggtagaggatggacgtactctttcccattcgaccgcatagccgggtccttgaactcgcagcagcgcccccagctaaaccacatgtagtagtagggagcgtggtaagccataaatccgccttcaatgggatggccgcctgtcgggtcgccgcagatgggacttccggttttactcgtgctaacggtctttgccttcgagttggccaatttcgaccgccataccttcctcaggttcagcggcaagatg

SEQ ID NO: 12117 - DNA, 2560 bp, Emericella nidulans
ccatccacccaggtaaggacggacaagtactgagcgtttctaatctggacctcggccaatagcttaatggagttacaatactttcagcaagacacggagatactcgcatacgtagtatcatggcagccgttgttggacacaaccgtactcgaaccgctacaatcagtctcagaccaggcctggatgatgcatgtcctacatacagtagaccagataggccagtcgttattcttgatcttctctcgagacccgacagatggctgcttacccgcttagactttgggagacggcaacggactgcttgacggtggtggcgaagcagttgtgatagccgcttccagtaaggtgaatgtggtccacatcacctcctgtggtaccggcgcagctggaattgctgtataagccgagataaaccgtgtagactgcttgacggggctggattgccgagggtgcagccgtgatgaggacaccgagggcgcttacggtgagaacggtagcgaagtgcatcttttcggagtgggtatggagtgctttgaacggaggatgttattgctccaggacagcggactgcggtgcttgacctcagtctgagatctgggagtcttttatcccttctggcaaggtggacggcatggaaaacaaaccggcggtggcgaggcgattgtactacccaaggtacagtccctagttttaaatgccggtccttaatgaaataccgagagctaggtgattggtcaagtattccattgttctgtgaccggccgaggaaaggtacttaagcatggatgatgtcaaatcactagctggccagggctagtggaagtgcaagccctaaactgcaagacaagaacgaggccccgggtagttcccggtcattccattgaatccaagtcaatctatatagccggtcttctattcgtccgatgtgtatagcatgagctgtggactcttttgatctgcgggagaggatagttgtctggatatgtacagcaacaagccatggagggcaaagctgaattgaacatcatgactctgcagtatgttaataccacggtaacctgatagtgacttttagtagtttttctccaactctgcgcgggatctcacgttcttccgccaatgatctcttgtcaacgatttaggctgtatactgtagtctaaaccaagatcagcatttgatagacgtcagaaaccaaaagcttgaacccgttatatgcagtctaccccgcaaaaaaaggtgcatggccagatagagatataagcagtggcataataccctgaactaacagctaaagccacaaaatgttctccctccacctttttctgggacctctcctccttgccctaacgacgatcaatgcatcgacaacacagaaagaaccacgcatggttcgcaaggatgtcgtccgccagtacaaccccgtacgcacaagcctctcgaccacgacccctgtgcaggttggcaatggcgatttcgcattcggcgccgacatcaccgggctgcagacattgctcgcgttcaatatcctatcctcctggtgctggtgcaacgactctctcccaacagctcccaaccagacagaaccaagtgatttcaccggcatggactggtggacccatggccgcctcgtgaactataacatacataacccggctgaggcagagatcttgcagtggttagttgcgaacccacaccgggttaatcttggtcgtgttgggttcctgtataagggtcgtaatatatctgtcgaggaagtcaatgacgccgtgcagactttggatctgtatagcgggattttgacttcagagtttaccctgcagggagaaagggtctctgtcacaacggtcggagacccagaatctgacattgttgccgttgatgtacagtcatcgctattgcagtatggctccctggttgtcttctttgattatcccttaacaacggggactaacaagttcgaagccccctttgtcggcaactgggctgcggtatcagcgcatgatacctcgttgaatagcattacagagcaaaagtcggtaatcagacacttactgggggggactttctactttaacggcattagatgggagcaaaaaggcaatcttagcggcccctttgaagggacgccaccgtacctactccacccggttgcgaaatgagcagattcacttttagggctggttcttaccttctgaaaaggtcaaataagccattgctttcgtcaaaagggcaaagaatgtggctaatactgggaattgagcgctttggaatgcagaaatggtttttacccgggccctagaggtttttcttccaaccttgtaggggagagggaaagcccccggggcgggttaaaaaaggggggccaaatattgtaaaatttttttttgccaggggctgtaaatgagatttcggtattgctttaaggtcgtttttcataaggcgtacagttcttccctatggattgaatcaatcccctctatattctttttatttttaaatttttttattattattcataattttttttattattttatttattcttaattcttttttctt

SEQ ID NO: 12118 - DNA, 607 bp, Emericella nidulans
gattacggtctgcgcaggattcggtaggccactgagtccgtgtgctcttcggtgatgatcatgcaaaggcccaataaaaactgcactgacatagctaaagaaaagaaagccaagtagacagacagccatgtctgattccattgcagtccaattctattcatccagtagacgcaaataacatttgaaatattgagccgggatgttgatggtactaaatagcaaaccaccaactagtgatagagtagaatttttagagacaagcccgccgaaatatgagagataacaaaaagattgtacatcccgaatatatactcggttagattgctttttcctgcgcgaagaaggaaatctttttcctgcgcgaagaaggaaattctcatagaagataaagagaagaaaaagaaaaaaaatatgtatgagaaccgaaggggtattggacaagaggaaggaaaagatcaatagctttagaccagaaattgccgacatcatattcggcgaacagccagcaaaaatggatgcacagggataaaaatagatagatacctgtgcaaaaattttgcaaaagagccgtggaacgaagcaggccataatggaatcaggtagagaa

SEQ ID NO: 12119 - DNA, 2128 bp, Emericella nidulans
tatctatctactgaatctgctcctatgcgaagacccagttgatgataacttataacgtaggtacgcaacagtcgattacggtaagaaaaatcgaaaagcgatcagtattcaggtgggaaatgctctctactccatctggagccatgaaggcatatattcgcagtatcagcatagattgtagtacacaaccaccagaagccttcaaccctcgtctattctagacaagtatctccgccctccacccacatatcaaccttctcatcaaatgagatcactcaaattattcacatatcgttcgactttccatcattgatcccaagcattccctcctactccaaggccgctggaaacggatcctcaacggtaaagtccttttgcagtccaccgagcttactgatactgatgtacttcttcagcagctttttctccatactatcgacaaagagagctccttcccaatcatctccaactgttatccgaaagctcgaaagctcgaaaactccatgcaaaaagctcgccaaaggcacgcacatggtgacgaaggctaggcttaccctggtgcacggctaccagcccggagagaacgtcctgactgacgcagcgagattccggatcctcttggtcagtctagggaccttcggtgagcctctttcaaaggagagatatggtgccagggtaacacagctgccctcatcaccaccacgattaccacatcataccagagaccgttgagcattctgagaatcctgcgctcagcaatcccgcctttcacgccatacaaactgaagtcttgtaaaggagtgtaagagcgaactcttggcacttgacaaggttcttctcattatgaagtcttcaaggccctttgacaaacaaatgagcctgagttgactgcctggatcatgcgatatatggcccaaattgctaacttgatgattcaatccacaccgtgaaactaatcttacatctggcggatggattgccgaagctctcaggctcttagacaatcccggcaagccgcagctccgagactccaaagccggtaacatcctccccatccaacactccctcaaacgttgaaaaccccatatagatccccgcaccgtcattgcccttggcagcgagctcctgatccccaataacacttttgatatgcagttctccgcgtccttcaataccaagtctccattcctgcgggtacgtcttcccagtccggggcgatgtccagaccgcatccgtatccggctcaaagacatcaattgcatgtatatgatgccaactcttcccgcgcgcacaaatattaacgctccgcgatttgaaaggaggatcaaggctctcaacgacgttcatccaaaggatcaagtcgctgtcgtcaacatagaggacaaaaaaggtcgagttgcctttacgaagctcggcgcttccccagacgcggtcgtaccaggttagagaggcggcagggtcaagttcgatctgctcagcatcatcgccaaactgtcctggtacggtaatagaccctgatgttttggtggcagggaaaacccagttgtacatcgtgtcgttgacgtatcgatacgtccctgtaccgtaataataggccgcccgggatgtagcatggaggataaggtcaaatgacgcccctggcacatcgctagagagcttcattgctaggttatcagggggtatcccggagagttcatagtcttgagtggtgaaattgaagctttccagattcgcgttggtgaaagtagccggatcaaaaaatgcgtggcgttgaaacgtctgcagatcgagcagggaggctccgtatgctgagacacattcggaggcgagaaggcccgacgcaaggaaatactgcgaaccgtcggtagctgtgagaaaagaagttatccagaagccagagatgggggcttctgcataggacagcgtttgagaagtggcgacgtcaaaaaccacagggattcgatgctgcataggtcaaggtgagtatattgtgtctaggtaaatggtataaacgtacgtctatgagcgtttcggtattgtcgggcgtgaagaggtaggctaaagagagagagaagagcaagagcaagcacgggagatacatggccggatcggtcacgagcgagccgac

SEQ ID NO: 12120 - DNA, 896 bp, Emericella nidulans
caaaacagagagtattgttagaaggcatgctcgataccgccatgctgactgtataggatgccgcccagaactgatctagctgctagaacaggtagcgctgcaggcggcgacttatcccaaggagcaccttttaaggacgcagaacaagaggtatggttccttcattgcgcccctagaatcactgacatacccagtgttgagtgacagtcggcgggcaccaatccagcgaaggatgagaaacagtgcagaatatttttcaagcgattggggacttctctattgtctacggcaatactggagccaggccgttatgactcgagcttcaaccaagcaggatgtgtacacttagaagaactgggggctatcattcactcaaggcagggatttgcgccagcctatagatggaaagtaagtcttctaccagtcaacatccttgctgccgcgggagcatgtccctacggcttttagccacacaggccaattcctccgatctgctaaagtttcacggggtccgttaaattatcaatattatactctgtctatataagtgatatatccaaccattcatctatattacataaatcctacgttactccttatccccacttgtataccctcttcacatctaaactggctgacacacataaccttacccgtaatcctttcctcattaagttccacttatagctaataaatcttcattatacagttctatattatactcctattttatataatttctatcatacttccttaattgtcttctctaccaccccttattaatacaaacatcttatcctgtttgtatctttctctgctttctaaatacttctcagatctatctatttaaatcatctcttatgtcattgatttaccacacattctacttcaacacc

SEQ ID NO: 12121 - DNA, 603 bp, Emericella nidulans
acatactactggttgcaatctctgatggtagcttaccgagactgccaatgtatcattttcgttgacaattgttattatcgcccatgtcaaataattgggcgaaagtgttttgcgcgttaaggtattgagtgcgcttgccatcatcagaaaagtggcttttgttcaagtgagcaaaaacttacatcggcaatgtcattgcgagtcaaaagtatttgcgcaacaggaagacggagatgtgaaaatagaccgtcccagagactcatgagccggcactggccaacagctgctaacgcctagtcggaccatgttagccatacatacgccaaatatcgaggcagttcacacctgtatacgaggaagatattgcggtctctcatctacgtccattctccgcaaccccacgccaacagcgccagaagagacaagaacgacattgtggccatcgcgatggagtttggctgccgttttcacgatgagggtcagaatagataagataggctcatgaggattctcatcaactatagaacttgtgcctgtccgagaaggtagtacttcagaatagtcaaagaaaacttagatttaggaccccccgcacctaatttg

SEQ ID NO: 12122 - DNA, 252 bp, Emericella nidulans
aacgcagggggcgcggaagcctacgagctgcgcgacgcactgaacgagggtggacgcagacgatcaagatgggggacggcaaaatagtgttggtcaatcagaccgacgacgagtaaaaccagctagcagacgaggcgtccgcgaccaacgccggggtcgtgttccatatcagtctggcccgcgcaggcttgtcggcgacgcatcggggccactcaatggactcgggaaaggcccgccggccgcatgtgagcg

SEQ ID NO: 12123 - DNA, 914 bp, Emericella nidulans
cgtgctttactacaacagaacaaattaactactgtcggccaactttgagaaataagcatatacacactctatgttttatgtcaggatacatggaatttacgatctataatctataatatacgagcgaatatattatatggcctaaccacaaccaggagaaccaggagtgtaaacatccttcctatacgccagcttaaaccctaccctttccatattcctcgcactcacaccaccaggccacgttgtcacagcagcaatatcgtacccatctctcttcgcctcagcaagtctagctttcaataatgccacttgaacgcccctccccctgaactctggaagcgtgctgtcgatatacagctccgcaactttgccaagagatgtggtgatgagtgctagtcctgctgtcccggcgatttttccatcgatcttagcaacgtaaagacgcgtgtcagggcggagggtcgcaattgatgcgagtgcgcggaagaggtcagggctgggagacctgtggaggcgatcctgtggtggaagaccggatgaagagggcgtaatcttctttgagactgggtgatgtcgatatcgtgctttcgttggttgcactccccactttatgaggacccatctcaccttatatctgcaggacagacataacattattccgacagtaaatcccctttcttacgctcatggtgtatgcaaggacgaatgatttgtgacacaggctaaagcgtcattctaatcttttggagggtcctcaatcggacaggatttgcaagagttgtcgcgcccccatatatgaagattggaatcccaacatagcaatggttgtaaaaacattttgggccccccccccgggggctcgagtaataaaaaatatttatccccttagcttcattctttcttctgagtgtccc

SEQ ID NO: 12124 - DNA, 130 bp, Emericella nidulans
ttgcttcaccatgacacgagacatgccgtatagttatgtcacatttgtgtatattatagctatgcaattcttgttctgatgccttactatgtacgtgtttatcccaaaagtcttatcacctcctggatat

SEQ ID NO: 12125 - DNA, 438 bp, Emericella nidulans
ctgggtggcggcgtactgtggaagacggcttgtcatgaacgccgtttatgttgtagttgtttgtggatgccataaggcggggtgagcggagcggctatctgcacgcgatagatatggtaccgggagagccatgttcttcgaaagaaccgactgttagaccagcggacttataactctcaagagacagctccgcaggactggtgtctgtggctcgtgtgtcgctaatccagtctgtgcttggatagatgaccctcgagcaatacgtctggggtatgacaggccgatactgactgtacggaacagtgggacgtctggtgggtctgtggataaatggcgactccatcgcatacaacagcggcgcaggtcttatcctcatggctctagccatgaacggacttacgggagttcgagccctcgacgaacccgtaagatgcaagg

SEQ ID NO: 12126 - DNA, 441 bp, Emericella nidulans
ccccacagggcactggctggcatgactgccaccggagccgaagagatgagttatcggggccgctcgaactaacgtgctatacctgcggggaaaccttgatgcatgggggggaacctaacctgctggacgccgggatacacccacgtcacgttaactagaactgggggaacaatgcaactctcacagacctttgcttctgcacgatgggaggaggccctctacccagagcggatggcggcgtcgctgtcaacgctgggctgacagaagccacgtatgctggtggtatcatgaccggcaccgctagcctaaaaaagcgaggaactgaggggtcgatacggcacactgtgagcgatcgtattggctctgatgatcataatcatgggggagcataccgtcatgatacgatgcagacgcgcgaacccatgagcccgacttagacac

SEQ ID NO: 12127 - DNA, 803 bp, Emericella nidulans
attggaaaaaccaccggaacaggcacggagactggaagagggaacactagatcgtcgattgtgtgtaagaccagaacaggggcaagcaagggggccgcgcgctcagcaccaatagggacaacaaagttcccctagagagaaagacagcaagaggcgagacacgggacgggagggaagaacaggcgatggctggaaggctgagcaggggactgctgggggacagcgaagtcacgaaccgatgcggtttcaaagggcaaacgacgccaggtaacgccggaacaaggaaaggacccgggccgagacgggacagaggggaaaacaaccaggggaagaaacaagatgacaagcgcacaggggcgaacgacacaaggaaccggggcgaacagaagcccaggccacgaaccggaagggacccccaaaacgggaacccaaagagcgccgtgcggaatggacggccacaggggaaccccagacaagcctccccaaaaagccagaggaccacctctggaacaaaagagccgagccctcagaaaagacacccccaagcggggcccaccggaaggcacccgccaggccaaggaaccgcccaaccccccgggcccaaagcaaagcggaactaccccgagaaagagaagcttagcacccaaaaccctttctagaagccaaggccaacaaccaaaccccggggggggaactgccaacccccaaagggtcgaaaaaaaaaaagggggggcataacgttcggaaaacaaggccgggggaataacccggaaaggcaacaccacgaaaaaagcgccgggtcc

SEQ ID NO: 12128 - DNA, 2560 bp, Emericella nidulans
cgtccccttgaccggaataccaaaactggaatgtttagtgttatcatctggtagaaatctcttgctgagcaagcttgacttcggcagctactcgccgaatatgtagccaagaataaggcgtacttgcaacaagatctgataatcaagggagacccaatcttatctagccgatgtcggggcccaggctcccgctgtcgagtcttgattggcatgccctagccgtatgtgggtacgcaagatattacagaggacgggttcgtgaactcgtaaatgcattagacagcgctattatgcctgactcacaccgttatcccccatcagctcacatccatttcggatcactccaaccaggccgccggtctgaacggtctccgatccgcctgcggacagacgccattcaatctctgctaagccttccagccaagtgatccgcgtctgcgccggaacctcgagtcgatacagctgctccccaagtgcagaaaggatatctgctagggcaaggcctttattgattttcaatgtgttcaaagtgttgagacatgatgtcacgtcgctggtcgcgagcagtgtggtcacaatctgttggatatcggctggatgtggcgcggcaatacagtcgtatatcgtctcatttgtaatcgtttccggctcggggacggcttgatcttggggcgcgttcttgattggaagcggtttgcctagtatggtcagtacaagagctttatgagagtttcatgatggaatagagacgcgtactgcttgcatggcaggcttgaagcacattcaaagcacgacgcatgtcaccacgactcaaggtgaccaagctatcgacagcttcaggttgaatgcgcacgtcttccttctcgattacctgatcaatcaggacccggatatcctgttccttgagcggactgaagcggaagcgagtacatcgggaaaggagggcaggagaaagcttgtgggtatagttggcgataatgcagaaccgagtgttggcggtgtatttttccataatccggcgaagcgccatctgcgcggtggatgtcatggcatccgcctcatccaggataatcagcttgaacgacgcgagcgacgatttaccagtagcggacggtgccattgagaatatttgttttgtgcctgcgagacttgattagcctgcaatcccacttcctagagccgctagacctactcgcgaaagtcttaatctgctcccgaacaacatcaattcctctatcatcactagcgttgagttcgagcaccatctgtcgcatgttcttgctgccgtatatccgtcgggcaagggccaggattgtggacgttttgcccgtaccgggagggccgtagaggagaaggtgtggtaattgctgagataaagttagctattgggttggcaataccggattagacacgcacattcgcctcaacaaatcgattaatcgtagctaatatatctttgtggccggagacatcatcgagggtgttcgggcggtacttttccaccctgcacatggtcagccagctgagccaaaacgagtataccgattgcagccttaccaaggcagattatcttgagcttccactggtaaatctgccgcagctctcttatgttttgcgccagtgttatcggagctgaactggacggcgttcttggttgccgggccatccacgtccatattgtcctcgtagtcggacatggtgctataagtaatcaagaattgctctttgcaattcaaatctaagcccaaaatgcaaggtattgagctaaataatggtgcaagagcgtcctatggatttcgacgcgtcaggatgccgcagcgcgtaaagaggttcggcgtcggaaaatctgcggacgtgggtgccaagccctgaggcctctctgttgttgctgcggcggtgatgacatgcggcctcctgttaggtagattagaactgctccgccatcaacacccgccaactcagcttttcctctactctagtctggggattgcattgcttttaatcctcataatgcctgtatgtgattacctggacattccgcatcgaagtaatgcttcaagccgacctctaacccgcaattaggcctaccactccatcttcctcgaagatcgggatgtccccgtaataggtacgatcgcaggatctatcattgctgtccttgaaagccgaacgcacaatctctatcggctagggagaatgcacttgactaacctcgtcgcgccctatctgcaggcaactttccagttctacccctccgcacccgcactcgcggccccgcatacaccctccccatgctacccccgggcgtcgccgacatcgacgtacagccagataatgagtcctacgactgcgtagacgaaattctgtctctgttccgggcgaatgtcttgttccgaaacttcgagattaatggccccgccgaccgcatgctcatctacggcacactgttcatcactgaatgcctggggaaggttaagcctacgatgtagactcgtgaggcggagaaggtatagagctttactctacagcggcgaagctgcggatttgttgagtattgacc

SEQ ID NO: 12129 - DNA, 118 bp, Emericella nidulans
tatctatcccgctggtggaggagtcaggctccagtctatggcatctagggccgagtgactaggctgccaagctgtctgaggcggtatacacccgtgcgttagtccgccagtagctgac

SEQ ID NO: 12130 - DNA, 760 bp, Emericella nidulans
acttgttctggcttcaccagcgtaacatttgcgcattccgctctccccctatggcgtagacatacggtgtaggcatgggctggtatccttttgtcaactccaatccaccatgaagcattagcccgatatgtgaccaggtctcattgttttatttcctgagatcaaggcagtgtctcggttgtggggttgaaaagttccggacataccacaatatctatccactgtatatatatatctcctagcgatctcctggccaaattgaccaccagactgaccagaaaaaacccagctactagcgagcatacataaaaataatactcgaagttgaagttcaaattaccatggtgattttccctttgtgcatacatacagccatggaaggatggcaagtataacgtgacatacggcctagaatgaaagacggaagaccatctactcgacatatggacacctaacagtatcgcgtctcagaatgaccatgacaggagaacaactgaagtaaaggagatgtgaacacaaaatagaacaaacgaattataaaaaaaataaaatttcaaagaaaataaaaagagaaagaaagaaaacatacattaacttgaaggatctacagtatggaccgctagcctttctgttatgaagggagctccccctacaaagaagttgtaccgtaaagtagcagtaactcctagaaaatctatcgtaacccattccgtaggaggcgagcaacctcgacctcgggatccctttagtagggttattc

SEQ ID NO: 12131 - DNA, 1423 bp, Emericella nidulans
ctcattcgtggtgtcgttgagaatggcagagtttgacagcgtagtaagagtccagcgagggaacacggccccggtgagaggattactgggagcaccgtacaacttcagggggtgctctcctttatgcacgaagcgtgtggcggcaaaggcggtgccaactctcacaactgccttgtctacttccggcttaccctcgatgcttcggcatcaatggccttggtggttgacgacgtgctaactaacgactgcccacggccccaccattaatcgtagctctatagccagtcagtagtttggccggtgcttatgcatcagcataatcaagtcgtatttctgctggcctcattaaaaagaaagagaacgactccagattccagactccgagaccgaggctgtcgtcttacctatagacctatagacctggattatggagattgccattggggccgtttcatttatcctcatttattattattatgttacctagcacaatgcacgacgtgctcggtactcttggggctaactgctgttggacaggtcacggtggaagtaccacctggccctgagcgctgggcagcggcaactttggtactttgtctgattgtctgcgactgtgtcaggcgagataatccagccgagggtttctgtacgaagttctccgatatcaaccctgccagcagtctatggctctagcctgcgccatggctgcagtgttctgagaatccggatggtgttctgttctgcagtcttccccattgcgagtccgccagcacctcatcgcttaaccttatcaccgccattttacttcgtccaatatctgcattcataacatcggattcgtaacatgctgtcagcagtcagcatcttggcccatcgaacggttaaccgttagcctgattgcgtacgtacaaattgagtggagtacctaccggtggagtggacagtgagtttagacttggcgggctaatcacttttaccacctgcactgctcgaagacaaaccccgaacagaattggcaaaagaggaccaactagactacaccgacgtcatcaggattctcgccctccacatggacaagggaaacgaaatgaaaagcggtaaactagcatagtttgccgttcaggtcctacgactgtgcagtgtgctccgtaccacttgacgaaaacggactctaatccgacctattctgtcctgggcctcggttgattcttggtctgtagaggccagagtagactctactataccatattgccagctctggagcagactacaggctgctaaaaaaccaagacctgaaatctggaactctgaattttgaacaccgaagccgggctgggctggacttgattttggaaacttatcttggacctggaaactggaactctgacgcctggaaactgcactgcaggattctaggcaggat

SEQ ID NO: 12132 - DNA, 217 bp, Emericella nidulans
taaagaatgatccatctcgattcacagcgtgtatgcacataagttgtcagtgatcccgggttgcaagtgtgaggtgtcactcagtagatatgaagcctatgctgacacccgtatccatgcaagacatctgcacgagactattgactgggatcggatgtatcggctagcagctgctcctgggaacccgattctgtcatagttaccctaggtgttagga

SEQ ID NO: 12133 - DNA, 5020 bp, Emericella nidulans
gggccgaccagaggtgcggttgaagttgtcgtgcgagaaggacgaagttgatggccgtggaagacaatcaaatattctcatggactgccgcaatacttgctcatccagattttccggaagcacctactccccttcaacctttatttttggctctccggttaatgagaaggtttcaacaacgatctccttcttcggcaagcctcgaccgttgtttttcggagccatgcctttaatttcactcttgcagagctttgtccctgcaagaccgcaatcaccacatcttctgcccaccggtaagcacaccgtctgccccaagcctactaacaatttgttaatctcgtgccatttatcctttggcagccacgattccagcgacatgcgagtctcttccggcgttttggtcttgtgccatccccatagattagttatacgatggacgtgcacatcaactccaatgccctcatgctttccccaagccgcactcatacacaaatacgccatttttggaccgacgccaggcaacttcatgagttcagcgggggtggaaggaatgtcggaattatactggtcgcggatgatttcggcggctttcttgatatacttggttttgttgttatggaagccaacagtgccaatgagtgagttgagacgctctggagagacagccaggatgttttccaagttcagtgtgctatcgtgggagggattggctggtggtacaccatctttcgcctcctgtttgatagctggctcgccattctccgcttcctgcttgacaattgactccgcatgttctgtttccagcttgatagccggagcaccgccttcgcccagctcagtgtgcaaacgctgcatcgccacggcggtaactgtgtctttagtctgggaagataacatcaaagcaatcagcgtctgaaagcgtctatctcgcggagaagaagcccgccagtacagctctgcacagcccatcgtatctacgggcgcagtcgggttgtcttcgcgcatctttttgacgattgagtagatggcgtcccagtttgaaggagcttccacggtgaaggagccatcctcatttttgaccttccttgcaggcactcgacgggctttcggttgactgttttctttcttgacgagcttctcaactttcttttcaggcgttctccgtgtggaatttgaggtagtcttagcagcagagcttgctttcgtcttacgtcgttttgcagaaggttctaagatgtcttcaatgtcgacggtatcaacagaagtgagagaagaaccgtcgtcttccccgtcgtccgggtcggcttcagttttgcctgcattgtacgcaaaccccttgagcaaagctgaatgagaagtgctgcgcgtttggcgacgcgcagggggtgacaaggcctgcaggactttggccgtctctctggatgcgcgcgacgtacgcattgcttcaatacctgaatagtttaatacagaaagagcaaatttgtataattcgaagtagagggatatattaaagatcgacgaaaattcacaggggcgaatgaagaatcagccctgactgaccaggcttacacatggctcgggcccgaccgctggagcttctttggagagaatgacccactcaccttaagcctcggcctgcgtttagccatcgccgcaccgtatcgcccgtcacgcatcttcatctctccgcaactccagtaactcgaccccagtcactcaactcccgctcactacgttcttatcatatcttcgatgtacacctattcagtctagatcgcatttcacttctatccgcttcccactaccggcttcgaaccgatagtccacaataatgcccccctcacaaactaccacacgcctcctccgcgaattaaaagagtacaccgcgtcccccaatgaagctctccttcacctcggtccaacgaatgaagacgacctttttcactgggaagccgtgctcaaaggcgtaaaaggaacaccctacgaaggtactctctcctagatctccagtttcagattaagaccacccctgctaacctttatggctgcccacagatggcctctggtccctttccatccaaataccgtcgaactatcccctcgccccgcccaagatccacttcaccacgaaaatcagccatcccaacatctccttcacgacgggtgagatctgtctcactctgctgacgaccgaacactggagtcccgtgtacaccttatccagcacgctgacggcgattcaccagctgctgactgatccgcagccggactcgccgctgaatgtggatgttgcggcattgttgagggagggagatactccggcctgggagagtattgtgcggtactggacgagggaggagaggtggcaggggagggtttgagctcgttgaataggatgattacgaggcggcagacttgagatgcttatactggggttggatgacgaagacggaaagagcttctgctggagctctgaggtgagaggtgagagggagacatgggatgcacagtcgtttcctttcacttttgggaccccatgttttcggctgagtatatatgctgtaatgaccgatagttactagctctgcgagctctttgctgatatttgttgtacatatctttttttttttttgtttttgcgtactttcgcatacctggacgcaaagatcttacgttacacctgtaatagcttgttggcgaagtaagaaagaaatggtcgagtgataatcatagattaaccatttggtaaagtgacttttttttttttttacaaatctctaaaatgcacacgctagctgtaaatcaattaattacaagcatatgttcactgattcatgcaccagaaaaatattcgatgattgtagaaaggacgcggatcaaggcccggctgagggctatgtagttgaagataaaaggccaatggtggctgtctattatgcaaggatcgtatcgggtgagcgtaacggcgtgacataagataaatgcaaggacaaaacgccggcaatgcaaggcttggctgaagatgtaaaaggagcggtagtttggggtatagttgtaacgaacgtcgaagtaaccaggtgaccgagtgattaaagacatagtatataattctaaaagcttagacaacggcaactgcgagtgctgcaccgcccatcatggcaaacagctctttagcgaaagcggaggcagcgccgtttgtctgcagccccggctcgggacccgtcgtggtggcttcgtcggtggacgattgcgtcggatggacaatggctgtttcagtgactgtgacgagctcgccttcagcgttggtcgacgttctcgtgtaggtggacgtgacttcggaagcagaggtggtagagaaggtcgtagtgggctcgtctgaagaggttgaagagcttgtctctgtcgattcagaagacgttgaggtggaagtgcgctcgtcagtcgaagaggtgctcgtctcgccttcggttgtagaggtgggcgtgtcagatgtggtggtcgccgaggtctccgaggtagttgcggccgatgaagtatcacaagaagttgtagtatcagtatccgcacttgtgggttccgaactcgatgaggtgcttgtgacagtagtatctgtcaacgtcggctctgacgatgtaggctcagtatcggtggaagtttccgtatccgaggtagaagtaggatcagaggtctcggtggactcagttgaagttggtgagtcggtgactgtatcgctcgcgccaggcgaagcctcctgccgtttcacaaaactcaaaccattggcaatggcaaaatcccggtctttaaggtccggccgagcagttcgtaacttgtcagcaaggctctggatgagtttctcatcgacatgctcgacaatttcacggacttcgactcgagagatggtacctcgttcgaggctagctctttcgggagctggagctgcgaatgtcgaggttgcaagcagagaaacgcagagaatctgaacgattcggctcatgactgccatggtgcttgatacactggatggtctgcgagaacgaagctgcaagaacgaagatgggctgatggatgacgacggagggcgatggagtgaggactttgcagggtagtcggacagagcgggagtagaaaagcctgtccagaccaggaacgacaaggcttgcagctcaaaaatcagaaaagcaggttgagtttgcctgacgttggacttggacttcaacttccttgatcagctacactaacagctccactctggtgtcaataccggcagttgcgatagccaatggcagctcgtggcgtgagtaggagcaagtatctgatacgtgaagagaggacggatgctctcaaaactctgcattaagaacaatcaacaaacaaagaacagcgacgaacgagctatttaaagaatggctcgtccaacgcatcattctatggagtcggtaccatgtcagactcagactcaaacaagtcgaaaagccgaagcgaagacaaaacgagacggcgcgcgatggttggtgggccggccactaaggcgacccagcaggcgaacttgtgaaaacggtggagtgggcggtgctggatcatggtgaccaagcttcggcgagaaatcagcatttttgcaacagaccagcaaacagatgatctgatttgcagtcagaatggcaacttctcctccaatgtgcagacgcgaatcgctgatggaccagcggggtgattttgtttatctacgcttcaactgctcgctcgtatcccgaatccttctggaagcataccattcgacttccatgcctgtgccagtggcagtgttagtcccagctttgaggctcggtggcaaaggatcgatacgagccgacgtccctatttcctatcttagtcgacctccgtcgtcggtggccggcctggctacatgaaccccgctctgcaccatgtttacggtataaaaatggtcgaaaaatagtcgactttggtgttccacgggcatgacgcagcagcaactcggtctctcccatgggtagatcagaag

SEQ ID NO: 12134 - DNA, 822 bp, Emericella nidulans
  unsure (1)..(822): unsure at all n locations
gacacgtanacnngaaggggggggctgggcggaagaaatccgcacggaagccgccgccagaacacagagaaagcgcaacgccccgacagaacacgcaaagcacgcgaccggacccccggaagccgcacagcaccggagaggccgggcaccaacccgagcgagaagccgcggccacaggccgaaagccacagaaacagcgggaacgagcgcgcgaggaaggcgcgccccggccagccacccgggccagcgaaggccgccggagggccggcgggaagcggggaaaggacacccaacggagcaggcccacccaaagccgaccccgagccggacccaaggccggacagaccgcaaacgacgcngccagacggccaagggccccaagaccccancaagaaaaaaacggcaccgacgcggcaccgcggaaccgcgaaagcaaagccaagggccggcaagccgagcgaagagggcggcacaagcccgaaccaccccagaaacaacggcggccgaaggcacgggaagacaaagacacaaacgagcacggcaccccagggaagaaaaccccaagggcaaggcaccggcgagaccgagcacaagaccaaaaaagagcccagccaagagaacagcacagcggggccaacaaacgcgcacacaaggcagcagcgaaggcacgaaacgaaaaaggaagacaacaccacaacgcgaccacacaggcaaaaccgggaacacacccaaccccaaccaaagcacgaaagccacaacaccccaaaaaacaaccccagagaaacccaaccagaagacaccaaaagacaaaaacccccccca

SEQ ID NO: 12135 - DNA, 2949 bp, Emericella nidulans
tccatctcttgtcactccttccactacaagtatggctagtggtggtgtcatgctcggatattctgatccagagatctccatacagttttctcatgccggtgaagcgccatgagcatagggtgctatacctgccgtcgtcgccgcattatctgcgacaatggactcccctcgtgtcggaaatgtcgggatgcgggtaaagaatgtctgggttatcagaaaccactcgttgggtcaagggtggggtggctagtcggggcaagatgatgggccgcagttttggagataccaaaacagataagggcgatgctcgcaatcattctcgaaggattgattctcccgctgctgtcagtggcttgcctggcaagtcgaagctatcgctatcgacgtcgacagatgtccagcaacttcctgatgagacgactggttctgacgggttggcatggacgcaaactgcttcccaggaggccattatgcccgtcaacacggttcaagcgccttgggtgctcgttgatccattattccaggacagcagtcggctgacaaggttttatatcaaccactgtacgtcgtccactctttttaactcgtgaacacgtctaggctaactgatactctctgctctggtagtcaatcaaaaccttgcggaatatctgaccctatattccgacgtcaaaaacccctttcgggatctcatcccgttggtgggtgactcccctgtccttgctcactctctcgcggccatgggcgctttgcattatgttattttggcaaacggcgagttcgaccccatgccatggcccgtagggaattcgtcaagcagtgacatggtgactccacctaaagaaggcgggccggttgagcttagcactttgtctcggcgctcgtttaccaaagtgtacgagcagtttcttgggttcaagcaacgcgcactacaccagctatcacgagatatatccgaccctattctacgaaacgataacaagacgttggcagcgataatggttcttgctttgatggacgctgttgagtctggacgaggggcctggaaataccacctggagggtgcaaagaagctattgcagagccgcgaacatgataagccgggccaagctcaaacgatgatgaattggctcgatgatttcgctactgatgggtgcctagtgtgagtttctccaattcgtaagttttatgttttcggtctaatctgtaatagaatccagcttatgggtgctactttgacaaggcctggcaccctttcaaagccgttctacacatccgcgatgggagcttcggtcttgaagcgtctagaagaaacctcatgggtcggctgtcccgcctacctactagaggccatcttcttcgttcacgccttctttgacctcgacctaagtgacgaccccaattcacaaccaagcactgtctttccatctgtctacctccccaaaggttcaaacccgctccagtgtcccgaaaacctccccaggcacatccaagcgtttgaccctgtcgcctgggcagagtccctccaaagctacctcttcctcccagacctctccatgcgcattgcgctggctaccatatataaagccgccgtctacctttatgccacaagagttctttcccgtcctcgtcccggcgcaacaaccatttctgcaactatcggtctcccttcagaccacgccgaggtcgcaacctttcttatcaaccagttctctctcatcccgccctccgatccacatttcaaatgcctcatttggccctcgttcattgcaggcgccgaatgcagagatccagcgcagcgcccgtttatgctcgaaatccttcgtactttgtacttccacatcacaagcgtcaacgtgcgcaacgccgcgtgggttctaacgatgatgtggcgaaaacgcgattccagacgcgcggagctgtcgaggtttcgtgcgactaccgcagcaacggccgctgcggatttatattcagacagtgctgggtctgatttgagctttcctgctgcgtcaagctcgccttcggtcattacttctccggctactgcaaccgataccccgtcaaccaccacccctttaagccctattgaggacaatcattatgatgatgacgacttcgactggattcacgaattggatgattccaatattgattggctctttatataattggcgttcacttttgtatccgcagtttgttgaccataatacccttcatgtatacttgatccagtaaatccatttaattcataaaattattctcgttattctcgtatcgctggtagtgtttccctcaatctacgcagactattccttaggctacatacaatatagtacgcgacattgttagaaaccaagtgacttaaaagccgtcctgaaatgtttcacaagatgagaccctgacattatatagtatacttgtatatatatctttcgagataggaagagagaagaataaggtagataggtgcggcgatatgatgtataacacgaagacacatcggacgatgagggatataaatgtgcagatgggtaaatacataaatagatacgatactccgtccattctaaatgcagcaatatcaaccaaaccaaaatcagagccggggattggtagatagagaggaacagggatatagaggaagcgaagaaaagatataagacggaaccaaagatagagagagaagaagcagtggacaaagggaatttgaaagcaaaccgctcatgattgcaagatgcaagactagtagcgctgaaaactaagtgaaataaaccgcgtcactaaaggggttcttcgcagagatatggatggaggcatgcatcaagacaaaattgcagacacaaaggaaatgagtagtggcgcccggctcaagttcatagtatgtaagcccgctgatatcaaaatccggtggggaggttgacgatggccgaaatatgtaacgtgtatgga

SEQ ID NO: 12136 - DNA, 2808 bp, Emericella nidulans
tcgatcatacaatacgcagttgacatcattctatcagttcatggccagcgcctccataatgctcggtctatctcggctaggagaatgcctttaagagcatcaaaacagaaattcacgtttctcggcgcaaatttaatgacccatagcatcttgcctggtgtaattcgcgcccaaagcgtgatatactgttattttcagcaagaacacgcgaaaacgttccccatgacgtgcaataccgagagcatgatcgtataagtttagttcacgttggcagcatatttggtagcataccaatgcagagtgtacaggcaagtatcaagtagatattttgttttccacttgtgcttacagtagtgaccgaagccttgactatcgagaatgcatgtggttggagatatatgtttctaaatagcaaattcctctagtacaactgccatcaaatgctggtgttcacgaagcaggctgttgttcggtagaagattgcagggcatcgattggtggaggcagattatgtgaaggagttttgcccgccacactgtaaggctcgaaacccacaccgaatgtggaggagaacttgcaacctacaaccacctgtgccacccactatcatttcttccggcgaggcaccagcgtccatttgtgctactaacttacatcaattaggtatagtatcctatcgtccctattccctctaccgcggtttagattcttttttatcccgcttttcctctcacgccgccctccgcccctctacgacgctaaccgcgactcaactaggccaagttcagccaactgtctatcgaacattctctcattacacagcatttagaagggttagataaaagtcgccatcatgcctcctaagaagcctgatcaacctaagaagaagaaggccactgtcgatgacaaggtttgttaccgtccgagaagacttttcgtcgaagcaatgctaacagcgaactcgtaaacagacatttggcatgaaaaacgtacgtcatcgcgccctgcccttcccagtcgacactcgaaatccataactaacgggattacgctggacagaaaaaaggtggaagcgccaagaaacagatcgcccagttacaggcccaagccgctcacagcaaaaccgccgatgagaaacgaaaagcggccgagaaggaacggcgtgaagcagagaagagggctgctgagcaggcgaagaaggaggcgctggagctgttcaagcctgtccaggtgcaaaaagttccctttggtgttgacccgaagacagtgctttgccagttctacaagcagggccactgtgagaagggtcgcaagtgcaaattcagtcacgacctaaatgtcgatcgtaaggcggccaagaaggatctttacactgattcccgagaggcggaagacgagaagaagaaggccgacaccatggagcaatgggacgaagcgaagcttcgttcgtgttgttcttagcaagcacgggaacccgcggacgacgactgacaaggtctgcaagtacttcattgaggccgtcgagaaccagaaatacggttggttctgggtgtgtccgaatggaggtgataagtgcatgtacaagcatagtttgccgcctgggtatgtcttacattcatgcgtggctgggtcatgatgctaataactttatagattcgtcctcaagacaaaggagcagcgcgcagcagaaaaggctatgatggacaagtcgccgctcaacaccctgaccctggaagattggcttgaaagcgagcgacacaagctcaccggagaattgactcccgtcacacctgaaaccttcgccaaatggaagaaggagcgcatggacaaaaaggccgcggaggaacaagcccggaaggctaaggaagccactggacgaacattattcgagagcggcaactggcggacagaagagagcgaagaggagtcagacgaggatgacgacggagcgtggaacctcgctgctctacggaaggagactgagagaatacgtgagcagaaggaagaggagcgtctggcgaaactacacggtgagcaacagccaggtggtgaggactgagctgtccttgaggtatccacgtgacaagggcgcttggaaagttgggttgcggaacccgtccaatactggcatcagcctgtgctgttgtccagctcattatggtgtggtcgtgctggctgcaagcctgctttgacgaggtagccatcgcgatcaggtcgcgggctgtgtggtttgaggtgaacgctggtgtttgccgtctctatccatgccctgtacagccatagaatggttactgagacatggagaagactcagcgcagcagcgcacagggttggaataaatctgtgttggaggataagtctgcctgacatgatcttatgctagatgtacgtaatggttgctttgtatgcccagcgtgaagggagcatagattgccactccaattcaacttccttcgctttgctctctcggtgtaatgttaaccgaatgccatggtattgcttgtgacatccacaaacacatgggtcgatagtcagatcacctgattcccccgcactgagatcctgagaatctgaataagaaccttgaggacccttggctaggactcagacgcccggagctcggagactgcatctcattggggccaaagtcgctagtcaccgcccatcaaagactagctaggcctagccaatttctattgggagttcctgcttgcaaagaccagaaggatacctgacgtcttgtcatccacctctgtcacttgggaggataagctgcctagacgactccttagtacgactagacgacat

SEQ ID NO: 12137 - DNA, 892 bp, Emericella nidulans
aagaggcgaaacacgatatgaaccggaacaacgccctccgaccgcacggaggacgagaacgacagcgggggcgctaccgggaaggaatccccggacacccccccggacagaaaagagacgggataggacacacgaccagaccgacagaggccgcacgcgaccaacgcaaccataccccaccagcacaccgaccgaaaccccaagcgaatgcgcaagaaggcgacgagccccggcggaccccaaagggctgacaaaaacacaccacgcgcgcgacacaaaacggccggcgactaaaccacacaaacgctcgacaccaagaccagaggcaggaaaccggagaaggacgaccccaaagacgccgacaagcggagccccgaagcgggccaacacgcacaggcgcagactgcgaacgcaagaaaggcggacacaaccagcgctgactgccgcgaggacggaggacaacgagcgaaagacaagaagccaccgggggcaaaacaggcacgaccggaacggccacgaacaggaagcgagaggcgcggccagtacgaaaaccagaaccccagaggcacgccactggccacacacccccgagaccgaaaccaacgaacaacaacagaacactgggaccgaaccagcaaagccaaacccacccccccaaaaacaggcagcccagcaggccacccgagaagagggaccggacgggccctggccagccccaaagggaccaccaaacccccacccccggcggcaggcggaagcaaggcagcaacccaaaccacaagaaaacaccccaaatgagaagcaagccggaacccccccccaacaaaagccggaccaaagcccgcatacgaacccaaaaacgtggcacacaggaaaacgacacacaccacca

SEQ ID NO: 12138 - DNA, 206 bp, Emericella nidulans
tggcacggtgcacggacggcgtgtcatctccatcacctctacgcccatgtcctcaggtccagttcctcagcattgcttctttcatggcgtttggttctgtacgttcagtacatgatcatatgcatgacgacatgtgcctccgcagctggtcctcgacaggcctgccgcgcacaaacgtccgcgatgaacgctcggctccagcccga

SEQ ID NO: 12139 - DNA, 4515 bp, Emericella nidulans
ttaaaataatagtttaagatgaaatacaaaaagagtgaacgtaagtacaataattcagataagcatgtcagaaaatatatatatagtaacgaaaacgactaccacaatagtacaatacaataactagatagtaatatatacgagattaataaataaagtagatacataatcttctatataatagaataacttaagtatcaagtataaagttagatgtgatgaatataacaatatgagtaaaaccgatagagcattacaataagtagtataaatgaagtattgtaatagatctagaatatgaacaaactaacttgctgtagtaaagagatagatagaaatatatatgagatgatatctacatagtaccgtgaaaaatgagcagaaaatgcacatatgagaagtaaaaattaaatcttcaatatatatacaataacaatgaaaaataaaagatacaatgtagaagcaaattgaaatagacaactatataaaaaacgtccatgttatgcacaaatacataattatgtaatataaaataccaattcataaatacaattctttaataaggatcatcaatggatcgataaaagtaaagctatacagcttaaaacgtgcaatagatgtattctctgagagacacctagagaaaaactttatgacaacaatgtaaagaaaaaacataaaataatcgttataaaacaaatacttagatacagaaagctagaaatgtaaaacggcgagcatactcaccttccagagttcaggaatagagatatactgatgtcattgcctgtgttcaaatgtacattacagcctgaagcacagaaacggggtactgtaacaatctaataaacgatgggctatttcaaagattgcaagctgcaataatattgcggttctattccatgctctttctgaaataagtgtagatcctgctcgatcaaggctatattgcgacgaaaaggccgacggtccactaggaataagatggagagcagtcaaccagattgacgacattctgcaataaggttaaatggactttggccctttaccttgatatgctggacaatgcgtctttcagaagatgtctagctctggctggtcttgacaatagcacccttgcccataacgctggatacacaagtttcccccgcacccagcgcgtcttttttttgggctccaacatcgctaaaactaattttcctcggccctttttccccggagcttatcaggttaccattgcagtccagtcccagattaaagaacgtggcccaacctttgtaaaaagtatgccgtccgatagacgaatcaaaatgcatgaccgatgtgacagcttgttggctatagcctaaagggattggcagtttcaaaccgaatatcgaatgcatacggaagaacaaagagcgagctggattctagctggctcgaggacgggtatagccccgctaaaaagcaagctcggctgaatttcagccatacagccgaattgttggcttgccccctggcacgctgctgacatatttgatccctcgctagctcacttctcctgcatctcgcaaaaatctcggggtctcaacggtgggatcagcgtcttccttcctgtgactcgagacttgagaattgaccgacagcgagattagcaggatcttctattggacagcctggcccagcgcaatggttcagagtggcacggttcccgcatcgctgcgtacagtctacacctccttgaaagacggcgaggcattggatccccgtctaagcgacgactctcactgttctcttctgtgccttagcaggtctcggcaatttctgggtagtccaagtatctctgaccgaaccgaagattcaaaatgcgagatctttgcgagaactgtgtgcgaagatcccttgatatccggcgtgctatgagcctcgccagtttaacagtaatattactaaacggtttgcgccgccaacaggagaccattctggagcatcttgacttggttgctgatgcggttgccagttgcttagtctgctgcagcctgcataattgcttttaaacatcacgcttgctcatcgaccgcgtcctgccaccggccctagccagaaaaataggactaaccatctaggtcacatcaagctggatgtgacttgagtcacgctacgtagcaaatgttgcattccttgtccatgttcatataggttataccttgcagcctgcctgctctaacgcatccgcggactactcaaaggtctagactgcaacgggggcacgataggctacactttgttgctgattctatatactattgactcggggatcggtcacccaggtcccatggtcttccaatgacagtgttgggcaaaagccaggaatccttccagctttggcgaatggtctggaagtcttttttttgcttttgcatccacataaataaggcccttccgggcccacgggtctggtaaactagctgacgagtttatcactcgctcgtggatcatcatcgcagccaagaatgagacctgtcaaaccctagagctttctgttcctgtcatccgaaacctcaacagtatcactatctacaaacatttcctgaagttgacgaggcatctaccggtctctatcacttttttttttcttcttctttttcttcttttttttgtttgttgacttgtaagtattgtaccgccgtacctcccggtccagtccgtcggccttgccctaatctacctctcagtatataaagtcggcacccggaatcgagcaccttttcatatcgtttcacctatgatcatcctgttgcttacgaaactataacctatctgcgacctccaacggtttcgtacgacagctagaggcatctcttgtgcgacattactcaatctttacacggactcaaaagtccttgccctttgcttagggctcggccgctcggcgtacctggccgggaaatcactgccaatatcaattgcaactccgatagggacataaagctcggcaaaccgacgtcagagaatattcagtctgccttcgaatgccggcggtgcaagtcctcaatgacggactggattcgacttttaccccccgaagtagtcctacagatactatcaaatctttccttcaatgacctacttgcattcggtgctaccagtcgtatgaacaacgaatatcacatagctagtcttagacgcttaagactaggcgtatttgagaaacgagtgcattcgataatatctctgcttcaggcgggatgggctagccctgaacaactgggcagtgcctgggtggataacgagaccgagcacaactatacgatttccatcgtccagcaccaaaaaagggcgataaaacaatggccattgcgcagagaccttcgtcagattatcaacccggaccaacaaatcctgacgcagcatgacagacctcagacacaagaacgaatgatccgcctacaaaaccagatatttgccagagttctgcagcgatacggacgttcgctacgaaacctcgagttcatggcatatgatcttaacctagagggcgcaactgcgctggggtcgtattgccaacatactctccgctcactcgctctgagattcgagcacccgcatatccgagatggagtgatgcgtccaagtatatggctgcatcctgcccctgctaacgagggatggaactcgttgattggagttggtaggacaaagaatatcggactatgtaatctcgagtgcttgatcttggagcgagcagggataacaccgtggcaactgatgatgctcgtgaagaggaaccctagcttgacgaccctaaagctgaggacttgtcgaggcgcgacacctgaattcctctactggctcggcggtttaaacagcgacttggatgattccgaaactcggcttgatggtccagcgcctggagcagaccttgaagttcttgcattggagcattgccatcgactactggagcaccccattgacgaatgcaaccatcagtcgtacggagagctggactccggtttcgaatgggtgagaagtctgagtaatcttcgggtgagttcgcattcgatcattctctcctttcgtaggccggtcattgaagttggttattgacgtttgctgcagtcattatcatttagcgaaagcacacatatcccatcaaagctgatcgatcgagcaaacaagatcatctggaagattccagaagtcatcctgccctatgacccctatgatggaaacacacccattgcagtggatccgaggtggaagtgatctcatgttagcagtgatcctgctcagaggactgctgccacggatgggacgatattccacctagaacaagatcgatataataaaggtgcatagagaaataagtccatagcgctgttgttattggcccctgatgtcgctttttcctagctgtctcaagtgtattgtgtgcgtggtgaggagggttatgtgaaatgcgcagattattattcacaacaagcgaattacacaggaccaagaacttccttccatgaagcccgaaattgagag

SEQ ID NO: 12140 - DNA, 1588 bp, Emericella nidulans
agactcgatataacgctgccaatgcgtttcaattgctgcagccctgtcagtatatggtagaataattctattcatttccccgtgatttcgacaggaaccactcacttccgcaacgttgccaaagtccctcacgatctccgcattgcaatccaccacttccttctgcacatcaaggcgtaattgcctccgaacctctgcggtattgtggacacccctcaaactaagagtctcgagcgcatcgcgtatatcggaatccgcgtacgacacggagagtacacttgtcaatcggttcgacaaagcattggagcgctgttggagtggcggagaaagcggcgacaacgctggggtggaattccgaggcgatatactggagggagctccaggaggagggaaatagctaccagtagccatggggatcgacaatggatcagggacggatctcaagacggcggatcgtggtagtcagggcggaggcggagagagaaaggtggccgcggatcaatagcctggccgacctaaacaatcaagcaaccatttccgcccgacagacgggcagctcaattcgtatctaggttatcaaatcgctaaaaggaccaattatatacattcgaacgccaatacttccggtcaatctcatggatagtccgcttgcttccccagccaaggcacgacaggccgccatccaagccaaagactgggcatatgtgaactcctggttaaaccgccgttacgcgccaaatcccgttcccgaattcgagaaaaatgaagatacactacgtacattactagccctagcagcggcgaacgaggcagcagacgaagaggcagcgatgctccaccatgcgcgtgagcagacaatcgagggcttcaaggctcgagaggcgatggaggtcaagcaaaagatggaaatcttggatgtgatagagaactgtctcgatgaagctgggaatcgggacctcgacgatttggctgaaacagtcgctgttctgggcacgctgggcacgagcacagaggacgtcggtcagtcgatagttgagctcaccaaagaagaatttgaaatccaggagcagatacagagggtcgagaggttgcacaactatctcaagcgggaactagacactttacacgaacaactccaagaactcaagtcgaatcctgcgtacgagattggcaatcttcctgcgcttacggctgaatggacaagaggcaccaaggtacttagcgccaaagttaacgagtataaggacagatcagcagcattggagcgcaatagcaacaagggtgccactctcgaggaagtcatattggaagaggaagatgtcggcaggttagtggactcggtcaggtcattagaagctatgatcgagacatttcacaatcttcccaaagacataaccggtgctcgagccgagtatatgaagctggaggctgagttcaaccgcctcatccaaacgcgcaactcgatattcgagaacttgtcggacagacgttaaggatgatctactctttccctacgagaagtgggaaacaatccggacaacttaattggcagtctcattgtttcaaattaaagttaatttacaggtca

SEQ ID NO: 12141 - DNA, 2497 bp, Emericella nidulans
attgtttcaaattaaagttaatttacaggtcaggcagagaattatctcaggtatggatggtatcgtaattcatcataacatattcatgaagcgaaactgatcgtcctagcaatacctcaataggttttgacaggcaatcactatctagtgatcaccaaggccaacagcgttcttgaccttatcgccactgcacatactatcagcacagtgacgatcaaaaagtcgtcaaggttacttacatagactgaggggtactgccgtggccctccctgtcgctcacacgctggctcttgtcaaaggcctgctgggtggtgcttttctggtcatcgggctggacgccgcgggagatgcggtcggtggtatcggtgacggtctccttcaccctttcctgggtggacttgctggcgtcgggagtgatctcctccttagcctctgcatggctcatgagtatccaggtctctgtactatcataggagagtgaactcacttgtggagaaatccttgcgagcaaagtcagacatgttgataattgttgactggcttgttctgagtttcagaaattcgatgtgattttcagtggggggttcttgatgttcgcgaagtgaaagctgatgatgagaggtttgcaaatccagtcaaggaaggagtttatatagcttttctggtcctccataaacctcagaaatgacgtcgatgtcgatgcacgaatccagatactacttcgcgcaatccttcacaaccctaggcctctgatggcgtacactacccacggagttttgacccaagcttgtgaaagtacgtcatcaggtccagctgtgtattggtctgaccatgcccaatgtactcttagatacggtttgcgtaccggtacctgggtttacttgacatcgtagccccgtcgagctcaatgtgacggttcggggttgtttgcttatgacgacgtcatgataacggaaaagctcaactacccaaattcggcgtagcgctttcggcacgtgagtcctggaattcttctatgccgaaatccaaaaggttccaaccagggaaaggcggcttctcgaggcagaatcaccgccaccatcagtttgcacgccaagtgccacagcccagaactaagagtcattctcaacaatgccttataacggatctctcacgataacgttgtttcgtacgatcgttctagcttcacgttcttcatcatgttgattcgcttcgcttcatcaagcatcattttctggatctagctttcttgcttttcgactcgagccttgtttattatccgccacagccgccatcagagcgcctggcaccatttgacttacgcaaacacaaaaatctgaaattatcaatattgctacacatttgtgattcttgccaatgctacaatcttcatcaacatcaaattgggacttcgctccggtgtttaaccttctgcgtcacccacacgtcagaacaagggacaggcgacatgcgacacatcctcggatcatcccctgcctttacctgcatcacatgaaataacgaaagatgacgttgaaaggttggatactggagaaacatccctgtccggtgaaaaccttagcacgccgaagctaggggatttcggctctctgtgggagctactgcgtaacaccagcatttcttctgattcgcaaagcgagacccgatcacatttggaacagtctcagacaaagaacaccaaacctatcacaattctcaaacggcccatggtcgaaggatcgctagaaggatcgctatctacaacggaaagttccctacagcgagtcatcgactccacagcgcagagtaaccacgatgctcaacgtagtgtgcctgtccagcggcgccgacgccgacataagaccactccagaagctagttctccagaaagtaaccctgaaggagagtccgatagctgtcccagtgtttttgaccccccactctcaaagccacagagcatcccgtcaatgatcccgccgcaggtcggtatttcagagattagaacgggacttctcgagactccaccgtcttctttcgatgagttggatgattttttgacttccaaaaatgtcaaaatatctgccagcgccggagcacctcgattacaaccacttgtttatacctccgcaaccgaacagcgggttgggctttttaccaaacttctgaaggacttccctgattatgctgaacttatcgccgaatctgggcggtcgaaactatcaaagaaacatgatatattgggccggccaatacatgtgttcgtcgatatgtcgaatgtgagtcttgacacgtagtttattcccaatattgttattcactaacttatggcgaagattatggtgggatttcatgacacaatgaaactatcgcggaacatacctgttcaaaccaggatccgccgtctgccgctctcatttcaaaacttctcgttaatattagaacgtggccgatcagcagctaagagagttctcgttggctctgatcgcatcgcagctat

SEQ ID NO: 12142 - DNA, 874 bp, Emericella nidulans
accgagagaaaaagaacaccacaaagggaggtaaaaggaaaaaaccgggcaaaccccgcaaaaaagaaggaaaaacggagaaaagacaagaggaaacggggaaagggagacaaagaaccagagcggaagaagcaaggcagaacaaccgaaaacagaaagaggagcggacaggaaagcgaaacggcaggcgaaagagaaagcaaaacagcaacaaagaagaaaccacaccacagagaagaaccaaaaaaacaacgaaaagaaaaaaaccacaacacggatggggacagagaagcagggaaaaggacagagagagcaaacgacaacaaaaaaacgaagggaacaccaaccacaagaaagaaacaaaaaaccggaagaagtaagaacaaaaagacaaaaggaaaaaagaggaaaaacacggaaagaagagaacgaagaaacagcaaaagaacaccagaaaaatagagaaaaaagaaccaaaaaaaaagaaaggaaagaacgaaaggaaaaaaaagaccacgcaaaaagaaagacaggaaggaaaacaaaggaaaacaacaacaacagaaatgaaaaaaaaaagaccgaaaagaacaaaaaggaagaaacggacaaaaaaaaaagaaagaaacaaaaaacacaaaagggacaaggaaaagtagaaaaaacagaaagaaaaaaaaaagagaagaaaaccaccaaaacacaaaaaaacggagggcacgcagaagaaaaaacaagaacaggaaagaggagaaaaaaaaaagaaacaagaacaaaaagggagcaacaggaaaagaaaaaaaaaaccggacaccaacaaaaacaggaagagaaaaaaaaaaacaaaagaaaggaaaggcaaaaaaaaaaaaag

SEQ ID NO: 12143 - DNA, 3282 bp, Emericella nidulans
gaaaaaagggctttagacccctctaagtacatcgtatgggttttgttggccatcatgcttgcagactcaatcgtcagcttaggctggctggtactgaagccggctctggtaattgcgccgaaggtcctaaagaggatttcaaatacccgagctggaagttggattgcttcaaaaagccctaaaattgtgccccgctcttacaactactccgcgttgagtcctataacagaagagtcatcaggcccgagcagtctcgcgcacgctgaaacgcgctggagagccgatgaggatgaagatgcgccgccatctcaactcatttccatgcgtacggtactctttctacttcccctaactctgctcctgaacgttatttgtatgcacattgtctttggcgatgtcatatctcccctcctttcaagccttgccacattgctcgctgtccttctatcaataatgggcgtccgtgcgctaggagagacagatctcaacccggtatctggcatcagcaaattaacgcagttgcttttctcgcttgcaaccccatcgtcgcatttttcgcgacgcaccgccctcataactaacctccttgcgggtgccgtatccgaatctggcgcccttcaagccggtgatatgatgcaagacctgaaaacaggccaccttctcggcgcgagccccaaagctcaattttatggccagataattggcagccttatcggtgctgttctttctacggccgtctacaagatgtatgtcaacgtctacccggtacctggccctatgtttcaaacgcccacggcatacgtctggatattcaccgcccgtctcgtcactggccaaggcctgcctccgatggcgtgggaagcctcctcggttgccggtattatttttgtagccatcaccatcctccgaattgtcgctgcttcaccgattgccaacggcggccgaccagttggcacccccgcgccttggcgatcctggatccctggtggtatcgccgtcgccgtaggcatattcaatgtaccgtctttcacccttgctcgagccatcggcggtcttatcgcgtggtggtggtctcgtgcccacacaaaccacacaaagaaggatgatggattcaaaccagcaactgaacccgctcagtcggtcctatcacgtcgaccagtcgaaagcgagaatcgtaaacctacgtctccagttgctggcaacgctgatgatgacgccgatgccgcttcatctagcgttgtcgttttggcttccgggctgattcttggcgagggaatcgtgagcatcgtgaatctccttttggccagtggacgtgttccccatctttgagtggatatcgctgaatggcttcctcagggcatatacctgtctgggtataatgtatagacattggtattatcctagatacgcaatcgatagcaaacacaatagactgtcctattcgtatatgcatgaacaggagcagctacatacagcgctggcacactagtcgggctgcttttgattgtttgggtatatcattgacacatatcatatatgccgccagtgcaatggctgtcaacatttctgctgctgagcatttgaactgttgttctaccactgacggccccaaccttgtaaggcgttacggcgcatactttgccgctattattgaagctgaatcctgcagatacgatggcttagggtttggcttgaaaaagacctgcgtgcattgatcacaatccctactggcactccagccccattcacctgtgatactattggctggctctaagacattgaagcaaaatgtcggaggtgattgaaactacctttctagttatatggtcagctcgcgttttgttgggtgacgagacagacatcacgtttgcgggttatcgcccgataatttcctaaatcgcgcattttcccttaacattatgcattatccttggccacaaggtagcatatatatatcgtatataggacgcaccagagtataattaatttggggtactgaacaatgattgtgtacatctatatcgtagcagtggaggtggaccggcgtcaggtgatttacaagcctggatcttctgccagcattgtccccaccatgattgtcaacattgtttcgccttaacaatggagtggaaaaagacccttagcttcacagaccgtttgaggaccatccagtctctgtaagtgtccttcagaaacgaccacggcacatgcttacgctcagtaccaggactactgcttaccagcaagcgtcttgttctgcggcatttgccgaagcacagtcccaagctcgaaagattgagagcgaggcatacgaacaagctgggtccaaggtttgtcagatgtcgtgttcaccatgatgaacgaactctaatttgcacaggaagagtatgatcaagtctgccagcaagcacttgatgcagcagaggtcaccgtgtcaaagacattcaagagtgatctagacgatgacacaaacgtcgcaaatcaagggaatggcgagcagattgggccgtaccaaaactgtatccatgtctttgacggccttcattccacgatctataaatcctcgtcggagagcggcgctctcgttgcgctgaagatcacgacccctcatctactagagccgccacacgacgcccaccgcgaggctcaactcttgcgtgaggcagctaacgagcacataattcccttattagatacattgaaactcgatgggggccggttcggcctcgtgttcccatacaagaagcatgatcttgaaactctcttccggcgggacgtgttgaccgccgcgcagacaaaatctgtcctacgcgacatgttcagcgcaatagcgtctatccacagtctaggaatcatacatcgtgatatcaagccgtcaaatattttactcgactctccaatcggccagcgtatctcgcggatttcggaatagcctggagagaagggagtattgaagctgaaccggccgataagaagatcactgacgtcgggaccacatgctatcggccaccggaagtcttatttggccataagggttacaacacggctctcgatctttgggcggcagggtgtgtcgacgcagaggctattactgttggacacaaacagcttttcgatgccgggcctgtcggaagtgacctctcacttatccagtctattttcactactctgggcactgcagatgagcaaacctggccggtaagtcagtttcaataatagcaggagcgtgctaacgggttctaggagtctaagaagctttcggactggggtaaaatcgaattc

SEQ ID NO: 12144 - DNA, 892 bp, Emericella nidulans
  unsure (1)..(892): unsure at all n locations
aaaaagggaagggggggaatccggggtaaaaaaaaaggcgtccaaaaagcaaagcaagagngcacaaaagggtggccgagagagagagaaacccacgcagcccacaccacccggacataaaagccaatacataaagaaccagatgcgagaagaacggggcgaacaatgagcacagcaaagaaacccggcctcgagggcccaggagacgcaccggaaccaccacagagcccaggggagccgagaaaaaagaaaaactaccgaagcatgcaacacggcgccgacacactgcggggccacagacaagccaccaagaaagaacacgccaagcaggggaaacgacaggaaaacaacgacagcgtggcagaagaaccagagcgggggggggacaaacggaaacacaggaaccgggggatgaacgagacagacaggagcgaagagaccgagaagcacacggcaaaggggacaaaagagaccaacgagagagccaaggccagcggcaaggaggaaggccaagcgaggagacccggggcgaagcagacagggaatggacggaaaaggcaggacggcggacagaaagaccaagggaaaagacgggaggaaccccaagggaaaggcaaacgcccaaagaaggttggagaacgccgcccgcaaaggaaggaaaaagccaccggcgcgggaaaaaagggcaaacaacacggcaacaagcgccggacaaaaaggagcccgccgaaagccagaagggaagccagagaacaaccaggcaggagaaaagcaggcgggaaggggggacccacccaaaagaacggagcacaggccgggcaaacaagggaaacccccaaacaacaacgcaaaacggggagaaacaaccagggaggaaaaaaaccaaaagaag

SEQ ID NO: 12145 - DNA, 1022 bp, Emericella nidulans
cgaggacgttttacaggccgatgctcgggcatcgcgggaataggaagactattctgtatccacagtcccatattttggctctcgtccgttgtcgttcaacacgaaagatgcacgccctgagaagcaagggtgggttaatttacgcacggtgtcaagcagaccaactcgcactacttgggttaggcgttgggattttttgaagaacggaatatttggttgcctagtgcagggcatgcggacgggcgctgttgaagaaaccgagaggatcggagtgctgctttgcagtattcggccggcattccaggaagagaggaggctctgttatgaggttaagactatgtgtaacaacatattagctttatgcagaaacttagaaggagcttatggacttgatttcctgcgtttgaggtcgtgaaatcgcaagcttttttcaaatctcccgagctattgttgtttagattccgtttaatcttatgattagtattccccatttactattttataacttcccgttccttgtgttggcctacttttctccagacaatttttctgtctattttatttatctagctaatttttatctgtatcctattgctatgctttttctttctagtattgtatcctttcaatctttacgacataatggactttttgttgttacatgtcattgtctcatgttccataatcctcttttagcttttactttatctctctcttatatctcgttttatatgatctgtttatatggtgctatattcttctgaatatctttgttcgcagttttcagctcttatttatctctttttctcttactattctctatactttccttatctaactctcttttttcttttcctcttctatattactctcattctcttttattattcctactgtatactctattcttattcctctcttcaattctttactttatttatctgctaccttactaatctactttttccttctattttattatatatattcatatatttatttactttcaatctttctcacct

SEQ ID NO: 12146 - DNA, 1021 bp, Emericella nidulans
tgacgcggcttgaaccgtgggttggtaggatcgattgcaaattcgtggttttggaaaagacgcgagaatcgtggatcaccgacgtccatttcgaagttgtcgggaactggagctgcctctcccttttgcttgcccttgcccttcttcttgcgagcctgcttctcagccttgacaatctcgttcatatcaaagtgccgcattccagacttggcatcgacgtcatccatcatcaacaattctagttcgggccgtttggctgcggcggcagtctcctctgcagcgcgcttcgaccgcttcctgcgtttttcttccttccgacgagcagcaagaagtcgccttatcagaagtgatcaaggaaaaatggatccgtgaaagcccaggtcctcgttttcttgctgtttctctttaccagcagcgccctttgttgtcatcatcagcgggaacatcgcctttgtacccttgatcttttcctttcggcgcttctttctttcgcgctcttaacgcaaattttctcgatggtagtcttttcccgctcgttctcgaaacctgtgctgcgatcagggtcaccctgccaatccagacgtaaaatgtaactttatttcaccaacaggtcatttggacttaaggttgaagcccgttctaactaaaaccggtatctcttcgatgcggatatctatttatctatcgggcacttcgatattataccttatgcctccattatctcctctcctctacctatttaatcacttttacgtcaaaaaccctattaacacttttaaatatcttatctctcatattcactatattctctttacctatcttctcatccacactacttctccttcacctcttttaatctttccttattctttactctatccctatccttgtctttatccttactcactcaacttcctcttatactttatctgctctaaatcaatactttacatattcctttctatatcatctcctcatatccattatcttcattatccctacatccctcatctctctttca

SEQ ID NO: 12147 - DNA, 2204 bp, Emericella nidulans
ggatagccctggtgtcgcaatgtactgcgcatcgctgtcatatcctctctcactcatcaaactacccccaaactcaggtgttttgatcggtgctgcacgaacggcagggcgatgggatggatgcaggaatggaagcaatggccctcgatccgactttttgggccgtctatacaagttcctagcgtcacgagagaatcttctgcgaagcctaccagagaagccggacgatgtgctcagacggcgctcacttcgatcagttgaatatgatatggctggctcaagttagagggtggactctagacggaagtgcatctatcatcaccttcgcgggattcatgattaggagagaacgaccctgtctgctccaactgatattgctcggcgtccgacaagtctgaggtcctgcggtaatttcgaagccgggggcagaagaaaaaacccattgagccgccgttgctctgctaggagcgtccataccatcgacaaggtctagatggtcaagcattagaagtagcggacgcggcacaagatcgttgaccatccctctggacgccaggcgggggagcatggccatagctgtcctgtttaggtaggagcgagggttcctgttcaaggtacgaaaaaggaaggcagagccatcgtctatctggtctacggtccggcttaagctagcaggctcaagtcaaagctgtcagaacatcggcggtcaaagtggtttgtactctacggattattacgggcagttgtcccaagtgtcgggctacgattcccttacaaacctgtaagcattcctactccgtagagtccgtactccgggtcagcttactccgtagagtatcagacagtccgttcggtctcacgctggaatactagggttacttgacataaatctcacctcagatcttagtacagaaagacagagattagctttctatcagactacctagaagtgattttcttgcccaggcgtctgccagatagcaggccgatcccggagcacattcggaggcgatctagattcggagtgtttttttctctgacacatggagttgacccatggatgggaaaaatacgcaaactcagtgctcccatcacgccattcctaccaacagtactgaaaacagtcgcaatcatacatataagtccaatgcaaacattatccatcaagacccgttttatcaacagcagtaagcataggcttatgcaccaatagccggctgactagcaggatgatgcctttctagttgaaacggaggttgtaattgtgaatgtaaattgcgatagtgtacggtacgacctcgtacagaacgaggtagcgtaccccgcttccggtttttctgattcgccgaagtccacaccgaagggactcaactttttcccctccatgattagtatttagctgtccttcccctccctcctgtttcttttctctcacaaccccctttgtcttcttcatcctcccttctgcaagagacttgtgaattgtctcttgttcttatattgattttctgtgcttgcattgtttatcttctacaatattctctcattcttctcacgaccccgcccccaccgtcttttctcgattttccgtacgcacacacctgtcagaatggtccaatcgtatgctctcactctgcttgcatctattaatggttaaaatatactgatctttcttccttttgcagcgctgttctcggtttcccgcgtatgggaaagctccgtgacctcaagaaggccacggaagcttactggggtgagaagatctctcgtgatgaactcctgagcgagggaaagagacttcgtgcggagcactggaagatccagaaggatgctggtgtcgacatcatccccagcaatgactttgctttctacgaccaggtccttgaccacatccaactctttggtgttgtccctgagcgttattccaagtacaacctccacccccttgacgagtactttgctatgggccgtggtctccagaagcctgccaaggatggccagcccgccatcgatgtcccctctttggagatggtcaagtggtttgactccaactaccactacgtcaagcctactctccaggataaccagaccttctagcttgctgccaaccccaagccggtcgttgagttcctaagagccaaggaggctggtatcgtcacccgccccgtcatcctgggccctgtctccttcctgaacctcgccaa

SEQ ID NO: 12148 - DNA, 126 bp, Emericella nidulans
gacgaatggattcagggcgaaagaaaattcgcagcaggacggtactggaaacgcattcgcgtcaggcaagcaaaccgcacgtgctaaaggagctccagcactggtggctcaagaggaccaattgat

SEQ ID NO: 12149 - DNA, 457 bp, Emericella nidulans
cacgctctctgtggatgtcccatccggcctatccgcaactactggtgtgcatacatacattgctatccagccacaaacgcattgctaatttgcaatttataggagaagtaacggttgttgaaagcgggcagttgcgtgtcaactcaaagtcgatagtcagcctcggagcgcccaagactgggcttgttaacgcccttctcgctggagagggagcctcctggaacctcaccgtcgcggatattggaattccccaaatagcctggcgcaaattcggcacgcgccgacggcacggaatcgactttggtaaccgatgggttgtgtcgctgcgctaccagccctctgtcgtctagtagctgtttccctggacgactatctaacgattattggatgaaaagacattgaggcgttgtggtagagaaaacactctgactttatctttagcgcggtatatggtttg

SEQ ID NO: 12150 - DNA, 1946 bp, Emericella nidulans
ctctcctccttgctcgcaccaggacctcgaactcgctttccagtccaagtaatctggtcatcttcagcgcggcgagaaccttcctcgtcattttcagctgttctatttgcctcattctcggctgactgttcggattgtttcttctgtttgaggaattcttcaaatgggtcgacgaatattgtgacgtcgacgatgcggatgtctggagttggtctgttggttgttgggttgacggggtgagtttcgagcttgttgagggttggcgaggagggggttggatcgtcgattacgtggccgaatattgtgtgtttgaggttgaggtgagggagggcgcggtaggcgatgaagctgattcagtcagtatgagagtaacttctcaatggaaaggacgtagcgtcagaacttacaactggctgctgttcgtattcttgcctttattcgccatgcttagtgtcccccgtgaatcatgctttagagggccctcgaactcgtcgttgaagtacttgccccagatgctctcaccgccgcggccagtgcccgtagggtcccctccttgaatcataaaacctttgatattgcggtgaaatgtcacgtccttgtagtatcccttctttgcgagcttgataaagttccagacggccttgggcgcatactccgtgtgtaattccaggttgatgtcgccggatgtggtcgatatccgagcgtagcccttttgctttacccgacctctcttcaacatgtagtcctcatccgaaagtaaggcaagttcagccgaggtgtgtggcgtcattcctgtgcttgtaaatgatgcagccgccaagccagtcgtgtatctcgcggcattataaggcacaggtttaccagattgatacgaagcggtcttctgtgctgacttcaccggcgcatcggtcttagccactggagtagaagctgcattcccagccttctgagccctttcttgccgcgctttagcaaccgcctccctcgctttgaggatcttcgccgagctccccagagcattgacatttacattcctcgacggatcctctctctctctcagctgctcatccgataatccactctctccctccttgatatgattaaaccgactcaaatccctcgactcgatattctgcggatcctgcagcgtaataatatccttgcgcgtgaattcctcgtccgagacaagatctcgccacatctttcctttaatattcagccgttcaattgtatcccacgcaaagacattccccgtatttcgcagcgcaactacatgcgtgttgtccgtgagaaccttgtacgtaacgggatcaatatactcgccggcatcgttcttcgcaatcgttagcttgattaagtcagagcccttcaacggtgttccgtcaacagggtttgtcccatgcttcttaatccagggaaggatgctggtcaagtcgaagatcgtgccggattgcgtgcagacgggatgttcgaacggttggagtgagagggagcagaatctgaaaggaagtcgcttgaaggaggcttcaccaacgccgcgtctagctttcccgactccagcgccagcgctggctgagtacgcgtcttcggaggcccattcagaatgtgtaatctggatgtcatatcgtcagtacgaatttgttcgactaggaactgggtaaggcaaatttcctcatcatacataaagcttgtccgtgcctgtacggatatcgcgttagaccagtaatcgcccacagataagagtactgacctttgcccattttcgcgacgtaatatacaaaatgtatgacctgaacgcggtcttttgtccgcagcggaagctggaaatgatgtagtgagacagaagactagcttcttacggattagttatttatgcctcatgcacataaaggcactactgcggaatatttggatatgccgccagagctacatcatgtaaatcaagc

SEQ ID NO: 12151 - DNA, 303 bp, Emericella nidulans
ggcgcggacaagccgacgccgaagcgacgggcaacgcaagcagggacgagacggaaggcagacgcggcagagaagcaacgccacaggaacggcagagaagaggccaagacaccggagccggggaacgcagggcccccgcggcgaaggacgagcaggccacgcacacgagcaagagagccggacagaaggcccgagaaacgagaaggagcaagcacgccgagacggaaaggcgccccagcacgcacgtggaagagcagaggcgagagcaggcatccaacggcaacaacagcaacgcgggcacgc

SEQ ID NO: 12152 - DNA, 988 bp, Emericella nidulans
tggtcgtgcacaagtcaagtgggtatggcggttgggggccattttctatggatggtggtgcagctggatcgggagcattcccgtggtccggcttgagggcttcgtaggctgtctgaatggcagtctccccgagccagccaggccggtagcgcgcagtgacggtctccgctaccgcggtcacaggagctacaactctggacgccgctacttgcgcgtacgtcccggcaacaagagcaccgagttcaagaggcatggtcgtcagactcgcgccccggagagaacttgggtccatcgacgcagacagaatgcggaaaacaggactccgacatagaacctttttctccccatgacacagtataagctggaaatacccgtcttcggcatctggcggtattcgcgcaacgaccgtctcccgcagccgatgggtctgcacgcgtttcgaagctttcttgtagaacttggcgatatcccgctgccacgcgcgctctttattcgggtcgacttggtcagcacggaccgcaaccgtcggtgtagcattcacccagtcatcatgcatgcgaaaaagggcttttgcacgcattcccgtcttcccggtccatcctttgcattgtaaccagagcgatctgtcggcggggagcggagtatcagcgaagatagagacggtgacggaggtagttggaccgcggtaaaagacgatgccgtgggaatggcggaggatggagtaatgctttgtcgattcagagggatgttggatgagcccaccgaggaaatggcgggcatcagcatagaaactggacttttcagagccggtgggaacggttgtttcggcgcgcgggagagatggaggattcgtaggctgcgggctcagaggcgtagtgacgcgaagattgggctgacttcggtatcgtgggagagagtgaggcggttgaagagagcatgtgggagaaggagatggcgagggtgagggcgatggcgtgaaacggggagg

SEQ ID NO: 12153 - DNA, 165 bp, Emericella nidulans
ggatcctctagtaagccggtgtactctgctgcaaaggccttcccgccttcggagctgaccatagcagaccacttaacgcccttgccgcggcccgtgtacggcccctacgtgtactccattaatgtcatgcccgccttgagctcgtgtccataaatgcctgacctg

SEQ ID NO: 12154 - DNA, 103 bp, Emericella nidulans
gacatccatgctctctacattgattttcaggcgagtgacgcagtccaagaccgattcgcactgtgtagtgctccaaatctgtgcacaacctgggctctcgcta

SEQ ID NO: 12155 - DNA, 175 bp, Emericella nidulans
cgaccacaaccaatagcactagcactgatggacgaaaagaaccacgctccccagcccgagacgcaggggcgaaaaccaccgtcacgcacgcgatttagcctttgcccttacccataccaacatggccagcgacaaaagcaccacagcctaggcgaaaaacaccacccacgccgcc

SEQ ID NO: 12156 - DNA, 527 bp, Emericella nidulans
tttgttgttgtatttggcccaactctgggattccaatccatgaccagtgaattttcgatttcatttgtgtctctttggcaccaggtggcagcttctgtctctaacgacacttaatgagcttcactttctggtgatagtacataaagaaaatagagttctagcactttctttgttggatgataatagtatactcaaccaaataaagtaacattttcatcttattgggcttattagaaaaattcaaatacccctaaaaatgaggcatggagctgggaagtgggtgaggcaagggacttttttttttccaatttatcctagatattattttgggcattctggttttggggtgtattattgtgtgtgtgtgtgtgtgtgtgtgtgtgtgtgtgtgcatttaaaccctgcatttagagttgtaatattgacccaggctgttcacgtggttgattgaaggcagattgccttattagtcattgctggttcaatgggattaatatccttaaagaggaaagccttttccttttggg

SEQ ID NO: 12157 - DNA, 852 bp, Emericella nidulans
  unsure (1)..(852): unsure at all n locations
ccggggaggttggcgggccgtgggttccccaccgctaaggacggcaaggcttaagcacactagcaccgccacgctgaggagtatactccgcattgcacgtaagctgatgatggaacacttagtggcgacacaatggtattatatatattatatttctgccttggctacacattgagacgcgtttatgttgactattcccagaaagtccttcacggctcagttttgtcaaaccaggcatctcacgacattcctcgcttgttaccgacgcgtctcacttcctcatcttctaatgaaggtgactgtccggcgactccgtcatccccacaccactttatcgtgtatccagatttcatattggacaaatccatattgtgtgtgtgtgtgtgtgtgtgtgtgtgtgtgtgtgtgtgtgtgcgtacacaattggcttctttgaaaatggcatttaggtgctggtgtggcctgagagttgcgatctcttggcgcagggaggtagatagatgatcaactgttggagtgatgatatgcctgaatatcattatgtatcatgcatttccaagtttgattccgtttgtaggcctttgccgtaaaacgggctgtgttcccgagccatcttatccaggtccgacgcaaactcagtagccatgaaccttcgagaagccgcatcatatgtcatccaacggttgaactaggcatagttagtacgttgtcgttatcggtatgatccatgcgtaccttagcaagcctaaccccgagccattagcatctgtgcaaccaaggaaggtctcgagncggtggttagttatttcggccatcatcaacagatagaggctttgtcaaaaaagtccgtcg

SEQ ID NO: 12158 - DNA, 550 bp, Emericella nidulans
aaacgggggttttccttgagatcaagactggcatatagttgaccggaatgtaagcacgtgcgaccatgtatagtggttagacggtagacacgtccttggctgtctcgatctggataggagtaactactacaagagctcaatatatggcagtatcgacactggcctgttttttagtggactgaaccgattcatatgcagaccagggtcgggtggcgcgtgaaaaacaatgactacggcgatgatgctgagatctgaagggagcctggatgtgaactgactataaagctcaccgagctcaacacgctgcccacatagttatacctgaatgctcttctgtccaacaaatccaatgcctacggacccgttggtgacatattaaacaaggactccagtcatgcatagacgccgccggtggccactggatcctttgcggactgcaacaagccaagatggatcctcgatgaatgccgccgccgacttcatatgacctataaggtaatgcatgtcctaatgatgtggcctttaaaaagcaggccacttacggcaacat

SEQ ID NO: 12159 - DNA, 548 bp, Emericella nidulans
ccgttaagttaaaattatagcctttaatattgtcgctctgcctctgaaacgacaccgatacatgttactctagatacaaaggtggctgtgcaggtatgtggctatgaccggttgtttgttttcctcctccatgacgaaaatgacgattctgttccgacattttatcgcccctaaatcttctctcgatagtctactttttgcgggctaagagagatcattgttaaattattggcaatgctttgttcattcgatttaagataggagggtctctctttctcctttttgttgccgggtgcctatcccatcatcaagccacagtagctgtcagaaatgtaatcatattttaatacagtcacgacagcactggatcggctcctgaggctgaggctggtccttgatgaaatgagcggcttgacaactgggagttctcggctatgggaccgcaatttaaaagactttgtcggtttgaactatattcatggttgtagggcatgggtattgcccagattctatattaatactggaaaacttgcgagcctgaaaggtga

SEQ ID NO: 12160 - DNA, 440 bp, Emericella nidulans
ccgatattgcggtggcggtggtgtgataatgctccgactcgggccttcattggccctgccctccacaattttttctcaaataggaaggttcctcagctcttagtacatggggcctgtctacaacagagatcttgccctcgtttgagtagagacatcctatgggggtgcacttagtgcggtccaaggatatggtccattttgacgatttacttattctgacgtcatcaacgggccatgatatggcagcgcggtattggtgcgactattctttcttgttatcggtcgcagggcctacgacgaagctggtggttcgcggtactacgtggcctgtggtgacctatctacgatgcgcgagctctgcttcatggtgtagcttggccagcaggattagcttcttgacaccggagctgtaatcctatgccttatgcacttttggaccc

SEQ ID NO: 12161 - DNA, 3128 bp, Emericella nidulans
aactccatcgccagcacatttcacatagttatagggcggtgaagaacccatccgaaagctcgggctttctcatgctgttcccgcaaagccccctcccgcgtgatacagggaactccatgacgaccggcggcacgagcccgtgtttcagcgttgcctcgacaaggcggtccatggggacattgggttcgacgagtgcggtacgtgtgaccggatcgacgcggaggacattgcgaaggtctgaaatgtcgacttcgtgcttccggcggatcgggcgggtgctgttcgtcgagccgtgcgcaatgcgaaacggctgcttgcgctcgtagaagccgcgaatggccgaggcgatacgtgtaacggcggttttgtgttgctcgagccccattgctggcttgactgggggccctggtctattaactcgccggatttttgcggagtttcggcggaggacggagaagagtcattgggaccctaggacctaatatcacgtgataatgtattttagtcatgtgattttcccaaaaaggaaacggtgacaaagggtatagcataggcctggatacgtgacatttatagccctaattctctggcctaccttcacagactgtaggaatcaacatgcccactgcagcacaggggtttttttctcattgcaactgatattgcctgatgtatacatatgtagctgacgcaagcagccatcatctagtgttagagcgaggcatagagaataccattttcaatagcttgtaagaacaacagccaagacaaggtagtatatagatatgaaatggccgtcaaacgagcgagtctcggactcttaaaagacggaggatgtatgtgctcctacaacttaaagacttcattcccagtaaagtaaccagaaactataaatgcgtacgagggtgatgatatagaggaggattggagagcatgtcagcacgcattgctactttgcacaaggtgaaatatctgctattagcgctggagaaccccatgtatccagagcggctgtggtgcaaagtagcttttcaaaccctgtatttcctctcaactggagactcgatgcattccagcaacattagtcctgatttgcagatttgcggaatgatggttgtgctggcatggcgagtaacgaggaaagtgttgattagagcttaatatcaatgtggtagatctcggaacactgtaccctgccttgttggaacgagatagtccacggcaaatgtacgaggtcctgcagaagttcttatgcaggattgaagggaaaccttgaagaagtgttgcattcttggcagttgcgcccatgttcccccacgcagtctatcattaaacttctctgtgcacccttattggcactgccactgcccaagcgccaggtcaggttggtaaggctcagtcagtggagtcgccaatctgaacagcaacagaccggcttcctaagtgtattttttttttcttctctttaataatagatcgagcgctccgccctcagtttcgtccgcaacccgtccaagttcccaagtttcccttcactgatctacatcaaaagggttttaagtcgacacaattacctaaaattcaaaggttaaccacaattagtgccgcagcaacaacagtatcgctgaccagcatcttcactccaccccctgcctgcttaagtagctggatctacgaagcttcggactacagcagcgttgagagcgtcatcctcgtccaaaataccattaatcccagcgaggttgtttttttttttttttcggctggctttaatcacgccgaacgcgacaacgatgatgttatcttcagcctcggggcgtgcctagatgggtatacgacaaacgcccaagcgactactgtggaagcgacggtgacggccagttgttatttaaggtgcgcagaactgttctcaagatcctaatattttgacatcccagtactgacgggtggtgtgtatgtacacagtggctactcctaccgctcgaactacggcaagcccgagcaaggctgcgtcagtacgacacgggcattacacatgtggctgcaagggctggaggtctaggtacaacggttgactgcacaactagcacgacggtattgggcacattggagatgtggcccagccgattaggatcatgtaccaggagcgcgatttgagcctccaaactacgccttcttgcgcttcctctccctgaagtccaaccccagataccgcatccgagccaactacctgacaacaacggtacattcccgttatcataagagctctccggtggtacaatagcaggcattgtggttgggttgattgctgggatgctgatactgcttggggcttgcttttctactgtggcgtaggcggaaaggaaaggtactgaaaaacatccatcaggccaatctgcaaagaggtgaattgccgaaggcatctaacgtgaaagcggttgaatcaatctttgagatcggacctgggcggacaaggtccgagctcgacgcgggtgctggacgggtcaaggtagggcggcggaattggagtaacaatgacctatcttgatttcacatcggcaggaaaataggaatatttgccaaatgtactgaagagctagtagtaacaattgtatatatgtcacatatataccatcaatcttacctaggcacgctacgggcgaagaactgcggcacagtcttgaagccatatcagagtcaaatacgttatagaacgcagaaggctagaatgtaagtagacaacatattcaatatcgtcaattcgttaacaggccatatcttgagcaggaacttggaaatcaggcctaggacttaccctactcagagttgtagtgcaatctctggcgtaatctagccctggcaccgggcaccctgagcgaaccccagtctgatttgcttccatgtgttcaggagcaggacgatataactactacgaagcaacctgcgtaggtccaggcttaatgggtttagagacaagtttcatacgtaggtgccaagtgctcaacgaggaagataggcgctacttcatggccggattgtcggggagcactggcacagttgtcacatttctgtcgttaggtcaaggaaaaataaaagactatcaagtgaccctgcaaaattatgcttta

SEQ ID NO: 12162 - DNA, 462 bp, Emericella nidulans
ctacaatgcccatgtccagagagtttgtcgctctcagaccggccgacgtttttctcgacaggcaagcccgcctacaggaacgcgataacatggcctgtgacgggggtctaaacggatataacaccagacttcgctagagtgcgaatcgccggaagccgtcagaccgcgagactagtcgagtcacgcaaggtgggggagaccacctattcagcgctgagacgcaccaggggccaggggatgttctgggagcaccaactcccgagcctgggacaagctaacctgcatggagcctcagggacatggaagaggcggagaccatctgagcgcggcctacacaggggacagagatgtgcgctgcctcgccgcacaagatgtcttgccacgacaaacttacctagaggcgggaatatggacctgaggtgcatcatagtgatcacagccatacccgacccgttactgacc

SEQ ID NO: 12163 - DNA, 3494 bp, Emericella nidulans
gcggcgctcttagatccgatccagacgtcggtccactactggctaagggttctcattttctaattcaagttcttatcgggcagatttctcctcaaagaggtcacgggcttcaactcctatttccgttttcagaatgtcgtgggccgaggacctcgccctcgccacgagtgagcatgggccttcccattgccttaagagatgatccatagaacagagctctacctgaatcacaatttcgcggtcacgcttcgcaagccatcgacggcattagtcggcactcggcattcggcacttgggatgatgtacttgcgagtctgccggggcccctctagtgcgcgccatctctagtccattatgggtggacgtcaacttgaatacacaaaatctggtcgaggaaaagtccctcatttattggcatctactctgagtattcaagtaatgcagttccctgtctacgtcaatcgacgtcggtagctgtggcgatcgctctagttgcggccaaattcctctgcagctgcccaattttatcctccaaggcagctacacagtctgttcccagcggcaagcgaagatactcgtaacccgaggcgatcgcgctcagaattgcccgcgccgctttatctgggtcgcccttgaattggtccgggattgactttatacttcgatgtgcagtcatcatctgctggagcacagtgtccttatagccctcgctgaagccatgctcaaactgagtaggagtgagcactcggctcgcaaagggtgtacgaaatgctccaggctcgactatgaggactttgataccaagttctttgacctcgtaggaaagcgattcgtgcatagcctctatggcaaatttactggcggagtaagtccctcttcctgggcgggccatgaagctattttgtccgatcttgtcagaaacaggtcgaaatattggaaagacagagtctacaagaatggacataccctgcgccactgctaacaaggatgacgtggccagagcctctggcccgcaaaaccggcaggcaggctcggatagctcgcagagggccataaaagttgacttccatctgatttctgacgtcggtctcactgcgcacatgtgagcatcgtccgagagactggagtatggacgccgagcaaccgcactaacctagtatcctcgacaccgccaataaatgcatatccagcgttgttgaccaggacgtcaacataatgctcttgcgcaaatttggtgaatagataataggcatcttcctgagcagggtctagctcaacccagatgccaccctgtgtcgagaaatcagggcaggacttttcagctctgccaacgtcacgggtagttgcgacaactttatggcctgctttgagggctgctagtgcaagcgatttacccaagcccgatgaggcgccagtgatcaaccaggtcataaatgacgctgccatactgatttatatgatgctgatggcggttgtggacttccatgttccgagtgcttatatactcaggagacagcaatgtgtaaataacggtgcaacgatgaggttcagtatagaccagcggatataagtcttatctcccttggatatccctaagtcctggaatcgttcctcgtttggcgtaagcactaaccagactccgacgggtaagcaaggagatttgacatcaacggagtaccccctgaggttcgagaagaattgcatggacgatgcaaaggacaagttctgagaggtagagcggttgtctaaagcatcgcgatccatgccgcaccttgtcctaaatgaaggcagaatgcgggggttctctttgctcggttctcctcttaagacatggggccccggtttcagaatacttctagaaattttctagttatttcctatttattttcttatacatcacacagctcgggtagtcttgctcaatattactcgctacatactgaagtcgtctggcttagacgctgttgccggttttcgcatcatagccctcgtccaagacaggacgctcttgtcccaattcccagttccaactaaatggacggccgagagaattttcccgtcgcgtgccattacgaccacaggtaatgacaaatagccaaaaggcttagattcccaatccaatgtaccggctgcagagtgataatcccttctgagtaccttcaaactctgcccacgtcttcaaagtcacaggcgagcaaaatcccctacattttccggttcagcttttctgaaagccggttcatatcaactttgcttggacgtttcttggctggtctgtgcggttccgcgcatatcattccagggctatctgcgctatgcaagactagggcttcattcaacctatgagaaggttcgacctggttgggctgcattcagcccaagaaaatcagactgaacaaacgttgcaaggcacgcgtctgtgattcttgccccgcctgcgagagatcagtcagaactaccgccgctctcagaattgtcaccactctcagaattgcttcgtaaactcttatgctttcgggtcaaagcaagtcccttgaatgggtcctacgcagtgtctggcaacaacgccggataggcactagatcgattgctgcttggtcgattatcacccgagcggttcgatggcagaacgagtccaacagcccctcaggaacaggccatacgttggccgggatatttttcttgagttcaaatcgtctggattttggactccttggtaccaagagctgaggtccaatatactcagagtagttcggcgactccgtctggccactggcgatgaatttctgtgcgattgatacccctgaaggctgaaggccaagcgttacctgtcatggaccaaccatccttcaagcctcgcatggtgaaacatccaggctttggtcgtgccaatttctcgtctcgcctgctgcgtttttgaaggtttttcagaacaccgccaatagcagggctctaatccattgccctcgaatcctcagactgtcactgaagttcatgcagaataaagggtggtcgtctcacggcagttcagcttgactcagagtcaatatcgacgaaaatgggctactctggctatatttccaattataaaccagggttcatactatcgagtcgatcttgcctggaagagggacggctcgagtcatggacgataaaatttcgttcttcgacgaacaggaactccgtcttccgcgagtgagttggccgcccaccagcgtcgtgtttcgcgtttcatgcgcacagccatcaaaggtctggactgcagcgctggccaatcgagagatcttgtgaaatgagcggatcctgccgttgctctgcgtggcgcccaactgcccgctaagacgctaagagtgaaaccaggggccatccaatgactctattggggccatcgctaggcatcgcgggctctgccgtgactgtcccaaggttcctttatgcgcttcttgctgtcagattcaacgctctcgcaagaacaaggaacatgagttgtggca

SEQ ID NO: 12164 - DNA, 121 bp, Emericella nidulans
taacaagagaatcgtctatacgaatatataaataaacaaagaaaaaaaccttaaaaaggcaaatgggtagcaagaagctcgaataagtacgtttaacagttttctgcaactagcctggaga

SEQ ID NO: 12165 - DNA, 2935 bp, Emericella nidulans
tttggacatcaataacgatataggaggttggtcacagacgcgttctaaagtgttctgccgattcccgtcatttacagtgccatgtttctgtggcatggctgacacactccagaccacattcagatacacttccccgcctcactccgttgtaacaaggattattacattccgccgcatctcgcttctcctactgctcaagttttcctgctgcctgccctggaggattactaggatttagctcagcggagactggagcgggtttcgagctcgggtcaggagtcgcaacgaccccacaatgaaaactgtgactttgcgcgaaggggatacggctgttgaccttaaaaaatggccgggtggatactgggaagtcaacgctagagagggctcgaattagccggatgggaagctgaggacctttcgtcccaagtacaggacattgcagcctgcgacttcagctttggcaattgggatccatgagccatctcgataaaacacggtctgcatagggctatgcctcgcagattggaaaactgagtgccgaacccagaaggcgatattgcctattttggtgttttcttgactggatctggagtgcccggtttcaccttcggacgtttcaagaagccaaaatatattttgcttaggattcaccgaggtacgagctcaagggtctacgactgcgaaaatccaaagtcagggtctagtaaccacatacccatctatatcaaacaccgatgggacttgctaccggcaattagccgtaccaactggcaaaatgagatcgtatccgatctctcgatcttctcctcgttccggcaattaatacctcaaatcacggattaatggcaggctgccatggtcctatgctcacaatctgagtatgaaagccgagcagtacggttctatcaactgccgaatctgcgtttggctttgttttggtggtctgagcccatcgcagcatcgccaatttttggagtctttagtggcctgcaggaacgttcacgcaccaactcctggttccaaagcattccgaggccctaatgaagccacactggagggatcggcagttaactggtgcccggttccaccactactttagcctttatctgcttaaacttcgggactcgagcgccctcgccccaactgcacacaccaagtgtttcagatcggggcaccacgacgggtgagaaatcagtcacagaacgattgatgttcatttcccagccctgatggatccaattctgtacggcactggtcaattcgggcctacttctaccgtaccgaggcccggtatatgcagtagtctctcaactttgctttcaggatgctgttttagaatatgcggggcgctggtttatacttgatttatactaggacgttcggacgaactaccccctcttgaccataccccgtggctacaagggccgagggaaaatgtttgacctgattcatggcacgggaaaggtacatcttagggttcggcaggccaatagccacacgggttccgtcaccgagtcacaggtgcaggtacgggtgcaatagtatataagcctttccatcgttcgagcgagaatcatccagctcatcaagtctatcaggcctagccagggttcctcctcactctctctcgttcactttctccgggtcactctttacagtcactccgcaaaatgcacttcaaacttctgtcccttgctgctctcgctggcttgtccgttgccagtcctttgaatcttgacgagcgccagcgtacgtctctgcttagttaaatgcctaccaggccagctaaccagacgcagtcggtagctcgagcggcaatgatctccgcgacggcgactgcaagcccgtcacctttattttcgctcgcgcctccactgagcccggccttctgggcatgtcgactggacccgccgtttgcaatgacctcaaggccgatgcctctctcggcggcgtagcttgtcagggtgttgggccgaagtacaccgcggggctggccgagaatgctttgcctcagggaacctctagcgcggccatcaacgaggccaaggagctcttcgaactggctgcctctaagtgccctgacacaaggattgtagctggtggatacaggtacgtcccatcactctgctcgttcgctcgcattccctaatgtatggttatgatagtcaaggaacggccgtcatgcacggggcgatccccgacctctccgacgagatcaaggacaagatcgcgggtgtcgtactcttcggcgacacccgcaacaagcaggacggcgggcagatcaagaatttccccaaagacaagatcaagatctactgcgctaccggtgacctggtctgcgatggtacgttggtcgttaccgccgcgcatttcacctacgtcgcaaacacaggtgaagcttccaagtggcttgagcagcaactcgcttccatgcccgcctccacctccacctttagcagctctagcagctcttcatctgcccctgctagtcaaaccagccagtctagcggtctctctagctggttctctggccttggtaactgagtgtgctgtcatggtcgggcacggtgctgcggatggcccgagccgcatttgtttatgaccaggggcctggtacagtgagtggtgcctagtagtacacgatattatacgaggattcttttttatgtcacctgtccgaggaacaagttccagtaggctatcctttttagaccttttagcgactctacaccgaaatatatattttaaagtgcccatgagacggctatttgcccacccacgtactttcatacctccaccacatatgacagagatatttgccggataattacgatttattactgataagttatgccctgttttccaaccgtcagctcataaagctaaacaaaacgagacagaacttcgagcgtttgctggccaaatattgcttgcg

SEQ ID NO: 12166 - DNA, 979 bp, Emericella nidulans
atcctgataggtagaggagttgcccgcgatcactttttcagaagcataaagatggttcaacgcaccacactaggggaaaggtcagaattgccggtttgtcacgccagagaagccagaggactcacagcattctggcagccatcgtccgtgaggttgccattcagctgtgaaatcgcagcgacatccactcccagcttagccagggcggcttcgacttcacctgttagagctcgatggggcatggccagagcttggatcgcagagcacagagcgagcatgactgccttgaataacttcattcccgcgagtgtcggaaacaggtgggacggtagtgatctcgaaatccaagaggggaagaaattgagatggcaattgaacagaaatcgaagttgataattgggtagagtgatctcgagggaagggaaggcaacacttcggtggattgacctaatttatgctgaataggctgtcgaattcaccttttcctaatggagcagatgggatgttaccttcatgttagtcatgatatgatgattctctgctgaaataaaatctccattcaactgtcaccatgcattctcggtgtgcgcctccggagactagggttctgttggcgtgaatgccggtgcaaacaaatgcactccagtgttagtgcttttaggatctagtccaataaaaatgccaccttgccagtgcattaaatgagctggatattaatcatgatctatgcattcaaagtaaagcttcaagacccttctcatggtgacatccatctcccctttctgccaatcacatatcctcctgttatccatccttacccactctcttgtctattcctgcatgtctgttacatacagatgaaggactgtaaatgattgtagacaggagacccacttgtagatatgctgctacctgaagtatgcgtaccaacactggattcgcctctccttagcggtcaccaagacgagagccagctagg

SEQ ID NO: 12167 - DNA, 99 bp, Emericella nidulans
aaccgcagacccgtaaaaccccacgataaacgcaagctgcttgaccgaagcccaacgatcgagccgcagaaacaagcagcgcccatccaaggcgtgacg

SEQ ID NO: 12168 - DNA, 154 bp, Emericella nidulans
acctacgcaggacccatgatcggatatggcgagggagttcctccctcaaccacgggcatcggggcaaatctaacgtagcacagagccatttatggtgtgacaacgttgcgaacgcgaagatccaatgtgcgagtccggatcaccagattcagct

SEQ ID NO: 12169 - DNA, 1022 bp, Emericella nidulans
agctgacatataatatatatatataatatatatataaatatcagttaacaagaaaaataaataatgtaaaaattctacaaaatacctaagatattaataaaatgaattaattcattaggtgaagccataaataaaaggataaataaagttaatgtagagatagttatagataaagaattagataatgaagaattagaaaaatagattttatctacaactttatctttttgtaaaacaagagctggtaatttaagagcttttaatttactaaagtatgtataagaatgttgatcaaagaacattgtttttacaattaataaataataaacagcactaattacactagttaatacagctataatagttaagaaaataaatccttcttgtaaagcagcagagaataccataagtttagcaaagaatcctattaaaggaggaatacctgcaaatgataataaagtaatagataaacttaaagctaaaatactattaataaagaaataacctttaagttgactaattaattgaattggagaattatttttatctattaaattattatgattaatattattatctgtataagcatataaactataacctatagctactaataaaacaaaagcatttaaattagataaactgtattgtattaaataaaatatgaaagattgaatagattctatagtattaatagctaaagctaataacataaaacctaaatgagagatagtactataagcaaataatcttttaattctaaattgagttaaacctaaaacagttcctattattaaagataataaagaactaattaagaaacttatagttcaaggatattgagaagtaatattaatactattagtattatgtactaaatgtaataataatgttaatatagatatttatgctataatagcaacaaaagttgtaacaatagtaggtatactatcataaacatcaggagatcaaaaatggaatggtgcagctgatattttaaataagaatcctacagaaattaa

SEQ ID NO: 12170 - DNA, 3501 bp, Emericella nidulans
caccagtatcacccatctgaattgcaaaccggcaccaccacaaagccaaggaccttatacccactctgttacatctcctccgcaaaagttccctccaaaacaaaccacagaacaaacccggttcgcggaatcgcctgtcaatataccttcgcctttggaccgtcaacgctcgcctagcgtgccgggtctaacaaccgaccttcccgctgctgacgatgaccaatactctccggattcacctccattatccccagctgataccacggacagcagacgtcccgatgcaccggcaacaccattcgaagcaccaaccccaacatggagtgatgctagcctgcgctcatacctagaggacgaaaatgaactgcgcgatctctacgtcattgtctatgacaatacaaacatcccccccgccggccctgagcaccccatcaccggtaacctgttcaaggacgagagcaagagacttcgggagatgaacagccagttagattctcttttatcagaatgggttacacggaggctgcgcaggtcgacgagtcaataacttcctaaattggccgactggcaccactacattctcgagttggttttctatgttatgttatgactagccaggcgctatgatgtgctggacgcatgcatgcattctggattcaatcgtattcgatcatcttacttctgtgagcttatcgctttttcaattcttctgtgctatatcacttcacgaataccatgtgctttttctgtgccgggtaaaaggtgtaatattctttatcaaagtctattttcatcattgtagccactagaatattaccgagtattacaagcacggattggggtaatttgagttttgaactacaatttctgttcctcactctttcaagggtactatgaggtaggtaaatggcgttgtgagagcttggtcgttccatcgctgttgcccaatgaggtcaaggcagcgctcaacgtctacgtatacaacgcgcaactacaaatagatctagatggtctgatttatggtttaacctgttgacaagagttgtacccagtaatgcagagcccagcgccctactgtatactgcccatccagtccaaaccccaaaacctcgtgatctatccatagatccaccaaaccccaaagacaacatgatatctagaacagaacgccggtgtatgtttatgatatatgatgtatgatgtatgatctgcctgatacaaagggtagtcgggatgcagatgaatatctatgctcaaccccatccgcctcccacaaaacgcacaatgcaggatattcaacattgaccagaaacaatcaagtgcagatgaaagcgccaggctaagagtataaaagtggcacgaattcgagaaaagagtcgtcacgtcgtaaggatatatgtggagataatggtgataataggctgggctaccaaattaaaccgccccatatcttagttggccctcaacgagaagagcctggctttcagggccggactctgtttgcttccgcgcaggagaaggaatccagcctctcatccagccgcggacacgcttccagcgactacgtccgcgcttgggatcctcgacttcgatcacggattcgtcgtcagaaccgtacataagaaactgtacgcccatcatgccgtccagaaagagcaccccgaaggccccgaggaaaaaaggagtggcgcgtttcacccagtctagccgattgttgccgtccgcgtccgcccatcctccaccgccatacggagcgaaattataccaagcattcgggtttgtgatcagagacgacgagtagaagaagttaccactgaaggcagccatgaacagtaaaggggacaagcccgaggtgctcttgcggcggtaattcttgtatagctgaggagggcgtgaaccgagatacaaagcagtagacatccaggagaagatggtgcccaggaactcaagggtcagtgaggaagatggaggaattggatcggcatctgttggtgctgcgtttgctacgacggcgcagagcgtcgaggctaacagaatagtgcgtgcagcagtattttggacgcccagaccactgccagatctgacgatagaccgtcgggacgtccttggcttctcattcgagtatgaaagcgatgcattgtccacaccaccaaccgatcgatctttaatatcgggaatgtccttggaatccgatgcagcaggaatctgtggagaaggaccaattgacgacgaaccgtcctctgaaaaagagacaccctcgataatattggattgcacagtgtcgtcatcgtatgtggagagtgtggcgaatccatttgtccctcgtcctttgtagtgtgtgtaccagaagaattggaatacgagcgtcacatccacgagaacatagtaacctgcaattatgacctgccaaccagcctgtcgagtgagaagtgcacctaggaggttgcccatgtcaccaagacaccatattatcagaaaaaatatagataacccggacgtcgattgcagctggaagttcttgaatatttgcggaagctgggcgaacagccatgacacgatgctcaaggtccccagggtggaggaaaagagagcgagtggtgttggtagacagatgtggaggtaggaagagactgtagcgaggagcggcgaggtgggttcgcaatgcagcggaagggactgaacgccatagtctattaaaggaggaggcatgtttcaaagtatatcggtcgtattcaggtccgctgaacgctctggtggtggtagaccggcagaaagatgacgtggtgacggacgataagacaaatagactgtggagacgcggagatgcagtataacacggggaatggataaaggataggtatcgcagcagctggtcagcagtctaggatgaaagatgacgacaaagacgagtaaggatgaagaaagagagagaaataaagaaggagaataaaagatagagcagacgaggagaagagaagatatgatatgcgtgttgcagtcgagtcatccccccttcaaagtggtcacgagagtcaatctggggctggctgatagccctgataagcctccgatcgctctatctaccacatctgattggttgtcttatcatgaccttcttggtcaggcatccacaaggccgccagtatatggccaaggccgataattcggcgctttagtcaagcgtttactcagtgcgaaaaaccttctttcttagagaacttataaattaaggcatggatctaccgagaggacgaactagaactgtgacgactatgtctcgactcggaccgactgtgtctcctatgacgacgatgatggcgggtgcgacgcctaccatgcccatggtgtcgtccatgcccagaatgcgaatccccatcctcgttcctctcgcctatcttgttctcgaggaagttccctaacaaagcaccaccaatagcgcccaataaaccatggcttttcttatgacccatgtaatatccagtcaccccgccgacaagggcg

SEQ ID NO: 12171 - DNA, 202 bp, Emericella nidulans
tatcggcgataacgatacaagtcaatttagcgggttagaagcagaagtgttaacgagctactgtactagtgtcatgaaaacctggacctggacttacgtagctaaatgattgtgatcatacgactactcggactgagggagagggtttgatgtatgttgaagaggtaccacggagtcagtctgatggtgatttgattcgata

SEQ ID NO: 12172 - DNA, 209 bp, Emericella nidulans
caggcagggttcacggaggagcccaagaaggagctagacgcgacggaagcggcggcgacacacaaacgcgaacatacagccgcacatgcaatcgtgaaccagcaaacaggctgtgctaactcacaactaagacggaagcgcgttgaggaaaagcaagaccgatcaggctacctagaacagagcgcccatcagcaaagaagcggcattga

SEQ ID NO: 12173 - DNA, 543 bp, Emericella nidulans
gtgggcgggtctcaggccgtgacggtgtgagaacatttggcgttagggtatgaggagcgctggcggcgcaagtaggctgcttgaaaaccacttgtatagacagggctgtggcaaggtctgtcggcgcggtgctacatttgaggatgtacttgcacacgtccactgcctggtgggcggactgccacaccatggactgatttggggtaagattgggctcgaagcaagggacggtaatgagcaaggcacctataaggtgcagagaccaccacgtgaggacgggcaaggtaggacagcttatacagctagggggctcggtcttcggaccaaggaaacggagatgatacaccacaagactgatggatcacccaaatgagcttaacacaccgggcaccagctcatagaggagcatgcatgctagagcagctggcctcggcgactctgtagctcaagagcagctaccacaacgaggacgtggcactgtatcacactgtcagcaacgcgctcaagagtgggacaatctattgtcgggacacgaaaggtcgg

SEQ ID NO: 12174 - DNA, 198 bp, Emericella nidulans
tggaagggtgcagcttggtcggaagggttaaagaccgtcgagggggtggcgcatcgaagatgtcagacatggtggttcagcgagatcgaagaaatatcaaatggaccgaagaaaacaggaagaaaggagaggaagagagaaacaagtaacgagaggcgagcagcagaaacagagacgacggggtctaccaggaaagaa

SEQ ID NO: 12175 - DNA, 203 bp, Emericella nidulans
gagggagaagggaaggcagagggggacacaagaccgagagcaacgagcgcgtcacacggcggcctggcgaatccaccgacggcgacaggcagggagacgaacagacaccccggcaagtccagggcacaaccaagagccaccacggcaatcaggggcgtgagagcgagcaggcgcgcgagcgcgaaaggcgcgacccgagcacc

SEQ ID NO: 12176 - DNA, 140 bp, Emericella nidulans
tggccgcgcggaaagagaagacaaagcgaagcggacccccgacaacaactgctgagaccgcatagagggagtagcgaggagtctctcggccattgtcagccgagccgccgcattcgcgttctccaccagccatttgccga

SEQ ID NO: 12177 - DNA, 498 bp, Emericella nidulans
ttcgggctttttctggctgccctccattgtcctagtcctgctacgtctcctgatcttgctctagtgcctttcttcagcatgcgcactaagggcggcagtacgcttgcatgcgcgcttgacggtagtatttgccagatttgagactaacactacctgccagcggttagacattatggccagatgatagactatttagtgcgaaagtcacaccggtatggctgactgtcatagtaacagtgagcacatgccccctggaaacgtccaggagccactatacacccatgataccgtgccctttcctgaatgctgcagggtgtgcatggctagtgcgaatgagacccaaccatgtgcacccgactgacctctgtattgcagatacggacgaaactgacaggcttgccgtgcctaatgagactaaggcgacttagaggctagtgcacagccgtcttggcgagcagggcgtgaccggctgtggttggtcaaaggcattagtcggtc

SEQ ID NO: 12178 - DNA, 2420 bp, Emericella nidulans
ccctttgaacgtcaatgatttctatagatagagatatatgacagactgaggcaaaggaaggactattcactgcgagcgtatgtccactgcaaggcatataccaaaagaccgggactgttagccctatattcctcagatcaggaggatggacttacggcaggagggatccttccccagaaacggtgagccgagctcttttggcggctacaggaaaggctatgaccaatacaggctgcccaggccgttgagacttttgaagtgatgacggcggacgggctgaatacatttgcagccaaatactatgccaggcacagttgtggctttgtacttgggaacgcttctgtcagtatggatgaagatacgccaaagtgccagcaggacgttgaagacaaagggcgggactataagctcccaagagacgacattgaagatcatgaaagcatgaaaaaggggggggggttgggacgatgtgagaagaggcataaaaacagatgattctagtgcgactaagcgcaaagtcgagttcaaaagacaagaaaagcctccctctcgaggtcccagtttgtctcccagatagccggcttctatttattctaatttatttgtttggtggtcgccgtctatccatgaagcttgtttttgtagcccttattctcagcttcattgattccaacattgtgttgtggctgtaagaagctagcgtctacattgtcaaagaacaagacacttcaagaacgtacgtagtagattcaatagcgtagaataaatagcaagcctagccatcgccttaaatagcccgcctacaaaccaccagacaccgtgctgtaaccgacgaaccgaatatgcagacaataggaagagaacgaaacatcagggatagggggaactgaggaaactgaaggaagaagaacaagacgggacgagacaaacgaggcagaacgaaaccaaatatgcgaaccactccgcagcagaaaaaccatgaccatgtacgcaatgaggaatgagggggaaatgacaaggtagaagggagatcaatgagatatagatgagatgagaaagtcccggaaccggtcgtctatctctgcttttacctgccttctcgccttgttcgccgttaaaatgactaaccgtgaccgatggatggaaagagacggataggaaaagaagcaatggtgggatatatggaaggattgttcctgcattatcgccctacccgctggttgcgacgactaggtgagtatgtaccgtagccagcaataggcagggggcagcgcggataacacaaagatggcgtatgtatgtgatgtccagacagaagtgcgtatatgcaaggagtcgaatgcaaggcgagcacgttgaacgcagcctacacaaccaagaagtagtgctagcagcagacccggatagactcctggtaacgccagacaccgataatgcagaaggacagagattatacggagaaggaaggagagacggagacggagagaagaggatgaatgccgaggaaaggagaaaagagaaagatgcgaaatcatgcaccatctatcatgtcaccttcctcagatccatcggcaagcagcgaagtcgacgacggcagtttgcgaccagccccatacaccatctccataagcttagctttttgcttctccctcacagaacgaagataatcgtatgtcccctccagacccttgatttggccttcaatcactgcctctacagggccaagtgttcggccgccactgctccccgggtccacggcgccagcaaaacaacggaatcgataagccgaaccagtggacagacaagtatgcgccacagtgtttaataggttaactttgagtgtcaaaaggcgaccgcggtggtccatgaggaggtgcttgttagcgacggtgcgactgcggacgtttgctaagagtcgcttgttcttttcatacttgcgcacaacggcggcgtcgggcccaaggactcgggtccaaagggagctgagcatttcaccctcggcccgttcctgggcatcggattcgcggacgactgtgcgctgcagattgaggaactggcggtcgatggactcgaacagcgcaaacagtgccgtcgaatgggtgagttcgctgttgatggactcctccaacacagaaaggaattcggtgaaggtccgtgtgagggttgcgcgagtgcgctgcgccgaggtttggccgaatagggctgtcacaatggttccaaatgtagtaggggtggtggtgagctcggtggtaccatcaccgctggatcctgcgactctctcgagagtgcccagtcgcgacaggaggtcttgcacgttatcaaggacaatggacggtaaactacttggcggttgtgatgataatgtttccagctcgcgcttggcccagtccataaccaacaggatcgagtcgacgtccgag

SEQ ID NO: 12179 - DNA, 520 bp, Emericella nidulans
tttcgaggtagcagatgtctctgactgggattcaggcacggtgataagacggtgagcgtgtgcttctttgatcgtgccgaagacaggcttagggccagaagcgccatcaaagccaactctccctaagggcggtgcttccccatcagaagtgtgaatagaagcactgccatttccccagattcccacgaacttgctttctatacctcgtttatgtagaaagatcttcgcgaccgtgagttcagatgatttgcaagcgaagaagtccctatctggttcaatgaagtctcttagtgcgcggaacgtttgacgagaagttttccggaagacaagctgataagattgtttctgggttttgaaactattgtctaccttcgaaagttctctcaattgctttgctcgcatcgcatccagctgcatatcttcctgctcgatttgatttcggcgaagtccaaaatgtctgcgatgtcatcgcgctcctcgaccgttaggcaagcatccgacacacggcggggtagctgtg

SEQ ID NO: 12180 - DNA, 628 bp, Emericella nidulans
  unsure (1)..(628): unsure at all n locations
cacgggtnttggaaaacacacggcgaaacagggcgactcgaacatagtgcctggaaccgcgcacattgtttttagctattaccgtactgcacgaacatagggacggatactatacggcatgcagacctatgataaatgtccacggaagtgaatggactacggtgcgcgctgtaggcgtgtacctgggcagacagcatgggtgtaggtgatgacctatggcacacgagtatggcgatcacgaaccatttctcgctttacgggttacgaggatatacatcataatgagtttctgttgttatttaagcgagcactctgtgcatgcgcatcatttatctagatttgctatcctgggatatttacatcactggatcataactggacagtgctgtagactcagctcacactgttgctagggacaatgtcatgagtcatatatcattacaaggctatatctgtgaacagtatcgacatggcagagacgatatcggtcaaaagtccaaggcgcgctatgttaaacacgagtgatatacatggggtaaggtgccagcgcgccgccatcgagcggctttgacgaatgcttagggccacctatctattacgactgccccagtgatgcattgccacactg

SEQ ID NO: 12181 - DNA, 370 bp, Emericella nidulans
tgtgatctcacgttggaatgatgactgtcagtttcgaagaaaatataacttacgctatactgactgtgttgctactcttggagatgtcgatgatcccaatgtctgttttaacatctatagcctacttttcgacactcatctccgtcaaccccgccctgtcggcccaccttgagccattctcgaattattaatttgctaaccgacctccctatgattcagcgattagggacgtgcgtgatgctgatgtagagacttagaacggggacgagtatgcggtagcggtgaaggtttatagggttgcggttggacagtacagtgttgcgtcttatattacggcattcgatggggcggggggcttgattgtggggtt

SEQ ID NO: 12182 - DNA, 115 bp, Emericella nidulans
ccattgatgcacacgcttcacctagtctctgccgcatactgctcatctcctcgaacttgctgcatcctctatctgacactatccagagaatcatcggaaaccatcacaactcttc

SEQ ID NO: 12183 - DNA, 413 bp, Emericella nidulans
ctttgtgtgaaatgagttcttattatttgcattgggcattcacaattgtcatacaacgttaggcacaggagattatgcctcgtttacgtgactaggagaccaactgcggaggccccaaagcctacaatgtagacgttacgcgggctctgcaacacctgttctgttaccacatttgagtttgccctaatcccaggcaagccggcaagtttcaatgggatttcctagatgcttttgctagagtatgactactacgctcaacgcggactggccttagcctaatagaaagtggaggtccaacctgccagcaagcatacgagaacatgcgttgactccagtagcgggacctagtactgcgcatgtggatctagcgagtcaatgctttcaaacgcttctatctcatacatacaacataa

SEQ ID NO: 12184 - DNA, 1189 bp, Emericella nidulans
gtgcttgttcctggttcaagacctcaatttaccgcgctactaatggggcagactcccctatcgccgaatcaaatcgacaccccagcaacgaggcttttgctgatgcttgtcgttggcccggcgttaaagcctggcgatttgcctctaaatcctaatcagcgattgaaacgccgcggcccgacctgtgtggatatcgggtggcatccatgggtctgactcctttgctaggcgccgtgggtgggggaatacgcagagacagccggggagggcttggagtatcacaagtcccctgtcggtactgagtactccgtccggtagtcgactacaggtaattagtttagcacattatacgccaggtctcgatatcaactgcggcctgagtactcaagctcccccgggaaattacctgttcctgaacatagaactgcaaatgaaacaggcagggtgcaagtagcatgggttaccatgatgatccacaatccacatccttacacccgcactacatcacttcccgatacaatgttcaggaagacataaagtatacagaaagacaattctaattctttagctagatgcaagatccttgcacgtgtccaaagtccacacaggatacacatatcatgtaggttatttcaaaagtcctctttcctcgtcaaacatcgtccgtcaagacaggaacgggctgtcagaagttatcttggaatagtgattggcgtccaggcaagcctcttgggccttgaccgttggcggtcgagatcgctggaccatctctttttcatacgtgctcgcaacctccttcaaatcagttggtttgtttccactgggtgctaacagagcgagtagctgggccacatcaacgacgccatgattggcattctctccgcgaactagtatccatcctctgtatgcaggatagagatcctaggagatttgtgattgccattcacttacaagacgtcattagatgagcggcatctcccaccgtggtgattcgtccgtctgtcggacgccgattggcatcattcggcatccactcttgcacacggataacttgaacaatgctatcatccggcataccgtagatcaggtcatgcacgggattcgcccaatgtttggccatgtgcttcaaccatgctagttgctcaggaagctcgggtggcggatcggacggtgtttcctggcccaagta

SEQ ID NO: 12185 - DNA, 188 bp, Emericella nidulans
cgtgaagaggtggtgacggtgcgtcgatgtggtgagaggtgatggtgcgtcggaggtagatggcggtgggacgatggcatgccagcgcgacgtcgtggagtccaagtggcggatgtggggggtgttcgcagtggcgctggagctgcagaggagtgacggggtcgagattgtgcaggtggcgaggtgag

SEQ ID NO: 12186 - DNA, 139 bp, Emericella nidulans
gctagtgacagggattggctactgtctattacaggtacagactatttggctcttatttttctgctgcacaatcaaacacaggtaatcgtggctagatacaaacgatactatgctgcagcatatgctgagttccagtgta

SEQ ID NO: 12187 - DNA, 612 bp, Emericella nidulans
tataaatcctcaaggttggcactctgaatcttcaaccacctcaacccactttcgccgagcggtttcgcttcgctgaacaagagaaggcctcttgcgttatcggcggccatttgattaaggtaaggcgggattggatatgctctgcctcggaaatccatgttatgagggaggtaaaaagtctcgttcaggtatgaacgagcaacttccatttggaagctctggaagcaccgctgataatgatagccttccctctggttttcaatgtcccgcacttttgtgtgccactcctcctaggcgtcggaaccctgtttagcgcgaaggattcgttgcgtttctaataggacttctttcacaaaccctcccctagggattcatgggttaggaaaccccttggatagaattctgcctaactttctttatagatattcgagaaccttaatttccatgtacccttaacccttcccttaccctctggtaataattgggtttactactatttcttaactcctatttataattttgttatttacctttatatatcctttttttactttttacgtggggacttattgactcttaaatcttttttttttacgtcagcttagaaatatc

SEQ ID NO: 12188 - DNA, 134 bp, Emericella nidulans
  unsure (1)..(134): unsure at all n locations
gcgctgttgtttcatccctccgtgcccttgtcatcggtaggagtgacagtgtagccgtcttccattacgtggcgagactcgtcgagcgctgccacgtggacntcttctgagatgtctgcaacatatcctcctac

SEQ ID NO: 12189 - DNA, 1517 bp, Emericella nidulans
cttgtgttgtttattcttgccatacgcctcgttacccgtccaagggatctccccgttgtgcacgccaacgctggagatcttgccccaagggcggatcatgtcaaacgccattctcagcgcatcactgtggccgacgacttcaatcgcaacgtctgcgcctcggccgtccgtgagttccttgacccggttcttgaggccctcagagtcggtggcaaagttccacggctcggcaccgaggctctttgccagctccagtcgcgagggaacagagtcgattgcaataaggtgcttgggcttgtactcgagcgcgctgatcagcgcaaagatcccgaccggtccacaaccgaagagaataactgtgctttccttgataatgctcttatcaagcccgctgaatgcattcttagccgcgaagaatcccgttggcaagatatccgccatcataaccagcttcttctcgtcgatcttctccggcgcggagacgagcgtgctgtcggccagcgggacacggacgtagtccgcctgcgcgccgtcgaggaccaccgacccgtagagctggcacttggcgcaccgagaggaagtgttgtgggagcagtagaagcagtctccgcaggagacagtgaagggggagacaaccttgtcgccgggcttgaatttcgagacggacgagccgaccgaggcgatctcgccggtgaactcgtggcccatgatgaaatccgtgccggagggttggtggccgcggaagacgtggagttcgctaacgaacaatgcccatattagccgtcaccgaacccaggatgcggaggaaagtgatgaaggatacgggaccggggccagtatacgtacctcccgcatagcgccgtataccgaaccttaacgatggcatcggtcgggtcctgaattgtaggaattgggcgctgctcgagcgcgaccttgagagggcccttgaagacaacggcttgcattttggctggtttttttatctgctttagacgttggatcgtggatcaatccaggattggcacggtggcatgatgtgaggggtgatttatatggcgcccggttacttgacctcggttggtcagcctcgttcccaggcgcggcatttggtgttcggcgatgcggagagtaattcgttgcggggtttgaagtcgaatttgcggaagatcaattcggcccgagtcgccgagtggtcttaaaaaaagctttttagcggcatgacccgggatcggggttgaattgatacttcaaatgggcgatgttggtgctgctcttattcgggtattgcaggggccagagggtttatgggggtcataacccaagtcacccttcggtttatggtaaacattcgggggcacctccagaactattttgggaaaattattttgtgaatttcttgaaaatttttacctttgtctaatttaaaagattctctccctttctccggaagggcttacctttaaacaagagtccttacattgttttttatctcccccccaagaatttgttaacacttc

SEQ ID NO: 12190 - DNA, 1525 bp, Emericella nidulans
attaggattgatgacggagatttgatttgcgacgattcccacgggaaatcctgtatcccgcagttagcgactcgttcacacgcaaatgggatacagcatccgctgctgtacctagaatatgagcccacgcgttgatcatgttcgtgccgtacttgggcttgaacatggacaggcgcgaatcatcaacaatccgcaacaacacttccaacatgtcgaacggcttccgaatatcaggattaacaagataaaggaggtcctgggctggatatcggggctcagcaggcgataataagctatggagaggcactgctcgctctcgtagggttgaaacccactctcgagccttcacgatggcgtcgaacctgcgtataattagcaggatgcaggggacaaacttcattatatccgtcaggcatactcgtcaatggcaatttggtcggccagacccgtgactgtcgcgtggacgttcgctcctcccaactcttcggcgccaataacttctcctgtagccattttcacaagagggggtcctcccaggaaagcctgcgcctggttctccacgaaaatggtatagtctgacagcgcaggatgataagctccccccgctgtagaggagccaaagacaatggcacaggatggctttccgtgctgcgtgcgcaccgccaggtcccggaagagctgacctcccttgtggaagacgcggaactgctgggggagaaagaccccggcctatagatgtcagatcaggttgcctgtatgttattggctagtgggagtaccgattgcacgagtgagatcaggggcaagtcgttttcaaacgcaatttccatcatgcggtttactttaagaactgcgaaagtcagactgtaaaacatagagtctgagataccaactaaccagtcatctcattccacgcgcctccactttgcgttggtatgtgggacataaggagacacggccggccactatgctcatcagcacgccaaacaatactagggagaatgacgtatgcgcacctaacattgccaattccagcaatcaggttcgcacacggcgttgaattagggttctcaaatcctgcaaaggcaccgagttccagaaatggcgtgtcttggtctagaagaagtgccactcgatctcttgctgtgcccggattagtcgaacggtgcaggacaaacggaagcaagcgtcacgcacgtaatagctgtccccttgattgatgacgatttagagagacctcatttccctcagcggcaacatgcttcaaagcttcctcaaagcgaataaggatgtcgccccagtcggccttgttctgttgcagatgcttggcccttaggtccaggcgggaggatataactgggtatgtcgatttctgtcgccatggcaagcggtatatcccaaagtatagtcactgagaatcacagtacctaccggataatgaattaattgtagaacctggtgagctctgttcgtgctgatcgtgtacgaccgatggtcccgcagacctcggcggatcggtcagagc

SEQ ID NO: 12191 - DNA, 600 bp, Emericella nidulans
gttaagacggttataacattctttctggtacatgaatagtcaattcagcatgatttgcttgagagatatgctactctcagaacatgcagtttgtcaggtcttgcatatccaacataacaaaagaaagacacgtcacgtcagaatgacttcgtgtatccaaaaccatgaaaggatagccggctgtcaaaactgtcggcttctcgaccgatcaccgggctaagcacgccagcaccttgtttcccgggcttgcagcctcagctgcaccagccgaaagcctgaatcgctcagccgggaattcagaaggaatacgtcacggccaatgcgttaaccaactggctgcgtttacattcctacctccatagcatttgcgccgagatgccggccgcagctgcatcctcggcggcgatccagcataagagatcagcacgattaggcagataaagttagtaaatggctgcctcatgcccctattgaagcacgcacttaagaatacaatatctatggaaatgaccgcttttcagagcgcttacgcttattcaccaaggctgatatactttaaattattgatgcggatccgccgccccagaccataatgatgat

SEQ ID NO: 12192 - DNA, 659 bp, Emericella nidulans
aatattaggagtggctatggtaactaaactgtaaaattcgatcttgaaccgccctcagattagctctcatgttctcatcgatatccaggctgttgcgcttgggtaggaagcacctagtggccggggatcatacatctatggcttcttctatcttcccctagatttcttgctacctattcaatgtatatacttcttattttcattatctacttttcattttttcctctcatattctcctatttttttttgaactataatatatttttatatctcttctttcaacttttcattatctactaccctccatcacatcatattttatctctccttttacgaattattcttttatatcatctactctatatcgttccttatccttctgatcacttctaccatctattattattttattgtcctcatattctccttatttataacattttcactgttatgcccatctttactcatacatgtgatctcgatactttattgtctcatctttaatctccattgatactcatatcgctttcacactattttacctaacatacggtttataactctgaaaatcatcactcctttatcttcaattttccattactagagctatactgacatctactctattctattattatgctatctacagttaatctcat

SEQ ID NO: 12193 - DNA, 3149 bp, Emericella nidulans
tgcggcctagactaatgattaccagacacatgcggtttcgctacagccctttgccaaagcacggcctgaagatttgataatctggctagctggccggggcgctttctgctaggatatccttgcatctgatagaagcatacatactagcctgcagtgatatcatacataacctaagctggctgtgctcagtcaagacaagaagaattaaatttagatatgcatatcttctaatcaaagcttctataattatacaatcaggcaatatcgcgagaccgtgcgattccgaccgggcaccgactaggcactgactacgttttctcctcgaacaaactgcatgcagcagccgcatactcggggtccaagccggtaccagccaagagagccactcatccgtggagtgtccccattcgccaattacgtctcacgattactcatatatatagcaatattcgttcttggtagggctcatggcggtcccgattgtaatctcggggctgaagtcgaataccatcgtgtcgtttagagttgcgttacggctgggcggtactatcatcgcagactgtcagctcgcctgctaaaatccggcggaaaggtaggttcttacagttcagtagcgttagcgtgccgtccagggcatactccctcgtctccaggtccaaggcctgccagatggtccagatgcggtcgacctgggcgtggtggaaccagaatagcggatccccaggcgaagtgaaaatatcattgtcgacgcccgatatgaagatatgaccggccagatgcgggccttggaagaataaaggatggaattcatgcatgtcggtcacgttgacgagcatgttgaggatgatgtcccaggaggcgccttgctggaggagggtgttattgaagtctctgattaggggacgtgggtgtatctcaatccgtccgaacgtgggtttgcaggtatgtattggccgttatcgtacgaatagaggacgggcccgaggtgtagctcccagtcgtcaagcgggcggtcgtagatatatccaccgccggttccgggaggagtatagatagcggtatcgggagacgggttgggaattgggaaaagctggagggtgccgttgcggttgggaatatacactccgttgcctgaaagagacgcgttggagccgtcatagagggggttggccgtgatggggagattagcccagtgggaccattcccagtagggctggtaccccgtgtatccgcattcctcgcgcagcgccttttcatacaggtagacgaaatggcggtgccaggcgaagaaggaccctgtagcgtggatggtcctggtgtggcggatgtgggtggcctgaaagtcatcgaaccgggaccgcgcacctggagccagctcaggatcaatgatggagggtaagcgggccaggcatttgaccgcttcgatgtattcaagccgggtctcgacatccagggtgctcctggcaaaccggtcagcaaatagaagtcgcggaagggggagagcgccgcatggacgtatacataccactctctgcgaaccgcaaggttatggggggtgcaagcaccttgcctaggtaggccctgcttggtcttccattggtactcatggacgagcctctgcataagcggcggattggcatttgcttgacagaagaggaaaatgagagcggcaagcgctgtgacaagcgggttgaaggccaacatggttatccctagtgtaattgatggttaaccgtagctacccagaagaaaagacggagcccattttatatgccctgcaattctttccctcggcaatcagaccaccgttcaaacacgaactatgcgtcaagaaacaaaggggcggatgatgtctcagacgaccttgtgcctcgtattggggcggtccctggctgctccagctgctgtgccctaatacccggcgtatacgggaatatttttatcgatccacgtcagcatttagactggagcctctatggggaaaatatatagggagagtatgaatggccggtctgccttaaggtgtcccaacaaagagaaaatccagatcaacttagcattctactggcaagaatgactccgccactcctcgccctcgaagaacactactactcgaccgccatcttcaactcgattggcgagaccttccagcgaaccctgcaaggcgtgcctggtctcgccgaccagctgcgaagcctcggagatgggcgactcgaggcaatgaaccgtgggaacatctcgctgcaggtggtctcccatgcttttactccgggtcagtaagacctaatgtaacccagaatagcacaaaagccacgcgagctgactgcatagatcgataggtggacccagtgccgaagcctgcagagcaggcaacgatgagcttgcggccgagattgcccagatcagcgatccccagcgcttcgctgccttcgcagtcctgcccgttgcagacccaactgcgtcggcggcggagctagaccggtctgtttctgaactagggttcgtcggtgcgttgattgacaaccatgcggacggaaagcatttcgacggtcacgactacgatgttctctgggccaaggcgtgcgagctcgatgtgcccatctacctgcaccctacctggccctcggcccgcatggccgagaacttcatgggctcctacccagtccccgtcggcatcagcctgggcggcccgggctggggttggcatcccgatgttggcctccacgtgctgaagctgttcgctgcgggggtgtttgatcgcttcccaaggctgaagatcatcgtgggccacatgggtgagatgcttccctatatgctcgaacgagccagtgacatgagtactcgctggggcggatggggccctcgagaccgaccgctccggcaggtctgggatgagaatatctggattactacatctgggagttggagtctcgcgcctctgaagtgcatcctccacaacacaaaagtggagcgcatcatgtacagcgttgactaccccttcgaatccaacgagcggggactggagtggttcaaggaactcgagggcagtggcctgttgaccgaagagcagttgcagatggtgacctaccgcaacgcggaggacttgcttaaggtgcatataagaaggagcagtgataaccagtaggaac

SEQ ID NO: 12194 - DNA, 903 bp, Emericella nidulans
acaataagttctactaagcctttgcaactcatcaacgtcccaatcgcgaagctctcccgccagagaaggccgcaagctcttgacgcaagcgcccctccggcaaccttagcaaggaacgcgattgaaataacggcaacaacatagccccatacgattcccgtgtccagcagccccaagtctgtttgcaggccggaaagcgtaaagtacaatggcaggaaaagcgccgttaccaggtcttcgatcttctccgtcaacttaatagcgaagcctccttcgtgagggcagagcaagccgataaggaaaccaccaaaaatggcatgtactcctattacctgggtgaagaaggacgacgccaaggcgattagaatggtaatcgtgaccactgactggctgggacctttctgcaagcttccagtatagttgaggaagcgtaggaacaatgggcggaaaatcacgaccagaaatgtgacgtagccaacgcagacgagaaacacccacagcgctgtgagaccacttcctgcattgacaagggcgacgcagagtgcgagcaaaatccagccaacgacatcattgccaacgccggcggacagcacgatgacaccaacatttgtcccgagcagtttcaactcggtaaggatacgacacaagaccggaaatgcctaagctattagatgaagtaatgggattagcggatgagaaacctacggtaatggccatggcaataccaatgaagagtaaataagtgccaaaatcaattggctttagaccttcttcgtcatgaaactcgtgatacaaaccataagagacaccagctcccagtccaaaaggcaggatcattcccgcagctgaaacactgctagccacccgccagttactgacaggaagcgcaggttggtctcgaga

SEQ ID NO: 12195 - DNA, 1566 bp, Emericella nidulans
gtaaaaacatagtttactcctgcccgtggtaggaccatcgttggatgcagttagctcaccagtgttatcctcaataccggtagtaggggaggcaaagaagcatacaaacaagctgcgcaacgcaatcttcatcagtatcaacaccggtagtcccaaagctgactccctcgtctgtttttgatccgagaaggataggaactttggcgagacgtccttccgtagtgctaatctggggatattccttgatgaatttaccgtcatcagcggcgaaccattctaagccttggtaggagacaccgtaaagtgtgtcaaagggtacttcacggagacattggagggtatctgaagaggttgagcatctaggttggttagcagatactcctagcaattcatgtatcgagcgtaccctgctgcatccactatcctatcatacatcggctgatgccagtctgtgccgttccagggtgggccgactgcgtttccggactccatgattgctgttcttggtcattatttgttccttcgcctgcactgaacgggaagcatgtacctgctctaaataacccctcattattaccatcgttggcgacaagatgtgcaccgacactatatgctcctctgctgtcggtcagcatcaattatcagtaactggtaacatggcatacgcacgctgactcgccccagatcgtgatcttggtcgggtcacccccgaaggcctcaatgttcttcttgatccagcgcatggcaacccgctggtctagcagcccaagattgttgttcccagatgcctaaaatgagtgtcaggcttgccaactggatagcgtgaaaacgaaaacaagacgtacccgaacctcctccgaatccaaaaaaccaaatgcagcaagacggtaactgatagagacgcccagaataggcctgccattcaatgctgcctgtcgggttatatacgtcatgttatacctttccattcatatcagacatcgatccgctgccacacaaatcgtcaatacatacctcggatcggccgtagcaccctgctgccacccgcccccgaatatccacactaagacaggcagtaactcttcatctccatgccttctcggccggatgacattcaaattgagacagtcctcattcatttcaattaagcccatgttcagcagtgtcgtcgtatcagacccatagccaggacagtcatacccatattgagtggcattgtaaagcacagtcccacgtgtagaaacagacgagtgacgaataggccccgaatcactgtcattagacgcgtagaccgttttcaaagacgaaggcgtgaagcgtactggtttgtctgcgtacttgattccgaggaacagctcttggtcgaactcggggagggaacggccaatgaaggtagtactgctcttggggccattggatagggtcactatgggtgtgggattcgactggtatgcggagctttggagaggcagaagaaggcttccgatagccagatgggctaaccagggaaatgctaatttgaaatgccgcatttccaaagcctatctaaagtatgttgcttactcc

SEQ ID NO: 12196 - DNA, 2502 bp, Emericella nidulans
catagtcaaccccggatttctttaaaagaggcgggtcctgcttctggtctcttatctcagtctccgcacttttctccggagtcttgatctcgagcagtcaaacccgttggaacatatcgctggtttactgagagttactctgaggtgtttttagccatgcgtctctctcctgcgtggtaccaggtatgcttgctatctcgggcagactatttagatcattatacttacggtgatgctagttcctcgtaggcgtcttcgcctccctcggatcattcctctacggatgtgcgtgtattccctcattctcagagcccgtcaatggcgcgctggatgttagtccactaaccggattcttcaactgcagatgatctgggtgttattgcggaagtgatcgcctgtgaatcgtttaagacgaccttcaaagagccagacagcacgcaaacgtaagtgctccgtaacctggcgggagagcctcaagtggaagatcctggcattgactcgtgcctcagaggtttggtcgtttcaatgttcacagtaggcgctttctgcggtgctgcatttgcaggtcctactggtgattatctgggtagacgttggactatcataatcggttgtatcgtcttctgtctgggtggtggtctgcaaaccggcgcccagactattgagtacctatacagtggacgtttctttgccggcgttgggtaagttgtgttgaaactttggccgccgagtacacttgctaaactgacttagggttggtttccttaccatgatcgtgcccctatatcaggccgagatctgccacccgaatatccgaggtcgtgtcactgccttgcagcagttcatgctgggtgtcggagctctctgcgccgcatggatttcgtacggaacatacgtcggcttcgatgatacgaacgatgctcagtggcaagtctctcttggtctgcaaatcgtcccagccgtcttcctggggctgctgatcatgcttttccctgaggtaagatacgagcccaagccagtcatactgctgctaacgtgcatgcacctagtcccctcgttggcttatcgaccatggccgccaagaagagggcctgaagaccctggcgaggcttcacgcctacggtgatgtgaatgacgcctgggtccgtgcggaatacactcagatccaggaatttatcctccgtgaacacgaggaggaggccaaatcctacttggaactcttccagtcgcgctcgtcgttccgtcgtcttttcctctgctgtgcactccaagcctccgtgcagatgactggagtttccgcgattcagtaagtactctttggcccttacctcttctctgtatggtgagttattaacggcctgtctcgtacaggtattactccgtcacgatttacgcgcagatcggtatctctggcgatgaaaccctacgctaccaggcaattaactccatcatcgctctaatcgcccagttcttgtgtatgatgcttatcgatcgtttcggtcgccgctggagtttgatcagcggaaacttgggcaactgccttacatttatcatcgcctgcattctgctagccagattccctccagaggtcaacaacaccggagctcactggggctttattattatgacttggctctacaacttctctttctcgtgcacttgcggtcccctgtcttggatcatcccagccgaggtcttcgatactcgtactcgttcgaagggtgtctcgcttgcgaccatgacctcctacgccttcaacaccatgatcggccaggtaacgccactcgcaatggaagacgttggctacagatattactatctgtttatcatctgcaattttaccaatgccgtgttcttctggttgctcctgcccgagactaagaagttgccgctcgaggagatgaactatttattctcaaacgctccttggattattccaggcacaaagaaggaggactacgtccgcacgacctggagcgtagggtggtggagcaggaggaaaagcagcatgcgtatgcgtcgcatgaggagaagaaatagatgcagaaagaagacggacacgttgatgctcgatgatactgtgtactttacaataatcggatatgtaaccatgtgtagggtccactaatggtccctgggaattgcagatggagttgtgccaggtaccgtcttgagagcctgaagcttatcatgagacctctttgtaataggcccgagacactacgtagatcgacatatgcacttatcttccggtcagtttaatctcaatagtgcaacatatggcgtcgtacgatttggtagccacatttttgcttctcataaatggttgttggccttgaatccgtacatcacagttatctctttggcgtacactatgatgatccttaaatgagtgtaatcactccgaatctgagctatagccagtcaagccaagagatggtgctggtggattagcagtcggctttgcgggttgttgagctgggatcttgttcacgcccgagg

SEQ ID NO: 12197 - DNA, 268 bp, Emericella nidulans
  unsure (1)..(268): unsure at all n locations
cttcatccaaacacacatgtaatcacctcggtattcccagacccatttggccgagtctatttcttctgtcgangaggagcatgtcttgggccttggactctcaatcaatagctagacttctccancgacgtagcagatcatcttaggagtgttcctgttgntgntttagngaacttacgatgatgacaggtgtcggtgccgcacttcaatgtccncggtccagcgattcccatttggtngcatggagtagggagtgctcatttgatga

SEQ ID NO: 12198 - DNA, 504 bp, Emericella nidulans
tggaccttaccagggggtcggcagtgcacatactccactgctgatggcttggcgttcgattggccattctgccaacttgccttatggagttcgctccagcctgtaggtagggtcactgtgtgcagcacctgacgcacgtttggctgatctcgctattacaccatcttttagggtgcgtgtatggtgctcttgagggtgtactctgtgatcctgattttcaccatggggcagggccctaccacgggtgggtagaatcgtattgatcgacgggctatgacccttatggtgctctgctgaatcataaatgctacctatgacttgggccggtctctgactaatccagcgcataattctggcactcggcctattgaccgtgtgtaactttatagggttgcgtataccagacctattgttttgcctgaccttcattcactacctgaggcgattcatgtaacacgcgcgtataggaattatctacggctgtagtagtgacataccggagag

SEQ ID NO: 12199 - DNA, 606 bp, Emericella nidulans
gagacagctctcccgcgctctattaacaacaacgcaggccaacatcagttgtatatgctgtgtttcgccgtcccaaaccttgttgtctacagcctgtccacccaaacctgtgacacagccgtgtacataatcgccatgtatcggcgacggcttagacatcggcgcagccatgaactacaccttcgcccacatcctgtacttgaccaagccagaagtccactacatcgtagccgctctcgtgggaatgtcccgcggcttcgctggcagtttcggctcagcgatgggaggaggatcataacagcgtaaccttaccggaggggtggacgatggacaatgttacgcacgcaactgtgcagagaggagggtgaagatttacgggtcattaagtccagaccctaactccctggttctcgagacacgtcattcactatggacaccgtggtacctattttccgtatcacccacgaaacgcatttactctttcgctgactttggcaaatcagtatcactctctatacatagtacctccacttggtcctactaactatattgtttattctactctcctgatcttcttatatcctaacttgtttttctctttatgat

SEQ ID NO: 12200 - DNA, 3897 bp, Emericella nidulans
cccaacaacattgatggccgagtacagcttgctctttggctcccaaatctgacgccattgcctttgttcgagacaacaatttgtacttaaggaagctttcttccgaacgcgttgtacccattaccaaggacggtggggaacagctattctacggtgttcccgactgggtatatgaagaagaagtcttctcgggaaacagtgtcacctggtggtctgaagatggttctcaaatcgccttcatcaggacgaatgagtcggcggtacccgaatttcccgttcaatatttcctatctcgaccgtcaggaaagaagccacagccagggttagagaactatccggaagtaagagaaatcaagtatccaaaggctggcgcgcccaatccgttcgttaatctgcaattttatgacgtcgagcaaggtgaagtcttctccgttgatacgcccgacgactttgatgatgacgatcggcttatcattgaggtgatatgggctgctaagggcaaggtccttgtccggacaacgaatagagaaagcgacattttgaaagtgttcttggttgacactgaatcaagagaaagcaagcttatcaggatccaagatattgccgagcttgacggtggttgggttgagcctacacagtccgtgaggttcatccctgccgacccagataagggccgaccatttgatggatatcttgacactgtggttcatgagggatacgaccatctggcttactttacccctctcgataatccagagcccatcatgctcacttctggcgaatgggaagttgtggacgcgcctactgctgtagacctgactcgtggtctggtgtatttcatcgctactaaagaagcgccgactgaacgccatctataccgtgtccgcttagatgggtctgatctcacgccgttgactgacacgtctcaacccggctattacagtgtctcgttctcggatggtgctggatatgcattgcttagttaccagggtccttccattccctggcaatctatcatcagcaccgaaggtgaaaagacaacaacactcagaattatcgaggacaacacagatttgtcaaagttggtggctcaatacgctttaccaacagagaactaccagaacatcaccattgatggcttcacgctgcaagtcgtcgagcgacgtccaccccactttaacccagcgcgaaagtaccctgttctattccacctatacggaggcccagggtctcaaactgtggaccgccgtttcaatgtagatttccagtcatatgtcgcagcaagtcttggctacattgttgtcaccgttgacgggagaggcaccggcttcatcggtcgagcagcacgctgtatcatccgtggcaacatcgggcactacgaagccattgatcaaattgccacggccaaaaattgggcacaaaagccgtacgtcgacgagtcccgaatggcgatctggggctggagctacggcggctttatgacgttgaagactctcgaacaagacgccggcgagacatttcagtacggaatggctgttgcgcctgtcacagactggcggttctatggtaaggcgctcaaacccacccatttcctacttggaccatgtatagtcaactaacccaaagcccaatagattccgtctacacagaacgctacatgcacaccccgcagcacaacccaacaggctatgacaacaccagcatatcggacatggccgcccttcataacaatgtccgcttccttgtcatccacggtgcctcagacgacaacgtccatatccaaaacacgctcaccctaattgataagctggatctcgcgagcgtccagaactatgatgtgcatttctaccctgactccgaccatagcatcttctttcacaatgcccatactatggtttatgaacgtatgtcaccaattttctatccataacaacccctgcccttaacgggttcaagacttcagctaatggttgattgtaaactaggccttgcaagctggcttgtcaacgcgttcaatggcgagtggcatcggacagcaaaccccgttccagacgagtcgatgttgaggcggcttgcgaagagggtttggcctggttttgcgcattgatttgctaaatattggaataggatatctaaacgtgtatatgagtatgaagccggacaacctttaagctttgctttaacagtgatcgttttttacgaaggcgttctttaggaagcgtttcatgtttgttcttaatcttttcaaaacaaatgcgtaacacacgcggtctatatgatcggcaaagtccctaagagagcactatcctcatggcttgaacatcgagaaataactatgtgcaccctccagcctcaagaatgctgtgtatcatcttgttgtggctgattgaatgccgctactttaagggctgctccctcactcatacacactcatgagatgttctttgtgatccggacaaggaggaaaccacctgagtcagatccatcacacttatacagacggagtacacggtatccctcctgcaaacgggtcagtctaatgcaggcccatgaagccaacgagtcgaatccgatttcgtcatccttaaccttgaatctgcagcatagtcagtaaaatagtcaagccatattgcaagtgcaacaacgaacctgacaaacgtcagctcttccactacaccaggcagcgtcgggaactgcagaatctgtgatccgaaatccgggttgacgccctccccggccttagtgacgcgcttgtagctcgtcttctcagaatccgtgctgtcatcgcccttgagcccagggttcgccgcatcctccggtgtctccacatgcacataacaagccacataagggcggaatcccttctcgttcttgtctcccggtggtagtgtgaggtcctgacctgctagaacctcaattgagaggtcgacagtccgacgaggaataggcgcagactctggttccgtgcttcgatagccctggggtttgaggatccaaccctgttcgcctgcaaacattccctggtttagcatcatgcctttgtcggagttctgccagttcagggctacgatttgggcaccgcggcgccagaagaaggtaggatcgagattggaggagttaacgcggagaccatagggataaacgcgcataaaatacttgcggttgtgctcaaatagctccttgccgtatttctcgtcggcttggcgggcagctcgctcggagagagagaacacgtggccgggaactttggcctctggttagggttagtatggagtttagagtcaaatagagggatgccgtaccgggttggctgaactgcttgaaactaaagcccttggtgaagatcgcatgtctgctaagagaatggaggatcttcgacggtttctgggctgcttgtgaggcggactgggatgatgcaccggctgatttggttggggccagctgctccaggtcgtctgtacggtcatctacatcctcggcgttttcagccgagggcgagacccatttgacctttaccaagatctttcgtttcaaatccctaagcggtggtggcgtctccatggcctccatctccggtgtgacttgaatgagcatcccatcaaaagcatcctccatgatctccaccatggtctcttgctgctcgagtgacgcatgtacttccagactcacaataacaggcaggtcgctgacgatgaacgcactatcgcggatcgcgtaacacacttctcggaatgtagttcccttcgtaagcgtgtggccatggagcaccttgggctccagtcgtatcggccctaccttcgcaggttcggcaactttgccatcatccgcagctggctcgctagatggcgacttccgcccgaaaatgctacctaacttggatttaaccgtcttctttct

SEQ ID NO: 12201 - DNA, 150 bp, Emericella nidulans
  unsure (1)..(150): unsure at all n locations
ctattctagaccgtttctgagtcgtctncatcgtttgaggcttcatacatcatatcgtaactgggagacggagcatggcaatcgtcttttgacagaggtgaaatacttccttgagggtgtggagcctggatgccgcatggtattcgggct

SEQ ID NO: 12202 - DNA, 2723 bp, Emericella nidulans
  unsure (1)..(2723): unsure at all n locations
atctcgacatgaataaccgtcaccctcaggcggctcggcttacgcagcgggagagctcattaagaaatcgggtggtaatgtgctgggatttgtcttggtgggctaactggaattccgtgacggccgggacaagctgtctgcgcccgttcacaccctgctcactggccaggaaacgaaagcgtaaacggtttttttttatatgatctcttatacgatttgcacttttatatgtttacgaagtccccagcttccgaaaacaaaaagcatcgacaacggcccggacttgctggtttcgcatcgctcgcagttcctggttgccatactctaaaatcaaccgagcgtctgacctgggcggccaacaattgcgaattgggccgcgtcaacggatagaccgcattatttagacagatcacgacccgctggcggcctggaagaggacgtgatttcaacgctggggatatcagcttagggctcctgttcttaatgacgatagactctgaataccaaacatttgtatagcaagttaatagtctccttaatcagtaatgcaattaatgacggccactctattagtctagaatctactccaacggaatagaaggtctcataacctcctccgcccaatcccttggaaacccaagttgtacagcctctccaatcgccctattcattcgggggatatactcctctttcggctttccgaccttcacccgcaactcatcaacatataccaacaccctgaccttcccgccaactccctgcaacccttttcgctccctatacccctcatctaaccacttcacaactctcgcgtcaacataccacttattataatccccagcctcctgctctttcggcctaatctccagcggaaccttttgttcttccgtggattcccccgctaaacaatgcaccccttcatacctatccaacaccgtctcatcctctgcactcatctcgtacaaaaccccgtaaactcctccacggggtatagacttcgagatcgactccggcacgttgtcgccctcagtgatttgtggtcccacgcgcagcccgcgggaggcacaacattcgcgtaccccggttgacaaattagccagcgccaggagtctagggctgccagggcgacggggtgccctgagagcgtggggttgtgaacacagcgcatgcgcatctgcgtgggagagagattggagccgtaggcgaagtagaggtgttttggagcgttcttgggtgctgtatcgggaggggtatgctgtgcggatgaggggttgatggctgttgttgccgtggtcgggatagtttggggaattaaaccatcctgctggttttcttgttgaagatgcattttctacgtttttgatgtgccagttgaagctgatccgtgaagaagggtgtgttcctgacgatatcgagaggggaacaaatggtctaaagatactgagggtggagaacagagagtggagtccgacgatggcgaactcaagagtgtgatctttggttccgatattaatactcctgggagatgcggaaccagcatggttcggatgaacgctatatagaacacatgtacagactgaaattatgtagtctagacgatgaataaattagaaatcggcacgccctgcgaccgcatcgagtatcttcgtcggatgcctacaccccgcgcctgacgcagaagctcgtacgtctcgtctccgcctccaacgagcaccatgctgagcagatgccgtcgcgggattccaccagccgtcacctgtctttcgtctagctgcgggcgcacaaggtacggttctgcaagccttgctgcgtatcccagacccaggttctggccgtcaatatgttcttcttcatcgtacgagacaacgatgacgagcttcagtgcattttttgacggtgggtgcgctgcaatatttcggagtttctgtgagaatgtgcaccccctgcgcttgatcacgagtacttgataagtctgcgcgacgcttcggaggatgcgttgattgcagaggtcgtcggccatgtagatgtcagaccagggaagtcggacttgcgatgtcccaccgttaattgacacgagtggtgagtcgtccacatcgggcagaggacccgaccctaacccggtcgacacggcagcgggaataggaagacgggtcgggcgaggctttgaaacagagggtgccggtgtgtaaatttggtttacctcatcttgaagcattgacgcgaccgagttaaccagcgatgataaaacgttcctcatgctcgaggtagatgcgtctaccggtgctgcggctttgtcatcgtctaccggtgcattggcattgatgattcgctggtgggctccagttccggatgcagcaggctctcgaccatcatcagaatcatttcggcggccgagattttctgggataatgtcaatgatcaagtcaatcatcgcgggatcgcgaactcgtgtgaagttcggatccccagggtccaggacatcaaatgtgatctcccacaagaggtataccttctcatctttccctaggggtacgccgttgatcatctgcactctgaattcacttccttcagcgctataagacaatgcgtccttgatcatactcatccgcagaccgccaatacttttgacaaggataccgtcctgaacgcgttcagcgacctggcccatgagcattcnggttcggctggaacgatttattagagttgacgattgcctgagcagc

SEQ ID NO: 12203 - DNA, 1594 bp, Emericella nidulans
ccgagaattgccatcggacgctatgccaacctccttctccagcagctccgcgtccatccatgagggtcgtctccagaattttaagaggagactgcttactacaacggagacactggaaagcgccattgccgcaccggcagccattggcgggagcataaacccgccaaagggtaggaagagtcccattgcgaagggcaggccgataatgttgtaaccacaggcccaaacgaggttgagcttgatgcggttgaagacggaacgggaaagggcgagactagccgggactgagagcaggtcgtcgggccgcatgagtacgatgtcggctgcttccatggcgacgtctgtgcctgaggcgagagcgatgccgacagacgcggtggccagggcgggggagtcattgatgccatcacctaccatggcaacgcgatcgcctgtctcttggagggatgcgatgatggactgtttatcggaaggggagacggaggcgtgcacggcttcgggtgcgatgccaacagccgaggcgattgagatggccgctgcgcgggagtctccagtaatcaaagaggtcgagattcccattcggtgcagggcggctacagcagctacggcggttaccttgacggtatcttggagagctatcgtgccggcgaagtgaccgtcgattgcgacgtggatttgggtgatgccgacccgggaattcttgtaaccggaagcatctggagtcgtttcagctgattctgggacagcaacgctgtgcgattgcagaaaagcagcatttccaatcaggacacggtagcggacgcgttcgacaccggaagctggctcaaccaaggcagctatgcccttgccgatgcgagcttcgaaatcgcctaagcttcctggaagtccaccttcgcccgaatttcctgattcactctttgctgccaagtggattgccttgccaataggatgctcgctgttcatctccgccagcccaacaatcaaccaccagagtcgacgacgccagtcacttgaactccagtgaggctcaattctagcctcggtgacactcatctgtccggttgtcaaagtaccggtcttgtcatacacaacatgtgtgatcttggtagcagcctcgagtacagcaccgcccttgacgaggataccctgagtggcaccaacccctgtgccgaccattaccgctgtaggggtgctgagtcccagagcgcacggacaggcgaaaacaatgactgagatgcacagcttaagacagaccatgaccttacccccgccttcttttgtcacaaagatcttcggagggtgaggcagcaagtggctcacaaacatccagccaaagaatgtaaccaacccaaggctgataatcgatggtacaaaatagccagcgacgatatccgccatgcgttgaatggaagctcggcttgtttgagcgtcttgtaccagcttgacaatcttgctgagctgagtgtccttgccagtgcgaataaccttaatgtcaactgcgcttgtcccattcactgttcccgcaatgaccaggcttccttttgccttatgaataggcaatgcttcaccagtgatcatactctcatcgacatat

SEQ ID NO: 12204 - DNA, 137 bp, Emericella nidulans
aagccgaagcccgtagattgagcttattatagatgcggagcgctagctgcaatacagagatggcacgtacatacggtgtgcttgacggggtactccattgatcagtgtggtgtgctaataccagtctgcattgagcc

SEQ ID NO: 12205 - DNA, 2398 bp, Emericella nidulans
catatcgttgaaggaggggcttgcggtagtttttcctggcgcgtctagatcagcacgaagtgaaagacaataaatgcgggtgtctaaaggatgccggacgtacgtctgaagccatatggatctagcaggaagacatgccgttagtatagctccctagcattcaggaggggttaagggaagcaaggttcgtacacaaaagagagcaatgtggcaaccagtgaacagactccagcgactatcactgcagctcgagctaagctcgagcctgttccaccggatgatgaggctgttatcattgttgccataaccactcgcggtacggagtactcgaccgcgtacgctatcgcagctggatcagagcatggcggataacggagagctttgacaaagaggcgacactttgggcgatcgtagaccaacgaatcagagtgacttcgagacctggtaagatagaatatgcacagccagagtgagcaactggtcaggctgcaggaatcgagctcgaagtgccgccgtctagactctagagctccctttatccccaccgccttcggaccttctccatcattcctcccatatcgcggcgatcaccccagtgcttattttcctcgttcaggtctttttttctttttttttttcctcctgttatgtttggagtatagggctatctctgcggggatacgtgttccccgtttcacctttttggtcgcctcgaggaacgcgatctgactccggccgccatgttgaaggctatcggccgctctacgggtatcgcgaaatgtccgcttcatcattcacgaccttggctttgaccccagaccctagtttcaactggtaggaaatctgctgtgactgtcagacccgagctgatggatttataggttctttcttctccagatcatagtatcttgtatcctgtaagttggcgaagtctcctgcgagaatatctggcttaccagaaggctgcaccagtgtgcttttcttcctgctctactttaaccgtctcttcgcggctctcttatcgtacgggatacgggcatacacgtggcattattaccgcgcctatgtcgacatcaacgcgcttcaaatttccctaataggaggaaggatattcttcaagggcatccgatatcacggcgtgaacgagacgattttcatacacggaggatttctcacctggaacttctggaagcacgcagtgaggcgcacggatttctcgcgcaccggggtacaaaacacagaagatactgaatatgctggtaatagaaatggtagcattggcgagaaaggaggggtcgactgcccggccgccctcccttgtcgaatcacggctaaattctacggtttggaatggtttatatacaatcggacgccggcttatgatagtatcctcactggattcaaaacggcagcggcagcatcaactcaatcacctgactctgagagcgtattatcagacgcgagtttgaaggaaaaccaaaccgtcgcaccgtcttcaaacgagtcctcccctgaacaggcaaatgctgctgatggtagcactgctcgccatgggcgcaccatggaaacatacacttcccaagagggtgcacccggtgaacaggatactagggacagcttgtctggtttgctccagcttttgccggtaaaacttgaatgtgacaaaggtgctatagtaatggggaatgagaatacaagatcggtcttgactacgacatttgattctgcaactggtttgatcgaggcttgttgcgctgcgagcccactggacctttaccggcaagtgtttagcttcaaattcgatcatcccgttgtgcaaatgagacccaacccagattacaaacagacccaacttgccgctgccagacgtctgagcacggtacgcgaagaaaagcctggcgtgaagaggaagagagatactgttttcaactaccagttccagaagcgcagaatttggcactctgtccgtgatctcataccatactttcaaacctcagtcgagtcattccacgtacttgaccggcgcactggtcaggacacacggcatacaactaacgtcaaccatgacacacgttgggttggtctctcccgttatctagatcaaggcagtcaagatgatcactctgaatgggatgctatagaatacggcaggttttccacagttttggatagccctagcatgattgtcgtctatttttgggacaatcccggggttgtcaaagcacattccgttgcggaggggcctccacctccgagatcttcggacataaatggcgcgtctcccccggaatggggaattgacgtgaaagttgccggtggaatgataaactacggcccttgggctgatagagaacgtgtgggtctgcaaaatatcttctttcctaatgcctaccggaac

SEQ ID NO: 12206 - DNA, 943 bp, Emericella nidulans
ctgtctttttgtgaacaggggtgcgtattgcattcaagatggccggagcgaacatatgttatactaatcatagcagtctcgagctgcttactggaacaggatccgtgcgcttggtttaaagtcgagccggcaagagataagagcgagctaggcatgtagatagacggtacgcagtacttctccccggcagcaatcggtcgttcacagactactgtacctaaataaacttgacggctgtttaactgagagcagtcaaaatacggattcgcaaactttggcaaggacgatagaggtgaaataatacaaataaataaatataaatgttgaatattaattgaatagctaaatcagacggattggcctcaagtatattctgccatgtactctgtactgtgtcttcactgctccacacccagttgatggtaactagaataattgaggccaagagcttttcttccacaaagtccttatctgctcgcttttcagtggcgcttgcccctttctaatttctcatgcagagcgcccgagccacggattaattccccagctttcctacatttcagcggggtgcagccgagaatcgctctcaaaggttgctagcaggtgcccatacattcttttaatggacagatgggaatgagagccacagatggttcatgtgaagggtgtggggtttaattgtctaggggtctaaattgggttacccttttgaaatatccgtttgaggagccacaggggttcctggggggtcttggaaccagccccttgtaagtccctaggaaattcggtttaaccacaattatttagggagggggaggtttaagtgtttggtcaccactattttgtgtttatcccccccgaacacgatatctagaattttctttccaataaacaacggttttaaatattttcttcttacctctctttctcccaactatttatt

SEQ ID NO: 12207 - DNA, 640 bp, Emericella nidulans
cccattgctggtggttgaccgctgctgctcctgctgcgacaaatcgctgttagcagcaatgtgagggtttcggttctggtccggtggtcggatcccaataccgtggcgacgttacgaggtcaggggattgcatgatctaacaatgattgtgtcaccgtggacggggtgaccgtgcgaatgatgagagccaaagtaatgaaagatacgtgtaactcgctgagatctaaccactgttctgggagtctggacttcccagattgaggggccttgatttttgtatatgaaaaggtgacggtttggctacatgggtgctgcacgaacgctggcggtgatcgggatacacattgtgcagtgcctgcccgaggtggtacgaccgaatgcactggagtacttggacacttgagccgaatgtactggctcggatacctatagtctcattgccaagcttggacagcacgatagtgccgcagtctccacgtatgggtacgcacagacgacggaggggaccatcgcttgcgggaatgcatctatggctatatggagagcaccgaacatgctcacacacgggggctggtcatgttccatctaaaagtgaatttgctgttcagcttaattacataatgggactacccaacaaaga

SEQ ID NO: 12208 - DNA, 2454 bp, Emericella nidulans
accaggtccagcggtatggcagactggatgtccttgtggaagtcgaaaaagagtcgcgacaacgcggtcaccgaggcggctaccatgtgtggcgagctaccagcgagaccagcagataccattgtgaagaactcctcaattgtggcaggagcatcaggggcgtcatcaggcatatgagggacaagagagttccggatggtggtgcccggtgggttcagctcatggtcaatggtgcgtttcgcaagctgaatgagcaggtcaaacgaagcagtgcgggctttctcattactctctttgcagcccagtacaacctctgagagaattgaagggatgaaatggagatcggaagttgggaggtgtgagacgagttcatggatggcgagcatacgatcccggcgcgcggatgcaggtgtcttgtcagccgtagcaaggatgaggccctggagctctgcgttcctttctcttagcgcagcagctcctgtctcagttgtagctaagcgcggaattaacttgtaggcctttttgatgagctgctgatcggcagtgccaccgttcagaatcgctgctgcgagagagaagagtgcagcaaagctcgaacgaggtaggtatattgacattgcgatgacaaggtcaatgagtgtgtgggaagttggcggcattttgtctccggagtttgtaggctggttgccctgcttggctgcttcctgctcggaagtcaccgacgactcgagcatctgagtcacacgttcgaaggtatcattcaattcctgaacttggttagtctggaataagcatgccaaaaagggtgttactgaccttctcaggcgtgatgctcaaataagcattgatacattgcagaatgtagcctcggtaatgcggcagtgtctggctgtacacattgaaaagaactgccagcaagttgctggcaaatccggccaaatgcgcaatattcttcttagccgcctccttcgtaattctgcgctgcagaataagatcatctttctcattctccacagataagattgcctggttagactcaacaagattttgaagtgccttgcagatgtcaactcgcaggtcagtctgcttgtacagaatattagagagcagttcggcgaaactctggtcaaaagattcaatcaagtcaagcggaagctcgcagtatcctgggagaatagcccaggtttgctgaacaagggtttcgaagatcttcacttccacggtcttctccgccgatgcatactccatgaccctctggtaaagggcttcactgaggggaacgaattcggaacggaaatggctcaaattcgtattggtgacgctgtcgcggagtatcgggaggaaccacactcggcctggttggccagctttctgctcaatcagattaaggggcagaatatttagaacagcttcggggcccatggcttcaatagcggcaccaaggacattatccgcctctttcttaccttggaaagcttcgttgctgcgtaattctccaacggttttaacgatgtcgtctagaaagggactggattgccacttgaaactctcaaacatggcagcacagacattgaagacttccatccaagcggcttggtacttcactgaaagcaagtccttcgttgactttgcgagcttctctagagttttttcgtcatagacggaaggttcaattatgacactagccgggatacagttggcgacaaacgaaaccaggcactcagatgcggagactcggatattgctcgagggagatgcaagatagctggagatcatgttgaacagttcgggtaacttctcaaacgtgtcttcaggactgatttgcgcagatacatcgtaaccgcgtgacagcacggcaatccacggaggcagaagctgcgaatcattctgcgccggcttcagctcagagatcgcctcgagaagacggggaagtttcgacgaagtgaactcattagccatactggagaagataacctcaaacacttcgaaagcgcccatggtaatgtactcattggttgatcgggatgcgttcatcaacagctcacataggggctcgatcttcttgctcggccagccgcctgacgcaaccgccaccgtctttaccaattgcaaagaatggattacaagagggtcatggttctctcggttgtgaggatcgttgcgcccacgcttttgttttgacgcagcggcaatgctgtcgccaagggtttttagggccgattctgcgcacatatcggcagccgggtgatcgagagcgggggtaggcgggggtgtcttgagaaccttaataagggcatcctgcgccctctttcgcactttcgggcgatggtccacggacaaactaagtagtcccgcaatggcccgccggggaccaatctgggtatgggggagattccacgccgctgcatcctgtgcaatgagtagagactctaaacagccaatggacggtcggag

SEQ ID NO: 12209 - DNA, 459 bp, Emericella nidulans
atgcccaagccccgcgggtggcgccgcggcggcccgccacctgcaacgcacacttttgtgctatggggaaggacccgtctcccgtccccgctgccgcttaggcggggacagcggaagggctggggcgcaccaacactccaagtattgagcccgacgccacaaccactggctcacccccagctagccctgagaaggacacactgcattcgcacgcagctaagcacatggccacaatgacagagatgagagatggagaggcctcgaatcccgtggacgcaacgctgacgggcttgcgcgtgatgaactgccccgaccgcacaggtcattcagattcagaggtacattaccatcaccagggcgtgcacccaaacgccactgaacgccccggctacagcggcgatggtcctgctggtaaagcgaaacgaacatatgcaaactcccccggactatagcatcgga

SEQ ID NO: 12210 - DNA, 111 bp, Emericella nidulans
aagagaagtcactatctagggcctgagggctgacgtgtaaggtcttgggtatcatcctcgagtgttcagcgggcgttatgatcgtgtgtataggtcagtgatcagacagtc

SEQ ID NO: 12211 - DNA, 116 bp, Emericella nidulans
cgaatcggactcatgagcatacaggaccgtcaaggcagcacatgtggactcgagagagagggtatggaggaagccgaagagctacagggagagacttacagggccacaggagttga

SEQ ID NO: 12212 - DNA, 121 bp, Emericella nidulans
cgcatacactctataccgcatgggtttatcgtatagagggcgcaagtcgcgtctacagtgtgtgtccagaaatcgcagtccttctaagcgtatatacgctcttacatggcctagattggct

SEQ ID NO: 12213 - DNA, 594 bp, Emericella nidulans
ggtccttcaaaagcatggctatcgcccgtccagccgagtcgctcgtctcgctggggacaatctgtcttatatggagaggaagtttccacgcatcgaccagatgatgttctcgtggagcttgttcagaagagggttcgagcagctgaagaacccggtctgttccatgtcgctgttgatcacgatggccgtgacgctgtcggcgttgagctcggtttcctcgggccagccggtcacctgcacgtagcggaagccgtggaaggtgaaggagggctcccattcttgctcttcgccagagagcgtcaggttgtcggttgctttggcgttgcggagagggcgcgttgcgacttcgccgttttccatcactgttcacgttagcatctacacatccataccgcaagagaagaacgacgggataccagaccttcagtatgaacaaagctgattgtgctttctctcgccccttgacacgcacacgtagccagccgacgaggtttctgccaaagtcgaggacccgtttgcccgatgcgctcttgaagacactctccagccgttcgttcttcactccgtgcacggcgggtgcatctggcgcaccga

SEQ ID NO: 12214 - DNA, 3336 bp, Emericella nidulans
  unsure (1)..(3336): unsure at all n locations
gcagaagttcagagcgtggtgaggtaagcctgcactgcaagcggcaatatattctacatcaatatcaacgcgattctcatattacagtccacgatttaaacgttcgctgacacacacctgtagaaaacccattcccaccaactcttcttgcaactctcatcactgcacaatatatgcgcccgtttcaggcactaccgatgctcttccccccagtcctcctcttcaccagctacgcgaatgtttctggcttcaagacagacagcgcggggataagtgccgcctggtcaggtctctatctactgctcgcagggcgtcggagacagccgttcatgaagaaatggggcgcgcgcggcatcacgcggggggcgaccatgggattgtctctggtcaatatggttggtgggggcctggcttacacattgggaaagagggaggatgaggatgatgattgaaatgagcattgctagtgcagcctggagtttcccgactttacgcagatgtacgatggacagatatatagtactagatggtactgggattggagcatgcttggtgtttgggtattgatatttatgtactattaattatggaagagataaataccatgtctatgtccatatcgagcggtttactcttggtaaggctgctccgacaaaatgaagtctcggacttttcctggtaccagccagtcgaggtcttgcgaatttgtctgggtagcttctcgtgccttggtcgaactcacggcttgctcaacttttcttccctcgacaagtctaatctgctgcgcccattcccgcttagccccctcgctctctcgccctccctgggctaagtctgcaaggtaggcctcctgctcagctttactaccccatccatcgtccgggcgtacagttactcgtagcttatgcttggacaggaacggctccaatggcgcaagggtatgctccggcgggtaatacttggtattgaggatgcgaattagagtatcatagccggtaaggtggacctgctgggtgctccgaggatatacattcgcagtctcaattgcggcggccttgtccacgaaatatggcttctttgtttctccgatgtcgatgacaggaagctctgcagctggtatttccgattctaagaacgccaaagcctcctcggcgcagagctgcatcataattaagcggtcctcgaaagaggccggtttagagggcttgtccgcattttgggttgcgaggaggaggaggatgcgggaaggctggcccttgttctccaacacggcagagcacgcaatgtggctatgggcgcgcgttggggggttgaaagaagaatccagaacatagaggacctctgcagttgagggtacgcggggttcaccgtagtcgcgggatacggaggtgatgatctcaaaatccttggtagaatcgagaaagcgtttcaaggccgagctatattgtgctcgttgagtctggaacgacttggacgaagggtccattgttgatgaaaccgaagtgatctgtcgcaggtcgcagggtgagtcttttcatgcggggcatggagtctcaaccacaaaccttacctacccaaaactctggatccccgcagggcctatgatgaaatcgagacagaaccctggaagtggttgtttcaggaatgaaaaccagtaatgatcttctagcaatgatgttttgacagaatgttagctgaaattatcgatgagatcaagttgatcttaggtcatttcatgaactcatcgaaatacagtactcgctgcctgctcagtgccgagatccagaccgcactccagcacccccagcacccccaacagcaccacgaccaccacgagccgtccctctgctgtgtctaggcaccgaccgatatcccaccggtatcccgtgcgtggacatgtggaaattagacgccgaatgcggttctgcgattggacacccgcgggatgaagtggctgagctataataccatgaatctaaagtggccccagttttgacgcttgaaacactggcgcagatgtcagcactcagtggtgacatgggcgaagcgccgagatccatcccgtcgtcaataacggacagtgtcaggccaggaacctatgcaggaacggagaaattagcgagcgaatctcgaggtcatatattatctatcttagtgtgacagattggccgtcctggcatttgtacacagcagactcaccacagtgttccccactcccgatacgcacggctgattgtcacgatgatcgacagtagtcaggtacctgcagtcgatctacgtccaagaccgacatcagatggcttccatagtagacaaaccaaacaagaaggatggatgtatcatccctagacgtaattcagcagcggtggcctggacgtcgggtgcctagacctgggagatgagctgatgaagcacggtggagctgcgatggcgagatgaaacagactcgcccaccttagtctggccgcctgctcagtgttcctcagtcacagtcacggcttcatggctgtcccagcacgacagcaccactcaacagccttctgtacctggacagagtcgcattggtgattgtaccagcatggaacaagagaggtatcaaacaatgatatagtatcggtctattaagcattactactggatatactccggcgtaagacagtgcgccgtaatattaaggtctgcccattggcgtctcaggtctggccgtctccagatttaatcaaacgccgcaccggctctcttccctcttcttctccttcttgccttcttttcttccccttcttccctcctcatcggttcgagttctctctggtagagcatcctctcgcttcactctctcagtgtcagtgacacgttcactccttccagtcgctctttcagcttcgtttagcgaattgacttcgctctctctctcactctcacttttgctctctaccatcggacaattaagccgctttctagcagaagacaatgcgttttgtccccaacctctcagtcgcccttctgggggccctggccgctgccagcgaggctgcccacggccaccgggctcatgacaacctccttcaccgtagggctgtcaggcctcccagcggtggcagtgagacaactacaacgccggctacaacagactatgtgaccgtctacccgaccccggcctctgaggcttcatctgagacggcgtctgtgccagagctgcgggtgtcttagcctctgacgagantcccgtgccctctgctcctgctgagagcccgtggtctcgtgcccgccctcngctgtagccacctggtcctgagagacttctgtgttgcagccccagtctctgcgctggactcc

SEQ ID NO: 12215 - DNA, 4708 bp, Emericella nidulans
agaatcatatactcagccatattgtgacactgtgttagggcttctgaccacgccggccgaggaacccagcgattggcctcaatgactaccctatgcccatccaccaagtgcacatgaagaatgtcatttccgctgtgcgttctatcattgagcagaaacgatcggcgagggccaccagttcgtgtaggcggaagggtaacctcccgatgcatgcccttgaacaacacattgcccttggtgccgtaggtgttcttatgcccctgcatcgtcttgcttaaagccccctggcgctctatcaacgctgcgactcgaggctcattgtactcgtcgattaataccacaagagaccggaacggatcgacagtcacaggagttgaaaccaacgagccgaatactttcgtccggtggtctacaagctggagatgctgtgcgaaagaccgcccatccggtgccggagtgaaatttctgattatcagtgccttgaagtcaggcgtattgtccacgattgcaaatgagcgctggtccggcgaaaccaaaagtgttgtgcggtcttgccttgtaaacggaatccgttgaagtgcgttccctgtctcactgtccaagatgtgtaggatgctgctccggtgcaacgcgttatggacgggtataatgcccacgagaacctcacggcctgcaagtttgactagggcagagtggttttcggaaatgcatctgcggccgaaagtcccaatatgccaagcgtcttcccagttcgcattgtgcaatggggtctcgtacagtaggacaccggagctgttatcaaggactgcaatgactcgatcgttcacgtagtacgctctctctgcaccaagcaacactggccatagtattcggcagtcacctatcggatccatggcaactgtcgcaagctcgtcgcgcctccacttgatctttccggtcttcaagtcaaccaggaagtctctgtcattcaatcagctcataaaatccctcaacctatccaaatgtgtgggcttaatgcgtacttatacgtcccaatcattggcaatgcccgaatcagaagacaaccctccttattcaaacgcagacactctatctgggcaagatcctcgtcctccttcagctccaattccaatgtctgagtcgggtggagtgacccgtctgtacggaaattgaggttctgccagcgtatacggcgcccatcgtaccaggctgcgtagtcccccgctacagtaaaaagcttcatgtacgccgagattttgcgcccggcgctcgccctgccagcgggaaaggttgcaaatggtgcggcctgctctttataaatcttgactgacacgttttcgtcctgtttaatctctggattccaggcgtcggggaaatggatgcgaagaccaagggtgcatatccagagtcgcatgagtttcctccaggctttgtcgactcgctcgcagcgaacaatggacacaggatccaggtgctcgaaaataatactcgcgcagtcaaaattgagacagcggaatggatcggtgcagctgatgtgggcggtatacttttggcagcggcgttttcgtgatgcaggagcagacttaggcttgtctctcctattggtcagggagacagcttttcttttcggagccatttaatatgcttaggtgtaagatagagggagaaagacttaatcaaagattaggatggagtagagactttgtaagctgcgtaagtgatttccgactcgagccatctgctataaccttaatctctattattgagtcctgctagaacaatgagcagaccatttcctttattctgcatagtgccgaaacacctcagacattgctttatttggtacaaggatgggtaggaaaggcacaaagagttgatcaagcttgcggagattgttgatcataggcgctttgattgactgttaaccctatttcatgttacggaacatgcgcgctttcaactcctcagtttccagagaagttccggacaactagtgggcgctgtacaaagtaagattggtggtctaggataatccaccgtctttagcctcaaatctgcctaaccttgtggataaagactagtcccgcatcagcgacgagccagaatacttccaccatgaagtgcccattttctaaattccaatacccaatgaggatctttctcaaatatatacgatggtagtttgacccagttggattatggtgggtggtgaacagcaccaccataccagttcggcagccgtgtggtttgccagcaggaaccgcatgaattacgtttacaacatgcatcgttgatttccatggtataagggttcaagtgacagattcctgttccatttctcagactaccctgagatccttatagcggacgtgcacagtcttcagcctaaattcgcattgcccaacactatgtaaagtcaggggctggagacttggctccgaaaatgatcaagtcacatttggactgcggtgctttgatgcaggggaataaagatgctgcgatgtgagtttcaagagttctttccgacagggcctgtctgtaatccgtccttgtacttactgatatctgtccgtattttaagtcgccatccccaagaagctactgtgattagctctattcataagggtacccaccctacaagtacgcttgatgccggtttaagctatctgaagaagtatgtcaagctcgtcgacaagacgcataagccaatcttaagcttgcgaatgccaaagcttcataacttctagatcgctggcaaggtttttgaaatctgagatgtgccaggtgcataggaagggcttgattccctagtacgtactaggcaacgatacagttcctcctgtattacgcagttcagcataagacggcactgttcaatatggttgctatgtgaaagaaacatggaaacccagaacgttgtcttaaaacaaaatgtaagttgttggcatataaacctgtaagcaagaattcttagctacagtgaagaagccagcgagcgcaacacagaatgtcgggcgacttgaattatgcagctaatatcctcggttcctcacatagcctcaatctgcgattcctggtataataattagtgggaatccggcaatcgcttcaatattgccgctctgaggctgttcacgtcgtccacgacttcaatgccgaactttttgcacacaatttgcgcattgcctctcttccaatatccctccggacaagccacgatagctttccccggcacccgtgcacataacccaagctccaacaaactgatcggcgcttgcgttgctgggtgaaaataaacgacaacaatatcggcctggtcctgtttatccacctctactccacttgctggcggtaaggagggaaatcaatatcctcccgccacgagctatcccaatcagctcgatatgggttatataaggtaaccggtatattggagagcgaggcatataacgagtcccgtcaattattcgcgtcgactttgctggtctttccagcaagaaagacggaaatagtgccgcggggaggttcgtctgaaagtgcgcggatgatttgacaccgagatcctgccataggggaggaatacaacccgttttgatgtgatgcttgaatgggataggtgctgtataaaggacggacaatatgggtcctaagcaccaggctaggtcgtttgtgcgaagttttctggggtggatgagccttctctctaggcaggaagtgggcaacaaccttcagtgtttcagtatcgggttactgcagaacaatatacacgactggcaaacctgtcttattaggaaatcatgagaggtctatcaagctggcaggtatcatacagagcatccctcaggctgaggggaagaggagttaaggacagttcccaacggcaagggcctaggcccgtaagtctgccacgccaaggcgtgaataaatgatgcaccggaaaggggcagccagaggttttgtattggctacaatgggagcaggataagcttgaatgcgtctagaagtatggaaagggcgtgcttcttatcctttcatctgaaatactgcatcaattaacgagtcttggcccattgcccctacgtcttcggcttaccactgaaattatgtctggttgtactatgtataaaatagcaatatactactgttgcttgaattagcgtacatatactggagtcgacgggcctgaaattatttactgaggttgtctttcgtgcagcaaaagtcctcaagatagtttattattcaggcatagcttgttacacagcctgatacatattacacgtagtgccgtaaatgctccagaggccgagaagtttttccactgatcaagagagacaagccttttttttacaaagcttagcattcttcgccttcgaacgggcgcgggatgcgttatttgcaatgctttcattgacagaaaagctcttatctgtagaggaagctccaatgagtgggcgaagtacaccggagagaactctagttttcttactatagtgatgtttaaagccaacatgcaaatttccggagttgatggatggtggatattgaccctcctaaaatcagagcagaacaactcccaattcgcgggaatgtaggagctctatcaggtaccacatcttgcaatcttgatctgatctttataggttgctgggaaattacgttctaggctcagaacttcctgagcgccgagggataaggtctataaaga

SEQ ID NO: 12216 - DNA, 937 bp, Emericella nidulans
gcgaataattggcatccttctccaccgcggacggccgcatgtctatttttggtctattaccccggcgttgactgcgattcacttcgtttccttctaagtcaaggaagtgcggcatgtgtatgtcgcgcggcagattcccagactcgtcggctttgagatatttatccaatatagcatccgtcgcatctgcctcagatatacgttctccccgcagtttcttaaatagtctgctctggaaaaaccgcgaccagaactgcgattcactcagcttcggtacgttctcatcatacacccgtttgacgagcgggtgctgattaaaaatcagttgtatctgctccttgctgatattcaactttgtcacgttatcttccgtccgtggctttagcgtcgaccaacacattgtaagagcctcgggtctgcgatcgctcaatagcatgcgcgcgcaagagatggacccctgtagaccagaattgcgaaatgaactggcttgccgacaatgtctacggttttggatgcaaagacttcataaaccatccttgtagattcccatccagcatcagcagcgactggtgcaatcccaaatgggttattaacgtttttatttgcccaacagggcttcctgatcctgtgaaagaacgccttgccattctattacgcaacaggctcttctttccggtggtaaactgccccgtttcttgggcctttggccttaaaagtgcctcaggcaatctttaagcctttttagggctctcccacgatataataaattctttccacctccaaggttttaggttgtaaatattcctactcctactctagggggtggagtagtttctgaaattctctaggatttcacacacccttataccaacaattttttatcccccttgaactaacctcgctacttactgtgtctttttttaacccagctcttaca

SEQ ID NO: 12217 - DNA, 979 bp, Emericella nidulans
tgtggacatactcaagccgactccaggctttggggtcgaggtgaggatgtgctcatatctcggtgccgcggatgagtacaagcgcacgcgggtaataactgttgtggttcgggggaagaggaaccgggtggattgacgggcgaacatgatgttgtatgatgtgagaattaacaggattaacataaccaaggctatggtttgaagctttattttcccgataacgaaatcaaggtgtcaataccccggattcccgcaatcgatgcaagccgcgctatgtgccgatggaaaaggcttcacgcgataagtgtcattacattaagctattaaacacttgcttagcgaattacctggcgcaacaatccgctgtggctgtaccgtcgagcacagatcggcgcctatggtggctgacaaatgttgtctatcagcctgcatcatgaataacgactaccctattgactttaggatctctaatatttgagctgacacgtcgccacttttctcgtaatggtcgtatctttatactttatttgacattctaaccccccctaaagtcagtcttcatccgtccagacgtattttcgcgttacttagactgaactcgatttttattgagcctttttccaagcccccttttttttggaaaattttttttcttggatatctgggaattagacaaatatatagctcatatctctaaattttattatcttttacttttaaagaattttttttaacattgttttttctcattttttaactatatttctagttttatattatattttttttcttattatttatatatatttatttttaccttatcttatctcttttatccttacttttattcttttaattttacttttatctaatttttttctttatttcacttttcttcatatactatgcctttactacttatttcactactttactatttcattttttcatagacataatactttatttaatgtttttc

SEQ ID NO: 12218 - DNA, 1081 bp, Emericella nidulans
taaaggtccccaggccacatctcctgcctcgactctactgctgataacggccgccacccattttcgatcgctgatccgctttcggttatgcacctgattgactccctggagggcccatcatagcgctttggcaccttcccagggattgacaacgaacgtcgccaggctaatcataaacacacctagggcttctcccgtgcccattgatatgaagagtcactgacttccaaaaatgctgggcagcgttgctcccctcactctcttaggggtggatcctaagcccattctctgtcaactggattggacatgggaagccaacccccagccagttcaatttcttgcagctgtctcagactctgcttgtcatattcttaactatcgggctcacttacttctctacccggattaatgatttcctcatgggcctactatcattgccccatgttttgcctctaaaaatgtttaggttctcacctcgttctcccatatctcccttgtagactcttttcctgcaaagtcccccctcagccttccttttctctaagggatgtcaactgttactcccgcccaataaccttctgttaatcttctccctgctcccgtctccattccctgtgtccctcctgtgctaaccctttcttctctctcttacgtctgttacctctatctacttacacctctttccttaaccttctatccttctctccatctctctactcttctccctctgccagctatttcatcccctcttcactctcttatgttttccatcattcccctttccataaccttcatgcttcaccctcatacctcccctttttcctcgaatttctttctggtgctttactactcttatctggtccattatcttatcgtccgcgaccattttatcctctattctcttctttctcacttctgtttacacctacctctcttctcttcacgctatattctctaccatatttcccgttatctttgccctctctaatcttactccctaattttccctcaatttagtccaacttctcatcctctgatcttccatctcatatccaattgtgttactccaatcatcgcactg

SEQ ID NO: 12219 - DNA, 3451 bp, Emericella nidulans
ctacatatcaggtgatgtatcatttctcagcgacaaccccggccgccaggagatcggcagtttcaatcccatcacggacacggactggaccggtgagtttttttcacaatctgtatgtttcgaggctgacaatcgacagaaatggcctacgtgggaaacactgccggattatgtcaggcaatcgtcgacaatgacctcgaagaggtgcagcgctggctcgctcagggtgagattgatgtaaaccgacgtgaccatactggacggacaccattgcatttggcctgcatgacgtctacgcctgaaattgttcagcatctcgtggacagaggggcccgcctgatcgctcgtctcgcagacggacgtacagcattgcatctggcagccgcgcgagggagcgtcgagattgttcgcattcttctgactaagagcgagcagaacgaggaggaggagtctcgaaaggaaaacgctcagaaagcggctcgcaaggtgaagaaagatgatgcctcggagaacagcgacgaggaaatgtttgatgtttcatcagatgaggaggactcgtatgcccattcaaacacaacaggctcattcgtcaaagtcaagaaggaacaagatgacgaacaagccgttgcccccgacgacgctgacgagctcgacccagatatctacgatatcaatgttttggcttgggacaacaaagcatcgcccctccacctggcgattctgaacggccatgtcgcagttgttgacgaactggtgacttcattcggcgcggatgttttgcttccggtgaagctggtacacagttacagcaactccccaagagcagctatcttgacgctcgttttggcgatgcgccttcctcttgacgctgcaaaggccatgaccgagaagcttctccaggtcggggcatctcctgcccaagcagacataaaccaaaaaaccgccctccattacctcgctcactacggccggcacgagctcctggatatatacaagcagtatgaccagcctgcagtcgaccgggcgatcaatcatctttcgacaacgggctcatactacagttttagcgccgtatcaccactgacgcatgctattacagccaaagaccgcacgaaggttatgaagctattggaaatgggtgcccatccggctatcagtttggaggattatttaaaagctgccaagtctctggaatatagcctgggcaaccacccatccgtggtagaccacaaaagggagtttgagctgaacattttgcaacccgtgattcttgcaatcgagctggatatgcctcttgtggctgcggacgtgctcgctcgtggcgtagacccaaataccctcaccagagacgggtatagggtgctcaggaatgagtggtcgcggaacgacacatccggctcctcgctcttggactatgtccaggcaaaagttacggccttgcgcaagtacaagggcgagaaggtctgtgcacagaagcccatcgagttagaccccgacgacagcacatacctccaaggcctgcaggaagacacttataagatgtggctggcgagggagtcgctgcgtcagaagagggagagatttgcgaaagaacagaagatatatgaggatgacgtcaaagagaaggagaatggcgagggcatcgcagagaagaaggccgccattgaggctttgttggcggactacgagaagctggaaacaactttgctttccaaaggcgcaaagactttcaagcagcttcacccggacattgactaccctctcaataatcctcgacaaagcagaccgtaccgcagtccccaattggagccctacaagacacactttggtttccatgtggaactctgcacagacgagataaaggaaggctatctgcaactgtaaattttactcccatgaacagacatgaacaattggctaataactttccagatttgaggccgcttgggttggagacatagaaaccatcaaatcactcacgttatccaattggggaccggaaaaccaacagccgccgctcgagattggagtcacggatctcagcaattactctgctttcacgcttgcagtgatcagaggacactatgaggcggcaaaggctataatcgccatatcaattgcccagttcaagccaggcgagcaacagaaaaatacgcgttatcggattgcagatattgatgaggattccgatgcagactcggaggatattgaactggaaacccatgttgtcgatgaccaattcactatcgaggatatcggcgagaagaagaatcaggtcgagagcaagatcttaccagagacaatactccagggcacatgcagcctcaagctctttctaggcggaattcaggaactggataatagacgcatcagcttattggagtatgcaatctggaaagacgacatcgagcttctcaaatttcttatcacacttggccagaaattcagtgctagaaagaccgccaaacatcactccaagatttatagtatctctcaccacgatttcaacctggcaatgagactcggacgggtccggttattggaggaaatgatcaagcgcactggcgccggtcttcccattgacaagcttgccgagaatagcggtgttgaggttaaagagaagccaaagtattatcagggcctttcggtacacggaaagaagcgcgcggactgggctgctgctggcggaggtatgcctgtgacgcgggccattgatatgagccctccactcctgcttgctgccaggaagggaaacctagcagttgttgagtggttcttgggaactgcccctggacgatactacaccgaatttgccaggacgcataggaaagacccgaggttgagaaagctttctatgtccgcaaagggggcggaacagtcgattctggagtggctaagctcgagacgtaagtcatcaccatcatcttcctgcacacactaacaaagggattacaggcgatctggtcctgcactgcgccatcttgtgtgatgatataacggacgaatccaacgcccttgtcgaatatctcgtcaaaactatgccgcaatgtctcgaagtcagatctctagacgactacactcccctcggcctcgccttccaaacgcaccatctgaccgcagccaaaattcttatcgctgctggcgccgaccaaaccgtgcgctgcaaggacggcatgaacctgatccacctcgccctttcacccaaacgagctcgcaaagaagtcacactatccgacatgctcagtttgatcgaccctcgtctcttcccctctatgctcacagaacgctgctcgtcgcaccagggctctctcaccccgctcgcactttggatgacaagacaccaccatagcgaccgaaatgccgaacgcatcctccagacaatccttgatcttgccgagccaactggccagaaacacctcgagctccttgatggctcgggcaacactgtgat

SEQ ID NO: 12220 - DNA, 467 bp, Emericella nidulans
ggaggaagcactatttgattggcgttgaggtgaaactatccgtttcgggtaataaaaaaagttgggcggcgttcttcgcaagacctcttcttgagtctacggagtagctcatcgccattaattaatccccgcaattctctttactgctgcggatgatagttttgactcataactcttcaccttgattttcttgtttgtccattacgcacctgtttgtgtgactcatatgacagccccttagcttgcgtctaggttcatcctccatcagccaaattggcttcccttcggttaccagcaaggctgttcaatcaagcctctcgtgggccagccctgctcttacttcaccgtgccgccatccgtccactgttacaaataaaaggaggccttcgcaaaaactctacagctcccgcagcctcgatagtccgctccctcaagccctccgagaaagacaattcgaaacgtgatcg

SEQ ID NO: 12221 - DNA, 799 bp, Emericella nidulans
  unsure (1)..(799): unsure at all n locations
acaaacgccttcagatgcatcgggcaatcttaccacatttcggaccttttcactcttgaggatacggtctcttcggcctcgtgtcatgcccgcaacgttaagcagcttggtgccgttgatcatgccattatctacaaaaattagtccagatctaccacaaacgtgccgagtctctcaccttctcttcgagcaacgcagacacccttggcttccacttggtagcagagactgccttcgtcttcccacagggtcgcggtaaccctaggcttagcgccgggaggcgccatctgcccagtgggatcgtatacatacccttgcattggtgttccgctgttgtttccatatccgtgggtgggaacagggtggttggtgactaggaggtcagtacttactgctgacaatgcgtccgcgtacttaccaggtaagggcagtagttgagcagggacttgactgctaatcgacgtcgtcggcggcgggacagactgagatgatgctacactgttgggataaggatactgggagtaagagctggccggcccgtatgtggacgtcgggttgtaacacagggggttggtgcgggtactggtaatgggtcaatgctccagcagttgcagggtgggacgcatatgtctgtcccgacgacagatgcgaatgcacatccatgtacggttgaggttgattcatgctggccatctggttctggnggggtagtactctcggtgctgggttctgcgatgctgtattctgcgagcgaaaagtcacagagtcgtgttggccacagcggattctgagacatgcg

SEQ ID NO: 12222 - DNA, 3101 bp, Emericella nidulans
gtcggcgaattaaccctactaaagggatcaagttgccataccgtattgacatttggccttagtctcagcctgtgttcgtttcttaaactcctcggtgaacggcacgtcgttgaagaaaatccatgggtagttaaatttgtggttccatgtcctttccaagtcgcgcatgcttggaagcagctcgttcagctcttcgttccgcacgagggagatgatggctgcattggttcgggcggagttggtgctgtcaggagcgtagtcgtgttcgtcggcgcgccacagatagccatcaggctcaccggttgctatattttgaagataatgtcagcacagccgaaggaccgacagctaaacaagagaaaatggataggagcgagagcgtacgatcattcagagggtccgcagtcatgccgttgtattcgcctggccccatgccgacatatgaagggctcctcttcatctggaacaccagaaaaatcacgagtaccacgcatgccgcagagagcatgcgaataggtctagcgacagccatgttgactgtcctcagaggatacgacgaattgcttgaagatgagacataagtgaacagcaagttggagggtctcgaattgtccttttcggcctcgttgccgccttgtcccgtttgggtttagcgtggcaataatcgactaatcgggcaagacgtcaactgcttcgcttcacctttattcttccacttctctataacatctagaataaattatggggctttattctggcatcgtacagatgtaattatggcggctggcgggacctcgacaagcacaacggagctgcttatctctgcggtcgcaaaaacgggcaaggtacgcgtcatccatcgggactaaggcacctctaatagatctgtaggacactgctcatttccgggccctgaagcgtcgcgttgatgaagctttcaggacgtcgtcgcacgggcgaaccgatcagttcgctgtagcaaagcaactcgaagggctactcgaaaagttccgggttctaaatagggacgacttggccgaggcgcttcagccgagactcgctgaattggaccagcaccgcggggccgtgttcccagagatcctctcttttctactacagcttgccgatagaccggcccagcttgcgaaggttgatcggctattgaaactccaacctgagaaagaagaaaagcagctctcgtggaccgatctggatgcctccgggaccgcatactgcgacgaggatatttgggaaagcgtagactatggcgctagctcatctgacgacgacgacgtttcttcagtatccagcggtgtccaggctgctaggaactttactcagattacttcagaagatgactatgtgattcccgactatatcttctgtgcaggccacgatgaagaccttgtaaaatcgatcaagagcgtgcaattttgggaagaagaaactcagcgagaccttctagagtgcgcaaagctagtctccttcgaggtaaccgaacttcagattgtgagagaggcgattttcatgcttcagggcttaccaacgtctctattaaggcgcattgacggaaatgtcgaaatagaccggagatacactcttccacatttgtcacacgaagctctttcgtctgtcctgcgctcaatatgcgcttgtggaacgaaaattgacattctaagacgatttaccagaacgccacaatccgctgcttacatgcaaacgctccatcgcagcaccgaggattgcttacacaagtttgacaaatttctctcggagatgcagaacaagttcctttcaagggactcgtctgtggctgtcagtctcctgcagctgttggacgatgttcaacgcgaatcaaaactgctcactcttctggccgacctcgtttccaatcttgaccgaactgcggtagatagcgttcagtgcttggaccagttatttgacttagtgtgcatcacgcaagctgccggagatgacgagaattttgctcgcttagctgaaatcttctttgcctcgcttgagacctacgctcgtcctctttaccgttggatggagaccggtcagcttgaagattcatcgctgttcttcgtctctgcgaatcatgagaaaaatgacttgcggacattatggcatgactggtacttgctggagacaaaaccagagctggcgaagatacccaaattcatccgcccctttgcccacaagatatttatcactggtaaaagtagggtcttcttgaaccggttgaatctggcagacagtttagaagcaccgaggaaaactgccctcagttttgaggatatttacccttccaacttgtcttctacctgtctgcctttctatgcactgctagagtccgctctcaacgacgtcattaacgagaatcacgcattcacatcatctcttttgcgaaaggagttagacgagcgatgtgggttgtggatatctctccaggcactcgagcatatccatctctgcaaagatataagtctaatcgggccaatcgacaccaaaatctttgaactaatcgaccgaagaaagggcggctggaatgatcggtttcttctcacagaactcgcccaggatacattcggttcgctgcccatcattgattcatctcgcctcatcgtccgttctgcgaaagaccatgacacacgcagccgatcagtaaaggtactttcaagcctatctttcgattacatcctttcgtggcctgtagcaaacatcaatacgaatgacggtattgccgcgtatcagcgcggctcaaacttctgatgcaaatcgcaaggcaaatatagcttggaaagcagggctgcgtacctaaccacacacaatatggccagggtccaagggcaaacattagctcgcatttcgacacccactctttgtttaatggctaatagcctttacaagcttggattcattaccatcatcttaccgaatttttcctgttcacacttaatcagatggcgcctggcttatgaactggaaagatgccgtttcaaattttccgttacaggcaactaatctatctttattttgggtgtgcccccttaacccccatctccccaatttttggggccgggtttaatttttttctc

SEQ ID NO: 12223 - DNA, 488 bp, Emericella nidulans
  unsure (1)..(488): unsure at all n locations
ctctaggaacgacggccgatngagatcgtaggagtgcaccagtacctgcctggggctataaaatcttaccatctctcgaggcgctgacagagtggacagataatccgaaagcaccagggcacatctgcacactggcagggatgtaatgatagctctccaggtggactgggcctgacaactgggactgggaggctgattgtcatatccgacggcataggtgcgctaatcatccagagcgtaagcttcccggctgtagcgcactggctaggcagctgtaaatacgtaataattgggactgagcattgatggctggccaattgaatggacacgtttgacgcgtctatgtcaacccaacactcgggtgcgtgggatctatagctggctggtgacgcgaaacgtccaaaggcatcattgacggcaacggaggtttgatactcatgacgcatgcgagctctgtagatacatgctaggaaagatcaatggccttg

SEQ ID NO: 12224 - DNA, 503 bp, Emericella nidulans
aagctcgcatgggggtttatattttatatatagaactgcataatccattatcattatgcctggcctacataacgtttccatacaccctacccgatctccatgtatcaaaacaccgtcatgactgactaatattgacccgataaatccaggatataacgggcaatgctagtcttcaaacccatatcaagccctaacgccgaactccaataaacagggtccattcccatatgccattccggactgcaagactctatagtaagagacacagaatctgcgcctaatgctccccatgctgatgccattaaatgaacagatagatgtttgcagcggcgtccgtagcgcgctggctccaatcaaaggattcggtatcaggcgagacaacaccggacgtggacgagggggtcctcgctatcctgactcacactgatacctgtatcctctcgtggctacacggccgatgtgtggtgctgacgaccaactgtcccgtggcagtcccaggtctg

SEQ ID NO: 12225 - DNA, 3645 bp, Emericella nidulans
aatactacttcacattcgaattcataatgacaacgcaaacgggccccgtcatacctccccggccgtcgagatcgcctgccgaaaagaccgcagacatgccgaagatccctccccgtcctacccaccgcattgatcgcaccgcgtcccccatgggctcaaattacgccccttctccgttgaacgagcccccaaatggctcaacgctgtccaaaacagtctccaatgatatgcccgctcgtcctcctagtgtgacgataccgtcgctcggggaagaaggcattgaatatcaagatttggatgccttgaatgcttcggacagccataatactacacccgcggagacccggaacgtgggcagcgatctgaagctccacgcacctcggccatcgctcccgacctctagcgccaaggccaaggtgcaggccgtcactcgcacagattccagccaggctgtagcggcaggtttcggcgcgatcggctcaccggaacaagatgagcagcaggaacggtcttcccgttccatctactctgtccagggctcgcgagcagcctcttcaacagcatctttcgagcggccacgttcaattcacgatgaggagcatggaattcccgaaatcggccagcgtgttccgatgttagccaacgccggcgatgtacaagcaccttctcccagccctttccttgagcaaccgggttcgcggtctggacgcggccaccatcgaactcgcagtggccgggaagcttccttgcctcctggtagctacggtctccatggccatggcgttcctactaacgacaagtttgaaaaggcctggtatgaaaaacatcctgacgaatatgccaaggaggaacaagggcactacgggtctggtgtgggcacgccccgacctgattgggccttgagtagcgatgacctgaacaagatcgttcgtggctctgccgttactggcgcgggactaggtgagtctccgtgattgcgagattgaacaatgactcgtgctaacgaagggtcaagggacgtctcctgctataaccggtacgccggaagaagagctcggctacctcgcctctgaagaatacacccaacgcctcacttctccgacaccagactcaaaacgtgactcccgccctaccgtggaatccccactcaagaattcaagcgccccggccgcagaagcaggggaaaaagccaaggaacagccttcgtttatccacattgacgagccctaccaccatcgcgaccatcctgatggttttgctcttacgccggatccacaagaaattgccaataagggcaaaggagatgaggaggatgaaccaattttggctgctgatgaagtacgccctgaatctgcttatcagcacgccgcagtatcacctaccttcaaccggagagaaagccatgattatgaaggccggagtcgaacccctagcgtcaacgggagtcgttcaaacagcagaaccgccggccgccgtggcagtacacccgttcttgccagatataactctcatgaagatcacgcacctctcgaagatgttgaagagtacgagccattattccccgaagatgagtcgaaagagaacaacccaatgtctgcagcggaacgtttcaaaaagcgcccagacacgctcaagcaccgatttcctagtgaggatatctgggaagattctcccaacagtcaccaacttcatgccactgtctccaccccagatattcccaaggaaagccgctttgaaactccggagcaagaagaggcccgcaaaactcgcgagcccagtgtcgacagccatcaggttgcgcaacgcatcctgcattctgaagagccagcttcccgtccaggacttgcaaaacagaggtttcccagtcgggatatctgggaggatgcaccagaaagtcaaacattggtgacaacaatagagcctccagaagagaagcagacgagcccggatgtcccatccaaaccggctattccagcccggcctgaaaaacgacagcctccccaagtggatgtctccaccaaaccaacctcgcccgttgagaagcgacagccacccgtcatcccagatagacctaagccccaaattcccgcacgaccagccaatcgtgtttcacgttcaaacggtgacgaggcacaagatgcatcagtcaaatcaaaaccagctgttccagctcgcccaatagggggtaaaatcgcttcaatcaaagcgggcttcctatctgacttgaactcccgtctgcagctcggcccgcaagcacctccgaagcctgaaccaaagcaagaaacacctgccgaaaggggtccattaagtgacgctcggaagggccgagctcgtggacctgcgcgaagaaagcctgctgtcgagagccccggcgccagactaccgacgattcccgagatcaagataacagagacgtggaacgtctgggaagttcgtgaagacggccagctaattgtcggtgacggcaacaagggcaacaaagctagcacagcctccgcttcatcagacccctgggacaccccgatggcaccacctttagctcgaaacatggcgggtggcgcagtcgatcctccaagacagcccacaaaagaagaagtcctcgagccaacgtcaacaggcacatcttccgagttagaacaggaggctcccaaggtggaacctacagaggcgaaatctatgaaggaagaagacttatcttcaagcataccaggtggcttcgattcgtcagagaaaaaggttgaaaccccgtctgctgtctcggatgacaaggtcgagagtgttcctgagtcttttgagaaacaagttgacatcacgtccgctgtctccggcgacaatgtcgaagctgtctctgaggacctaacttccagtgctgatggcaagaaactctctgatggcgatgagacggtgtcagcatcacgcgactaacgcgttcacattggtctctttgttcttgtctcatcgttctgtcattgtccaccttatgtctttcgtttagtaacctaaccttctatgaggatgtaactagcctatcctacttaacctagacatgtgacttgctgcatgtcgcagctccgactactgcagccacacctgaacacggtatcttaaattcgtactaagacctaatatgtctcaaatcttctctagtcgcattgtttgtgtgtttgttacagaatttcgtatccacgcggctgtttttggcggtattacaagcccggatggagtgatcttgggatcctaatcaaggtacttccaacacaactacttggatgagatggatgtggtttacttgcaaacacgacttacgagatttagttaacgtagacttcacgtgttattgtagaacaacgttgtggtaagcatgatttctcatcttaattaggactccctagaactgcacggcatgcaaatgccaaaattagggcttatgttggaagacaatctgaatataaacaaacggtggggatgcctggcctataatatccatgcttttcactttttttgtaatttgggtatcttgtataatgatgacctgaatagatcacacactctagctagggaataaaacagatggatagcagctttaaaaaggataggataaaccaaagccataggaccaggttgtataacaacggcgctggctca

SEQ ID NO: 12226 - DNA, 461 bp, Emericella nidulans
  unsure (1)..(461): unsure at all n locations
caaactcnnntcttttccgcacggacccacggcgatggtgaaccattgccacggacatggctcccgcttcctaatggtggtcttaaacgcgagttgaggccactggttgaattgatgcgcatcatgggccgttcacgctgtggggattcgacaaacatgtcctacaatgatgcagctacgcctgatgatgtcttgatgattgcattggtctgaaacttgaagggcggtccttggctttccggggcaggtctggtcattccgacctggaaggactgcgctttgcttctcgccaagctaggccgcacaaaagtctgacgtatactcctaaagtgcaaaataattacaccctcatagacactgaacaatccctcaagtctcctgttactattgttcaccatccttcggtagaaccgatagagaatccggaacaatgccatgagttgacatcatagtcgtgtgca

SEQ ID NO: 12227 - DNA, 5045 bp, Emericella nidulans
cgtttctagtccaaactctgtcgatttgccctgaaataagtgcatcattttgcttcgtatggccggttctccgcttgtgctctgggcacctgatcgtgttttctgactagtgccagggacatgtgagggccttggggccgaaatttagattcacttacgccctcgaaaaccgggaaacaagagtaacaataagtctatagtattactggttctttttacttcgaaagcgatgtcgacgattattcattcactgtcaaaacggtgcttttgtacatgttctgttgcggactgatcgtctgctaggtcgccacattctcgaaacgattcattccaaagattggtagatataaagaggagtcaccccttctgagcacactgcaggaacatttatattgcatgtcaaccaaggatcgagcgccgtgtccgtacttgccagaccaacaggattaaatcggagggcggtcatactcgccttgcgttaggtcacgttggcagccagactgtttcgggttagacaaggacttgctgaccttcaaaatccccacatctctcgtcgactcctactacttctcctctctctcttcctcctttccttcttcatcctctcattcatctttgatagctgttcttcatgccttctctcagctcctcttcatacagctctatcgtatccccgtccgttaatgtccgacacctgtattgtgtgcttaggagaccttggcgaaagcgccagcgatcctcttgccgcctcggtgccaagacctgaccttgaaccggacggcaaggcacctgatatctctaccaaggcagaaggctccgatggaagtgaggatagctttatcgcacagttactcccctgcggccatattttacacaacaactgcttgaaaccctgggtcgaacgagccaacagctgcccgatatgccgccgtaccttcaatgaagtggagctgagtgaccgggtcggaggtaggaagattctgttccaaccctgtttaatcatctatgtgtggcagactggattttgacgcatcatgtataggcccagtgatatcctcctacgccgttgaagaccgtgttcaagtggcggatgtcgatccgtccatggtcgtcgaatatatagatgatgatgtctccgatttccagccctgccctatctgcggcgactctgaaaacgaggaagtgcttcttctttgtgacggctgcgatgtaccgacacatatatattgtgtgggacttgatgaggtaccagcgggtccctggtactgttcccgatgtgagacccaacgtcccatcggactatcttctgatgcagttgatagactgtcccatgcacaaactcggcggcgccaccgtaccagggcccagcaacggagggtgctgagtagaaaccaaatcaactccctgcactgggcacgtgtttggcaatcagtttgggacaatcttaacatagacttggatttccccttcgatgatgatcgagctgtcgagcgcgcgttgcagcaacaacgccgcgaggaagctaaccagagagagttccgcacctggcagcgccgttttgacgtcgccgagcggcagggtggaagaaatcgcttcagagacactgctgctctgcttgacattgaggcacctcgaccatcacgaccgcgagcgccgagggcgccgacacctgaacctgagtcgctagaggagatgagggcgtggaacgcctttgaacgtgcccgtgagatcgagaacaacccgagcgctgcacgaaaacgtaaagagccaacaatgtccccttctccggagcctgctgaacccgcacgcaagctgaaacgaccccgcacccgtagagccgaagatctcgcggcattggcggtgcagaatggcgagtcatccaggagtgctactgcccaggcatctgctcgtcttaatgccgacaactctagcgagccgagcttcctctcatcattattgaaggaggtcgaagatgcgtcaacgcctcaaagtgttaactcgtacggcccttcagctcacgtctccgccgagcaaagtactgtgggtctttcgtcgccttccatctcacctgttccttctaatcaatcatccccgcggctatcttctaccaccccgcctccgcactccggaagccggccaatatcaccaatgcagcttaccccaccgcgcgaagtgtcgtctcccacattctctccggaagtatcaccagctagttctcacaaggatgttagagaagaaacgccctcgcgctctagccctcgccgaatacctcgagcggcgcatatagttagggcagtaaggtcgaacgagagctcaccagctcgcattggtttatccctagaggtaaaatctgacattcaaaaactcgtcagcgcggctctcaaaccgcactaccggtcgaaggttgtctccaaggaggagtacaccgacatcaatcgaaatatctctcggaaattgtatgaacatgctctgggattagactcattagagtcaaccacaaaggctcgcttggaagccaaagctaaagaagaggtgcataacgcggtcgaagctctccggcagagcaaggccagggcaaacggttctgatgatagctcatgatgattcttggagcatatagcggcgctttctagcaatcttgttctcttttgtatccatctgggcaagcgtgtacatagcgggtgcatttatgctagtccagttttcatgcgggaagccatatcaccctcctgtttatcactctacttttaatgggaatataacctagggtcctagccctgggcacgttcactagtttgatttctatagcttttacaacttctgtaatgtcgtaaagctcaccgaacccacccaccagaccgggcttgagtccgctggcacctgcccgatgcggccccggatctgatatggctaactccgaccgagtccgacagcatgtaataagcgctaagcagaaggcagcaggctaacagactgcaactttacagcggaccctgtcagggttcctgctaagctgactcagagatgtcatgcgaagccgcctggccacaagtcgctcaagggctccgttgtctgcagtattcaggtacatggggctggtaggttgggcccgtgccgatttgccgtattataaccatctgtactctctccctttcgcaatttcaagcttctgtggttgagtccccaggtctgcttaatctgattaacatgcctaatctgcttactcagcttgttcagcggctctatgacggatttatgattagtccagtcggacgtattagtggtccgttaccgacctggactctgttccgactttccgattccatactgtactcagtcttatactgatacggccttttgcatacagtagatttacgtttacacacaaaacctatcagtcggatcagaattcaagatcaaatactgccattaacgatcaaaacaacgccacgggccatttaacaccagaaaccaaacaacgtacagtaggtacgttgaacaatgacttcatcatgaccgtcggactcggtaaattgaagctctgcgatctcccgaaagagacccacgacgagaaagctaagatacgcaagtgggccgttccgctgataaattttcttctgtcagccaattatttgccgtcgactcatcatggcttccagaatcttttctggcgagtctgacttgacgtagatagctggatcaggtgctaggcctgcggatgccatgcctgatgcgtttaggctgtgactcggataaccggcatagcgcaatagctctggactatgagtgcacttaacatgttacatgtgctgtcagcggcggacggagggcggggttggaactgtccgattatctgtgactgaatctcgatgtcaaatcatgaatggagtttagaaggtgtttggctcggagtttagagcggatgggtcaaggtacaatcttttgtgtccacgcgatggggcttgcgcctcctggaagatggtggatgccaggtggaattataaatccaaactgcctaaggcccacttcgtcgagggtttgcagtagaagtatattaatggcgttagcaacttttcgctgcccctttgactgcagcggttgtttattctccttgagtttccttgtggagcgtgcataattatatcacttcggtttaccctctatatatttcgcctctaatcctactcgaaccagcggatagataccgggcaatgagtgatatcaacaacctccacccaggtgacggacccgggcacgatgcgccgtcttccagcacaactctacgttcagaatcccgttccagtctagggtacggtgagaaggccatgcagtcttcgcctgatacggtttctgagaagggagaagaccgtgatatcgaaagtggcaaccatgacgcacaaaagccatcagccgatgaaaagccgaaggaactggagtccaaggatcccaatctgatcgagtggaatggacctaacgaccccgagaacccgcagaacatgccccattggaggaaatgggtcatcacaatgaccatgtcctcgatgacaatgtggctcactttcgcgagtagtgtgttctcgacggcgacgctggtgacggcgcagcagttcggcgtatctaccgaggttatgatcctcgcgaccagtttagtggtgtttgggtttgctgctggccctttggtctggtcacctatgtcggagctgtatggccggaaatacccccttgtttcttggatatgctttgttcgctatcttccaaatccctgttgccgtggccaagaacgtgcagactattcttgtgtgtcgatttttgatgggctttctggggtgctcgcctctggctgttgttggaggtgcaatggcagacttttgggatcctgttgatcgcgccatagcgattgcgctgttttcagcagctaccttcgtcggacccgtgctcggtgaccttcgatacccttcattccctgaggattttagaatgacggctatttctccaggtccaattgtggcggatttccccgggttccttccgacagcggtgggcgc

SEQ ID NO: 12228 - DNA, 546 bp, Emericella nidulans
gaaagctttagcgagaggcgtaagggacggtcgagcccagaaaggagatacaaaagcgtaagggatgcataggcctcacccctcatcgccaccgaaatgtgtcagaagtcccaaccgggccttgatggacgagtaccaagtgaagcgttcgccctggcgagaaccaccggtccgctatccccctcttctctcatacggtcggatccccccgacagatcccaccatcaggtaggccttgtcgctctgtctccgtcacccggccaccgagtatccccagcgggacctgggatggggacagcgaccgaagtctggatctgcaattgtaacctcacaactactgggtatcaagcttgagtcgtttggagtcgattggaatcgactgctgccttggcctcagtggagtcagtctactggcgaccagcttttcagtgagctcttagtccgcattatgatgtctgtcagctacggcacgcttagcgtaaagggaggaattatgggacaggatataaagctctcgattatcgacaacaggactttgcatttttt

SEQ ID NO: 12229 - DNA, 816 bp, Emericella nidulans
agtgtataggacgcacgcgcccgtccaaacatggcgtgccagccccacgacgtttttttcgcccccgtccatcttgcccggtttggggtactacggtgaccagcctgctcatagcaatcctgctacttgatgttagcagggcgggttctaccaacacatcacccatgcgaagacccctaccgccaataatttttctatcggggccccccacgaagtctaccccaaaattggcttttggcaccaaaattcacatctttctcttctgaccaacactaacctttccgacttcttaagttatatttcagtcccgccagacattttgagaccggtgggggcacctcgcatgtcgaacaaggcccattgcagagggattaatgcatttatctgtggaccacaacactttcctatttttataacgcagatgtcagcgctcctaacacgaatttctacaattcgctgggactaaaactcttagaggaatcttcaaggcggggccctacccatatgcgcctcattttttttcattttatcccccaatcgctttggaaaattcatgctctttgttatttttttatataatacgcccatttttcagcgggagctggtccgattccttttacctgacggaaagatcccccatcgttaactttagatttttctcccctgggcctctaggaataggaaagggcccccttatttttttttttttccccctttgtgtgccccccccatatattcccccaatatgaatatatttaggggctgggcacagaaaaatattttttgtggggggcacatttttattagaaagtcccc

SEQ ID NO: 12230 - DNA, 1415 bp, Emericella nidulans
gtaactgaggtttatctttgtagaacgttgcgtcatccgtggctggcatttacagtaggaataagatctgcttcatacagaatatctggaagagacaaatttgagtttgtcctataaagaatggagccataatgactatatgccagcgcttcccccattgtagtcaatggttgtatcctaaggataattggttcttacgagctgcccgcctgaataaactgacgtattatctgggccaggataatgaagattccatattcgtatcactatcagcctgctcaacattccacgtgccgcgtataaaccattcgcagggaatgctggaatgccgcacacgcaaagtatccaattacgtcaacagcatctgagagacaatttatattaaagtcttctttgtcttcttctcttagctgcatgtaatctgcagggatctgactggaagatcatgggcttcaccaacctcgcgctgaccctcggcctcctggccaccacccgtacgcccttaccctaacaactagtattgacaagacctctaattcagtgcctgaacacgtgcagtctcctccccagcacacgctcagaatcccaccggaaccctctacactgacaaggccacaaatatcaccttctccacctggtctatcccggcctcgcagtcatccgagtcgcaggccagccccttaacattcggcctcaccctcccctcaaaggctctcgaaacggacgcgactgacttaatcggatatctccactgctcatcccctaccggctggtgcggaatctccctcggcggctcaatgacagacgccctgctactcgtcgccttcgtcgacagcaacaccgtcaaacacactctccgctacacaaccgagtacgccctcccagctgcgtatactgggaatgcaactgtatcgccgatccactctgacgtgagcgaggattcattcacgacgatcgtccactgcaaggactgtctacactgggaacagaaggggagttctgggcgcgcgagcacgagttccgggcagatggaccttgcgtatgctctttcctctgagaagctcgtaggtgcggccgggtgcgcggatgaggcgaggtttgtgcggcatagccagcagggaacttggattgcgtttttggatgagggggctgttgcggagagttatagagactgggttggtttgaccagggagggaaacaatggatgctaggcgcagttcttatttagagtggccgatacatgggaatctgctttgaatactggtgtattgggtgattcgaatatggatggtctgcagcacgtgtggatgatggaccagttttacacttgccaaccagcctgtgttatagtcccacctggaaatattttacgagccggactatgagatcaacagagcctgtcagcaacgtataca

SEQ ID NO: 12231 - DNA, 741 bp, Emericella nidulans
cgaatgtatttaacgcgcgtgccggtcataacatgtgaggccatcacaacgccgaaatttttgttcacgtccatctagtagagctgctggttctgctaagaagccagggctctgaggacgcctgccgtgttatttaaggggggaggcctctatccttataacactcaagcacacaacccactccacaatctgagatcggccatgtaccacgatacagaatatcacgacagagctgttaaggtgccattccttatttcgcctgtaccagataagtctctgtgcgccgatacaaattatacaccagtctcaaagccttgttaggcgctacggaggaattctctcaggtctatcctggcgaccatactagtggtcgagcacataaccggttattcgtcgcctggtgcggcgcggtgcataaacgacacggcggtgaatgcatactccgtattggatatgacggaaaccactatggaatctgatcgattactatccactaacgctaggtccgtggtcaatgaaaccacttttaggggatcctttgagatcagtaggccttcacaaacgcacattgatgctcaggctttgtacacgggcgggcccaatatccctttttatcatttccgtgggcctagtacccaccatatcgaagcggcgggcaagatatgtgccatgttggagttacgccctaaggcctgtggaacattcaatcttttccgggctcgtcccggttcgccttttctt

SEQ ID NO: 12232 - DNA, 852 bp, Emericella nidulans
aatgtccctcacccaaccaggccccggcccgaactgttccaaaatggatgatcagccagggcttgccaaaccccattctcaaaatccaacgtctgctggttcgcaaacctcggcccttcatccatcgtcccactgagaaatcctggcgcgacctgcatcgcatctgcagcgacggagtctagaaaactctggatagtctgcatggccttggatatgagctcgaagttgggttgacagggttgaataattgaccctgcttggagctccgcggcaagaatcgtgagatgttgtaggactttgggacccatgaggcgtggtgctgtcggtgaggtgcgctggtttaggagagcgagaaggaggattcctgctgctgggagggcgtagtacgttatctgtgtgcttgttcagcgcaactgagccatgctctaatgcaggagagcgtgtatgtaccttccacacaagactcgtcccagaattcacaatctggtctcgaagaaggatcaagtccacgatcagcgagattatctcctctgcaatttcaacagtagatgtatctggctctgctggtgtgcgtagttgcagtaggctcagcataaacattacatgaaggtggtttaaacgcactgcggcgaggaagtcacgctcaaatgagctatcagtacatttttgtaacgaacattcaagtttaagatgagcaggaagtagatcaaattgttttgccgcggctgccttgatttcactactttcattagcgacattaccaggggatataggagacatacgcgatccttctctgaaagtcggcgggatcactcccttttttacgctggagacacaagatattttctttaa

SEQ ID NO: 12233 - DNA, 115 bp, Emericella nidulans
cccttcccacacacccttcgcctcagacgtcctccggtcagagtgcacggcgcttgatcagccatgtgttgcctggtcagagactcagatcttgcgtgcaagcgtgtgctacaat

SEQ ID NO: 12234 - DNA, 467 bp, Emericella nidulans
cgaatgtatatgaggcatgcggctgtcctgacatttgtggttaccaaaacgccgaaatatgtgttcaggtccacctagtagagctgcgggctctctgacgaaacccgggctctcgagtccgctgcctactggcctacttcagggggcgtttgttcctacaacacaaagacagtcaaccctaccaagagccagaggtctcccttgttctatggtacggacaatcaccagccagctggtcagacaccattccttacgtggcttgtaccaattacgtcgtcgttctcagtccataatacataccaatctccaccgacttgttggcagatgtgtggagactcagcgtgtctgttctgatgactcgtcatggggccaggcacatcaccggctagacgtcacctggtgctcgtttgtgcatacacgacacgggtgtaagggcactagctctgtagatgcgacggaacacactt

SEQ ID NO: 12235 - DNA, 2655 bp, Emericella nidulans
gtcgcataatccacgtctcgacaggggaggattcggcggttgctgtgcgctcagtggtcttttcccggactttctttggcaaactggcaagaacagccggtgggccttcattgagggtaacctctgggctagaatagcggcttcagctgcagtgtcttcctcgatacgctgcttctgcaatagcccttcttcgtcaattgcggacaggatcttgtcagccaatagcgttggcccatctagatagagttgatcaaccattttctgaagtgatttccgagaatactctgagcttgcgttactcgcggccgataatagccgcttgacattctttgaggcttctatagactttgaaaggcagatcaaatcatctgcatctcccttcccaagagtaaatttctgaaccaaacgttgggcatcgtaactgcgtttcaacagctgtactagatcatttcgtatctcactatcctcaataaaaacagaaaccagatcgagacgttcgttgatcacaggtaatgaagttgacggagatgttagtcgatctcgcagtagtcgcgctccgcttttggtggaggtccgacgcactgcatgtagtaggctgcctttgaagctgtcgcgcgctgactctagtatttcaagccctctcaagctgttacggtcaatgctcatagattcgtttagatgtcggcggcgagggggttgcagctttagattaagaccctgcaactggacccggatgtattctagcagactgtagcccgccgcaacttcctcctggctgaaggcgtcgatcgatgtggatggaagaggtgcttccagcatagacgcccagtctgaaactggcgaaatcttttcagggaaactgaaacatgtcatcagccgatgttcgtggccgataagcagctgcagctcttgtccggccagatcctgaagacgttggtctacgaggatttctcgagcacctatccttgcgattgcagatggaagcatctgtgctgtagtagattgagtgtagaaatcgcccgtggagaggtccagccaggccaagccgacattctgcgaggcggacgtaagtatatgctgataagaggattcgtcgctgcctctggcgtgcatccccagatctgacgggttgagatagattgccattaggaagttgttttcagacggatccatgaacttctcatcgatcagggtgcctggcgtgatgacccgcgctacttttctgtcaaaaagcataccggaccgagctttctcctctgcgctaatggcaaattcttcactaatcgcaacaaatttattcagatcctggacgagaatcttgaggaagcgatctagctggaagaatgggaagccggccataggaacaggaccggcactggtttttttggtcgcaagctttaaattgagtaacggggcaagttcctcggcttgttcaaaatagagctacatagtcagtatgtttcagaccataagcgataggtgagtacctcgtaaaagcctccaaccctagttaggacaacacagttcttgaacttttgcatgttattgcggtgtccctgaacaaccgttggatatcggggcgtatcctccacaacatcttgatatggctccaattttaccgcgccttgaggaaggtccttgagttttaccgtggactttgttttagctgaccgtcgctggttgtggaagaccgtggtgagctgcggagctgcgacgcgtcgcggttgagcatgatggcatatcgtcctgtgcacaaggcagcgatagggaaggatagtatttggacgagccagagatcgagcctgcgactgaactaagtaaggtaagcgagacccattaactggcatgtcttatagtaactgaggatacttctgacaaaagggagtagttcctggcccagtgttgctgcttgtccggcagaaaaggcgctgtatgccttaccattaaggccgcaaccgccaaaccttccgtccttgggccaccgaaatctgcgactcacttccatcattcttccgaaagcttcaacgctaccactctttctccttcaaccattagcaggagctcgcagcgtgacaactgaactagttacttgctgcaggacgatggtccaggtttgtgcagactcacgaatctcaactttgccacagaattcatctccattcgcaggtgtctcgacgcgccgccgattcctgagcctgagctccattgagccagtgacgatttaaacggtcaccttctatataatttagttttccatcgtcagttgtcaagatggcagaccaaaacatttcacagtacaaatactcggcgatgtccaacctggttctccaggcggaccgtcgtttcatatcccgcgtcaacgatgaggccaccggagacccagaatcactcgcaggtcgtataagcattcgggaaatgggctcgaggatagcgcgcgatgacgcaccgaagtccaagaagaaagctgttggtccggttgacattgagcggggtgccattcgagagggcgaggatgtccttgcgcgtgagcagaagaaacgacagaagggtcaacctgcccaactacgcggccaaggaatactatccgcggccgatgctttgattgaaggcctcaaatatcgccctcgtacaccagccacgcgggctacgtacgac

SEQ ID NO: 12236 - DNA, 1503 bp, Emericella nidulans
catccgctaacgcccagggctcctcatcgtcatactacaccaaagattctcgcgaagataatctcgacgttgagacttttttttattcggacagcctgggctcctgcagcgaaagcatggcctccaaaagactaatccgcaaacgaaaaagcacccttatcaccccctcaaccaccctaatgtatacacacattcacaaagcacaacgcaaaccttacaccctctcccaatcacccacccccggaccctcccgtcccaaaccctggactacctccgacgttaactcctcagcagacgaagatttctaccgcgtcttctgggacacccattccagaacccttttgctccagcaaccgattcccgactgggacatgtcctggcttgcacggtacgaatcctccgctttcacgctgccaaagacgcatttcacctttcgtttctcgctccccatgaagtacatggcgagtcgcatccgcaagaccgccattttcccacgacaggagtgggagtttattcctagtccggcggagtggagaaggttctgcgagggcgtgacaaacggggaggaattgacgatgggcttcttagggtgggagcgcgagcgcatcgaggatttgatacgcgagagaaaaggtggtgagggctttgagcatacagggagggaaggaggtgagtggatatctttatacacacgcagatacgcaccacaatatggtggccggtagatctgtttactaaaatgagtgatcccaggttgaaaaaaggaaatatgtgatgaaagcggtcattgttgaaggacgaagatgggtacgagccaagtggagaggtgagtatgtatccgatgatgagtggtgaggggatacttagggagatacttaggatgttgatggtagagccgcttgataagcatatagaagctgaagcaggaccctctttcaatatatagtccaaaggtaactatatggcgttacccatatctccctacctttaaccttcccaagctaacctactaaccagaaatccgccccggccgctccctttgcattcacactttccccatctttggcccctatccttcatgggtcccacttatcttcactctcccaaatccattcccattctcctaccaaagaaccactcccggttcattattgaagtctccgtcgtccgagctgtagctctatccatatcctcatccaagccggaactgaagctaccccgcccgggacccggatgttgttgctgcttcctcgcgagctaaggccttacttaagctaaggccttacttagagagcgagtctgagatctagagcataaacgagccagaggggtctgtattcttaaaacgccgaggaccctttgcgcagtgcgaacttttgagcttggtcgatgtaggagcaagccagtcgtttaaaaataaaaaattaaattaaaaaaatttacagagaaggaaggaggaactttgcaaattggtttgtgatggtcagattataggctgatggg

SEQ ID NO: 12237 - DNA, 117 bp, Emericella nidulans
ctatatcatcatcggcccagtccccgggcagctccgagtcacactgcccgtctggcgttgtccatcaaacatcgtgctcaaccgatcgctaggtctccagctgagtgtgtcatactc

SEQ ID NO: 12238 - DNA, 608 bp, Emericella nidulans
gtgagacgagtgtgctctgagaatgagcagctctgaggcttcgtccctccttgtgattacaatacgtcagaatgcctatcactagcgatatgggctagggcggtgtgcagacgccctcacggcgatccggactgcgatcgtagagacctggccctgagctggattcttctagacagactgacaggtttttacgtcagtggcgaccgccttagaggacatgctaactctcgacgatagccacgagcttggtcccggaggctgttggtaatgtgagtctaatcatatgaccagatctcatctagaatgagtgcactctgatgcgagcacacaatctccgcgggattaaacgggtctgcctatgatagtgcctacaggagagggacgaccctgcttgcatagagccatcagtagctgtgcagttcgttccatatggcgagagagcattgtactcgagcgggttagcccgagcgaggatgaccgactgtgctgtcagatagtccgtgaccagctaggcatatccgttgccattgccagatactgcatagaacccacacactgcggccatagatctgatcacaatagccctcgcgggagccgaccatcacgtc

SEQ ID NO: 12239 - DNA, 1771 bp, Emericella nidulans
ctgctcggtacgtcaagcagctgccactgggaaaattctttgaccgcgaaaagttttttcgcgcgcagggggtcgtggacatgcctggttgtttacagccatgggggttgggcaagggaatggcctcatgaaggccctgtgggatgctgtacggcagaggccgggtatcgattcctttcatgaatcgccagtatccgggctgattgccgacggcgatacggtccgcggcgtcactgttcgccggcgagataccacgctgcatgtctatggacaggtcattctcgcctgcgggggcttcgaggcgtcgcccagattgcgaaggcagttcctcggcgagggctgggatcttgtcgcgcttcgcggcagtcggttcaacacggggacgatgatggagcaggctatggccgtcggtgccgcggccattgggaactttggaggatgccatgcgacgcctcacgatctgaacgcgccgaaaatccttaaccctaacgacgcggacagaatgagccggtacagcttcccgtattccgtcatggtgaacgcggaggggcgaaggtttatggacgagggggagaacgtctttagtctcacgtatgcgaagactggcgcagctattgtaaagcagccacatgccactgcattccaggtctttgaccaaaagacgcttcatctgcttgagccccgatactctgttgcatcgcccgtggaagctgatactctggaggagcttgcgacaaagcttgggattgacgcaaatgtgttcactgcaataatcaaggaatacaatcaggctacccccaaagatgcaactgagcgcttccatgcgtttacctgtgacggcgtgtctacaggaacggcgctggatatcccgaagagtaactgggcgttgccgatcgataagccaccgttcgtggcatacggcgtcacctgcggcatcacgttcacgtatggaggactaagggtcgataacggggctcgtgttctcaatgaggagggcttagttatgcctgggctttgggcagttggagagatagctggagggttcttcgctttcaattaccccgggggttcgggcctaaccaagggtgcagtgtttggaaagctcgccggtcaaaatgcggcacaaagagcaaagggtatcaaactagcctagaaatcctgttaatatctatattttttacactatcatagcttcggctgatctgtgagcctggcctccagtaacccctcgtggtcatccacaggcccatttgaccgccaagtcctcacaatatccagtccaaccgacgacaacaactctcgcaactgggctatggtgcgttccatgcctccgaaaagcatcatcatgctcatgtccgccattatgtccgtaggcgttagctccgccgcaccagtggggaacaccttgtccccgataagcagaatcgaatcatgattcatcgcagccacagtgtgtccgagaatctctcgacattcaatgtcgggccagttatggagcactcttgttaagacgtatacatcggccccaatcaccggctggggctcgaagaagttgtgcggcatcctgcgaatacgtacatccgcctgaacgggtccgttctccaatacctcaggtagatcttgaagagtcagctcggcttggagatcaggaatcttatttagaaggcgctgcagagtatatcctgttccaccggcaacatccaccacgcgcaaggggcgctcggcgttgcatcctcggaagggtccatgacgctcacggaagaaaaaaggg

SEQ ID NO: 12240 - DNA, 142 bp, Emericella nidulans
aatagtttgagtagatgaacacttttaaagcgaggatacataaatggtgataagaagtgtagtgtcgaacagcgagagaaggtttacagtgataggactttgacgtcaaggagacttgctgatgcaccttgatgggtgatga

SEQ ID NO: 12241 - DNA, 113 bp, Emericella nidulans
ttgataggtgtgagaagtctacaattcgcgatattgttgatacttacgttgagaatttcattagaatttttcgtctgccggctccatattaagatgcattggtcaagattaaa

SEQ ID NO: 12242 - DNA, 574 bp, Emericella nidulans
ccgctcttgatcgtgctttgggcattgatttgcgctggagagatagtgtaatatgaaacctgtaagataaataggtttagttgctctcctgtcggtgctggggcccgtgaggacaacaagcgtctgtaatgttagttaataggcgattggtgcggtagattcgtcttcgacgcctttagggctctactaggtcaaggggatctgtggtagtatcacacaagatgcggcaggagcttgatccattgctaggactgttgagtgacgtttgagaatctgacgcccagcaaggagcaagcatggcattcgtggcattgtctgaatcgagctgataatacgaggtgacaggtttgccttggcctggaaaccaagataggtcccctgggtttggcttaaaccaaacttgtccatttttgggtaagctctaacgagggacccttttttggcaattataaccttttgttttaagccacctacgaggggtgggtgctttttacctctctattttctatttaaaaaaaaagtttctttctttttatttgttcctcggtctttcttctaaccccatctcccattt

SEQ ID NO: 12243 - DNA, 428 bp, Emericella nidulans
  unsure (1)..(428): unsure at all n locations
gtaagcgcgggtngaactgctagtactcccgcgggcgcaccctaatggttcgcatacgcgggctcaaccttgacggctgtcttttgacttgacaccaggcatatagtaaatgtacggatgacggcccaaaaagagcgaggtcacaatagataagggcactccttcttagggtagaagacgtactataataagaggagggaagaatttgcagcttgctgatagtacactatctttctctaatctgaggaatccgttacattttagagcatcacctgagtcaggcagttggctccatacgcacgcgtcccatagaggtcagtcttgtacttataagcgctgactaggactctcgtctcttgcctctcaatgaattacctgaacgagcagacaagccctcgtgaagtcctgaagagggctgttgcgtatat

SEQ ID NO: 12244 - DNA, 580 bp, Emericella nidulans
agatcttgaatctctgcgcaaatggtgtgcgagttggacctgtgagagcttattgtcacagcgggtagtggtttcagacgtactgcttttaacctacccttccgttaagagctaggccctggacttggaccatgaccgtgaagtattaagcttatgcgctgcctaaagcctgggttggcttacactggtgttccatcgcgagtaactagaagcagagtcttaagaataagctgtattattgcgatgttccttttacctagcactctcacaactgatccctttctacgactgattatgatcgttccttgtattattattgaaaatttcgctgtggtatgatacgatacagcacaccaatgatcagcccgattcatcgtatgaatataatgtgctgcttcttgcccgttactacgctaataggcaggcttattgctcgaattgtatcgacagctttaacgcttctcaaatgacgcacctgggtgttcacgagtccatgcataatcagatatgaggtctacttctgtatgatatctcaccatcgaatgcgttccgatcaccaccttggtatacctgaaatacc

SEQ ID NO: 12245 - DNA, 575 bp, Emericella nidulans
ttcaccaagttggtggatctctgcgcaaataccgaagtatccacggaataccacctacatattcctcgtcgcggatacgaacctatcacgcagtgcgttataaaacaccaggtccatcagcataacgagactagcgcgagacaaaatgatacacctccgtcttactctacccttccccccctatacgcgaagcgccgtaacaccagtttttaaaaaatgtgggtaactgcgctcttcttggatcgacgtcagtgcgagtgccaactgggcctttaaactcctgtcagtagaacgtggcatcaacgttctattcacaaccgtacgtaatatgcagaggaaggagatgacagaaaacttgatagcggagccgaccgtactaaattggctgctgcagcactcggtggactgctatgaattagaaacgaaaagtcgctcgaaaagataagacgaagggggcggataaactgacattatacccgacaaagagtgacgcgcgtgaacgcgcaccatgtgaagactggtcaggagcgtattatgcttcgcgcgtgcggggaaagtacagaggacacagtatg

SEQ ID NO: 12246 - DNA, 545 bp, Emericella nidulans
aatgcttattatacaaccgacagtattccatccactcgagcttacgggtgtaggaagcttctggcccgcggatgagtggtagggaaccgcggtcttaaagtacgattccttgaggttactttgaaacatctctccgagaggctacttgtattatcagcacacgtcgcacgacgttgttcactcaaactacagctgcgtctaggacgtttcttcgctgacctacgtgcttaaccctagcggtaattaagacggccggttctaagacaaggacctaattatcctatttaataggacctcgtctaccattgacgccgtcaaagagcctccacacccattttagtgacacgctaacgacacaacctagcatgtcctgtcagtgacactgcggcaagagaagtggaaagcggttttcacgctgtaaacgaagaaaattacagctactttgaaaaaatttaaatgtaaggtatagattgatatgtcggacgaaaagacttatgcagtcccgccgtagatgccgggacggcgatatagcgtcgtgatgggta

SEQ ID NO: 12247 - DNA, 433 bp, Emericella nidulans
aagctgaacagatggagatcctgatggggtgctggtcatgagtacgcgatgatctactaggaggatgatgaacacgtattgagatggccacgacgcttgatgtaaagtacgaggcctagaggagtctgtacgaggaagtcaaccaatgctctgtaggatgtattgctgctattactgaagaggactggtagcttcggtgaccgtgtttgacacgtgttactaacgcgtatgtgttccgtgaaatattgtgaccacgagctggtactgttgactgtcacagacgcgaaggctagttatggtccggtggattttgtccgttgtcgcaattatgtgcgctcgcctgtgatgcttccattgcggcggacgttcaggcttttgataagagcagacggtctgtgtgcatggatgtcataatttacttcaggacaggcca

SEQ ID NO: 12248 - DNA, 499 bp, Emericella nidulans
ctcagtctgaggagggcatgctgcagccgggatcatcacatgaccaaggtgcagatagcgcgctaggcaggcctgtttatgcatataggcccatagagaaccccaagggagaagaagctgccacttgtatgatagatcatagggggctagaggccatcaggtatgccaagaccgctcttgacgaatgctgcatgaggcggagaaccaggcacgaaaccgatggagatgcagacagtgaggactatttagcataggtcgcgatcctaaagctctacggagtctaaggtgttcttctgacattggacttccagcaaaatgctgtgtgcactcgcgagccgggcgagcacagttgctcatagagtattatgtacgcagcacgcccatactgtctgcagccgaccttatgtagcagggctgggtctgtaccaaggagctaattggcataccaagaacctgattcaaggcgagggaaaactgatagcccttaccgtagaggttt

SEQ ID NO: 12249 - DNA, 561 bp, Emericella nidulans
gtggatctctgcgcaaatcgggaggggtcgttcggaggccctagaccgggggatagtactaaggttatgcttatattatcaacaaagttataattacgtcactccgttcaacgtccatttaatccttcaatctcacataacgcgggaatacaactgaggtggtatcttgtgtgaaacgtaaaggggtcgtagtggggcgtaacttcaggtgatatagggatcctattggggatctattttgatgacaggaccgttagaccagccgtaaggaatgtggggtagggtaggaataaagctggtggtatcgccgcgtaccgctgaccttaagttacttaaagggtgctaatgccgtaagtattatgactaagagggcaaaacaaaatgcagctgtgtagcttaacgcggtgtctcaaagttgagttgtcgaggacgataacgtcgttattagattgttatattaaaaaatttagttggtcgcggaccagtttacaactcgcgcatggcgtgatgaagctattgctcgcacgaagaatgctgggacaatgaaccaggttagcgcgt

SEQ ID NO: 12250 - DNA, 1794 bp, Emericella nidulans
ggctacaggatcacggttatatgatggatcatgcaggatcctcgtttctttttttcgatcgctttctaaacacttgctaagggattcttggattcttggtacgggacgttcccgcacgcttcgacgtgcctccagaggagccagccgtcgtcgctcaacactcaggccagataagccgcagcagaattctcgcagtgacgccagaccagactcgctggagtcgctggagtccagactccagcccgacgggaagatcgcacataggccgaccaggttggtaacgaaaaacgctgcggtcgtgctgcgtcggccattgatttctttcctttacgtaacactggaactgcctcaggcagcgctagacacgttggtgtacggaacccgcaaggctcttccggcccagcagtcacgccgtcttactgtggctacagatcgagaatcgatcccagagcccgctggcggtcacacagtacggtacaccgtacggtgtccgtacggcgtcgagcacgagcgcgactcggatattacttgcggtggacatccagatagagacggacgagctgttcatcgaagtcaatcatgacaccagtctaaaccggttcgggaaggcctagggcggtcaaaaaagcaaatcactaacaccccagacatgacacaatcctggccggtcttgtccgcaggtcacgggttggcagcgtcggcagccacagacggatcctagctgggtactgctggtactgctggtactgctgctaccattggtactagctggatactcaaaacagcaggcccccggagagaaaaagaaacgtcgaccgcccggctcagcgcccggctcagcacgtccgctgaggaaatgccattctcagtcctcgaccagcgcacgttgactcgctgaccagacctgaaccgccgaactcgagatccatactccatcccgaccactgaccagccaatctatgccccgcggcgttccacggtgtcgccaagcccagtgcatctccatgttgatatgctggaaaccgtgaccggcactttgacgagtcccaccgctacggtagtcgtgcgtggtttttctagcgtcccacggtcgtcggcgaggcgttcgatcggagggtgctcattcgagtctgatttagtctgatttagtctgactcggtcattcgagtctgcataacataaaaaataccaaaggaatataaaggaccttggagatagagcatcggtagagcgaccgagatggcgcaatccgcaaggcggggttagcttcctcggatctttttgacagaatcttggaggggtatgaggtgcggagaggaagggcgtctccgcggagaaggcccagcggctgctttcgagtggctttccgtgctgaggtcatcctacagtcctcttagtcctgccagttcccctgccggtcacctgccctgggcaagcactgggcccggcagacgccgcgcccagcccttccaggctgggtacctgactatatggggtacagcgtctggtacgcggtccccctcttgcccttgcgagcagcgacccttattcctacagccaagcacaagcaatatagccgccagcgtgccctatcaacgatcactatcactctcgcctatctatcggcttagactatgtagacatctattgtagctcatcgaggatcgaggtcaaggcgcagatcccgccatcggccagtgcgacgaccctgcgcggtacccgtccccgtcgacttcctccatctctctgtcgctgatttcacgtggcccaatgccggccagtccccagatgcca

SEQ ID NO: 12251 - DNA, 410 bp, Emericella nidulans
aaaactgagttaaaccgcatgtcatcaccgccgtgcggcattaccactacccattagtacgttcgctggcttgggtgcgtaagcgatcctctcccaagctcagactcctatcagccaacatgcgcccttcaccccgaaattggctcatgtgcctcatgtggccccatggcacccccaaacggcatccgacccacaaaatggtacatgaaacgaacccgattggaggaacatgctgactcgataatgtggggccccgagaccgtgcaaaggggtgcttcgtgtaagtattgcgatagccggggcggcgcgatgcgattacgggcatacgctatggagctatggtgatggagcggaacttccgtactcaccgcaacgtaagggtctgatgttaggaaaatcggtccgatcta

SEQ ID NO: 12252 - DNA, 274 bp, Emericella nidulans
cgtaacacccggttgtctcattgtcagaagagttgtcatagaattgctgctgctaaaggtcattgtgctccggatgggaagaattgctattattctgcatgtgcgtcgtagtgaattattgataggggctcgaccacctcatgaatttcaatgtctgggcctgtggggaaccctgttgacgcggaggacgagaggaggtaggatagctgggtttacgtactggagatgtactacgatgtatcctgtacactccaatcactcatatgacgggaaa

SEQ ID NO: 12253 - DNA, 599 bp, Emericella nidulans
cgtctgtaagcatgcacgccagatcatgcggtggtaagggcggccgctccttcatgagatcatacaaggctgaccgggatgtcgacttttgatgtgaaccacgacacggaacagcgttaccgccattaccaatatggccgcttcactaacttgaagcctatctaccgcaatcaggacacatgatggacgtacgtgctccttgacagcccatgcttagcagactatctcacattcgtaccattttagaccctcgtctgcccttcattcaagactcctcgtctacgccctcattctacttcgtaaagaaggccgaccctgcctcttgtatggcgacctttacggcctccgcgccaacgttaagcatccgaatatgccatcctgtaacggcaaactcccaatccttacgcaagcccgcaagcatttcgcctacggtgaacaacaagattactttgatgctccgaattggttaaggtttgtaaaatccaaaattctgcttttgaaaggtcttactaaacggcattggggggcaggatttattccgctatggaaacaaccggtaatctttcggcctggcctgcgttatgggcaaagaccgcccc

SEQ ID NO: 12254 - DNA, 3590 bp, Emericella nidulans
atccacttcaagggcctgctggtgcctcggttactgactgtcttccagtcttttgcaggtaagctctcctctcaaggcctgttcttcaacaactaacagttctccttttaaggcacagataatcgtgatgtattgctgaaagactccctctattcagccattggattggccgccgcctgcttagagaaaaacctcgattttatcaatttcctgcagaccaccctcgtcccggaagttcagattcaagaacctgggtacaacgtcctcaggagaagaattgcaatccttcttggccagtgggtgcctgtcaagtctagcgagatgaactgggaatccatctaccagatattccagcatttgctcaataatcaagatccattgaatgacctcgtggtccgaattactgccggccggcagcttaagcatatccttgatacctttgaatttaccccagaaggtttcaagccttacgcgccgtcgatctttcagagtttgatgtccctggtacaagaagttgaaagctctgaaacaaagatgggccttctcgatacagtgcgattggctgtcacccggatggaagataacgttcgtatcccctttcacaatatctggactagttgctaatgtttctccaagattgctccattctcagatgcaatcctcgcattactaccgccactgtgggaaagctccggcgaggaacatctactaaagcaggctattctcactttacttggagcattgatatattctcttaagcaagaatcggtcagatatcactcagtcattttgcctctaatccgcaattccgtcgatccgacttcggtatgttatatccgaagctttccagttatggaccaattacttacaattaatggataccatgatttacctactagaagatgccctagaactctggagcgccattttgttgcaaaccccatcgcccccttctcccgagattctttccctcatccctgccctcttccccatcttcgaatccgccatcgacggcgtgggtctggccctccagattgcggagtcctacatcatcctcgcaccccaggagatccttagcgaccgcattcgtctcccactctttacctcgttcgagtccctcctccaacccacgctccgccagcgcggcggcgtatgtaccccgcctcgtagaactagctatccgcggcgccgacgccgtagacaacggcagtgaaaacacataccgtgtcatcatcagctctttactcgatagctccctcctatcttcaatcctcgaaggcctctactccgcttatgaatccagccaaacaacagggccgaacaaaaaacaaacgagcatctacggtggcgttgaaacagactacttctctgtccttgcacgtctcgccctcgcacacccgacgctcttcgtttccggcatcacacccgcttactccaatagcaacatcagcaacaacagtcaaactccagaacaggcgcaggaacatctcatcacctggctcctaaccgaatggtttctgcactacgacaacatcggcaccgcaacgcagaagaaactgcacgcgctggctttaacccagcttctcaccctcagtgggcctaatacccagccaccggcctatatcctaaaccacctgcaatcgtacctcaatgtttggacggatattattaccgagttggcggagggcacgacggagggtgatccaagtgatcctcgcggtggggattatctcatctactggaataatgcgcagacggggacatatgaagataacgagccgccagaaaacatgcgacggcgtgagtgggaaagctcggatatcgttcacaagacaaacattcgagagtttgtgcgcgacgggctgcagtccttgattgtgagttgtggtggtgaacagcggttccaagaggattggctgctcaatgttgatcgagatgtggttgcggcttttgccgcgctgcggttgctctgatcggactgatcagactttcgcattcatattctcatctgcagcgttgttcccattttgtcgctggagaggtttcggccgcctgtatgcattgctagggtcgcgttactcttttctacatagcctaaatacccctatagacgaaacggtgagatttatgaatatcattgcctttagccgaacatcaacttgtggacggggcaacttagatattgaaatgacagccgacaatgaaaaagccttataacaatcggaaagtaagatgctgatcactatcaatgcatcatttagaagttgcactggtttggaaactctctgtcagtcaagggttgagggaagacgccgtttgcaagcaaatcttgcatatcccaaccgggtgctccttcggttttccaggtccagaacacccagccatttctcagctcgaatgcgtccagctgagcctcgataaagcgacgtgtgttcgcgatctcatctgcgctcaggccagccacgctaccctcactcttacttccgcaagcgccgactgctgtgttcgaacccaacgtaccgtcgtagcggattccaattccctttccgtttagatatctagtacaatctgacagggctcctgtccactcgcccactataacaggcttgtcggcagcctgtagatgctgacgtccgagttggcaagcggcatcaatatgcttttcaatgctccacgcattctggccgccttcgaaaacttcgtagtggtgggtgtccatcataacattctctccagtcataaaaccattccagccttccgtttgcacgaacccatcgtgcaggagcagggtcgcttcgggactgttcttccgcacccttgccagggtctcttcgtagtaatccttgagctggtcctggttgatgccgccaggaacatggggctcatttagggcctcaatcatcgttacggtatcgtcgtccgctaaatacctttgggccaaggtctcaaaagcaagaattgtctgctcaacggtgtctccttgttgccacccaataggtcctctgcgtccactgttgtcgaatccgttctgcgatcccggtgctggtcgatttgtcagagataggagtgcactgcttctggcttaatagagacttaccgccatgaagatccacaatgactttgagattatgagctctcgcccaggcaacggcattatcaaggtgctcgagttggccggagacatacggttcgccatcaagcggtgcggctgcccaataaccgatggggattctaacataattcaaacctgcctcagcaataagcgcgaagtcttcctctgtgataaaagtgttccaatgctctgaaagcctagccgcagcttccttaacgcccaaaacctcggtcaacgtatactcatcgacggcttcgtcgccagcttcatcgaacaatgatggggtaatccaaggctcatgaacaagccagccaccgaggttgaccccgcggactttctctgcactgggattcgcgcgaggctgtaaactactacgagtgagcgagatcttcagcaaaggccagaaaaataaatacaatcaggtgttgcaactgaagtacagactgccaaaagtgagtgtccggaattacgcttaaag

SEQ ID NO: 12255 - DNA, 266 bp, Emericella nidulans
gatgcgttgtcagcctcgataaaatctctgccctaccattacttgctcacgttcggttatcctcgctgttctagacgctagcctaccattccttaaaggactggtatgatgccaaggaagcgtcgcgtctaccgctataggcgataagtgatatggccgacttggcgccgtctgctcccaccgctgcggtggattgtgaagcgactgcgatgtcgagctgatggccctgggtctaccggatgcggcggaagcgcgtccctctatag

SEQ ID NO: 12256 - DNA, 747 bp, Emericella nidulans
gttacagccactcgctggtcatgttgttgcgaatcactcgatgatgctagaactacctgtacccaaccaaaccacccaaatctatcaaagtcggtcccacaggagacaatggtattgcctcgcaggtgctgaatattggcgtccgtcacattgaagatggactccgggtactgtcccatgttcggggcgtgagagacagggcgacaatggaaacaacctttgccggcccagagggctggttggtcgtttctgacattgacgacaccataaaatacacacaaacatcagaaactactggaataatccgcacaaccttcgccgaagagccaaagccgattccaggtatgcctcagctgtattctcgtatcgaaaagcggttcgagcctacatggttctacctctctgcatcacctcacaacctgtatcccttccttcgcgggttcctccgcaagcattttagtcctgggacactcattcttcgagatttctcctggttggacattagcgagctggtcaaatcattcacagtcgacacgctggaatacaaagtggatcgcataaggaagatctggagatggtttccgcatcggcgagccatctgtatcggagactccacacagacggatcccgaagcctacgcggagatatacagacgatatcctgagtggatccatgcaatcctcattagaaaagtcatggatgtgcctcacatggaggagcgaaatacatcgaaaaggtttgcagagg

SEQ ID NO: 12257 - DNA, 579 bp, Emericella nidulans
tttcacggcgcatcaagttctctgcgcaaagtactcgcaaaacacacagctaatagtcagtcaatacactgcaaagtcgcggacgacgtgcgttaaacataacttcaaattgtaaaaataatataaatcaataaacttggcgatggtcctaggtcgacttcgcctactgcaaacggctcaccgtgcgggacggcggccatcatcatcaaccgaacaccaatcctgagacatcctgacaaagaatgaaaaagtggactgcaggacgggtgataatatccccaccccagcgtgtggcacctgcatgaaaatggtatgaggtcgagcatagtgcaggttctcccctcgttggtctagtaacgatttcatcctatctctatgcgtagatgtggtcctagaactcctcggagttggcgaagaggtatgactaactatcttcggcttccaggtaggcgacatgtggagcaggtaatgttggagtataggatactcggacctagctgatgccattgataacgctttcaatttgtggccgagtgcggatatatttttcttttcacgtcttcgaaatgtgttcttcat

SEQ ID NO: 12258 - DNA, 2700 bp, Emericella nidulans
caccatgatacaggaatggctgtagacgtcgcgcaatccgatggcgtttttttttctctgtacctaatgctccatcgagtccaatgagatctgcaatcgccgccacaaacttgctgatgtcccgtcgactatccttccggaagacgcaggccaccacctccactcgccatgggtgatgttcaccagatacatgggaggctggatgtcgatacgcagtgttatccagcaaccaaaacgtatgctgaacgtctgccagctgcgaaggctgtctcaataatgtggaatagacgacccgtatcatgccggagtatcgcttccaagactgggaaaaacgatccaacttttggggcagcgtagggtcctttgtgcgagtagcaggaaaagccattgttcaggtgatgcggcgctttctatactgcgtggtatatcgctcggcgtggtctcgagcgactgttcaacgaaattcaataaacgtgttcgatgtaaaatcgagctgttaataccttcctagacgcgattcttatacagaccccgaattccggggcaagctgcccgcctgatcttcatattcacgaagacaagccacaaggctgtgacactctatgtgccagacacagcctatttttgagtcactttctttttatgcacaagtcacctgaactggggtgaaaggctgaagcctgttgggttggacgatcgtcttaactgcgaataatcgatctggtggatagcgcgcatggggatagttcgttacttggcgcctagatctgcacaagtcagccttgtgatgcttgtgatcctatcagcatcaccagctggattccgacacctgaccgttcggcacaaggtttgaggcaaattatactagtttgcaaggtcagtcgccagagcctcttgatccgtcaaaacattggtcttccgcgctatgatgctcaggcaaggaaactcagaccaggactcagtgacctgctcagtatcagactcttgtcgcaatgcggcgcttaggttataggcaacgactgtggataatatactccttccggaatatcccatacctaatctcagtgtctaaggcggataagcagagttggagtaatcatcagtatagattggctgtgacacagatactttgcaccacatctgcacatctggtgcatcatgcattcctatcactttatctcgatgtcagcgacggaattcgggaatgtaagtgacagcctggttagtgagcgtgtgattcatcgacaagttcgacaaggcaggagtgaagccaaatgtattccatcttgacgccgtcaatttatcatttctcttctcctgaatagtcccagagagcgcacattcgaggatcaagagctcgatatcatcggagggtaaactgaagaagcgaaacttgacttttgcggaggctgtattcctaatggtgcataatcacgtgaacttcccttgacattgaacaactcctgagaacaatcaacgcacgaaacccgttgtgaattcgactatcgtcaaacgactctcgaattcaatggccttgtttctagggcaattgcattacttagagcagacaccttacgagaaagtcgggtgaattgagcaccatttgcagcatgctcagggcatcatttgggaggccaaaaaatctgatagtaaatcagaacactggccaggtatacatagaaactgtttcggccccggcagttgcgcattcgaacggcccagcatgggttcatgagtcgccatatctaccaagagggtttgaggaagggagcgttttcgaggcatctccgctgaggcatatcgccatgagaaaacttctcttagaccagaggaacctgatgccgtcgctgttcacgaacgtgccatggagtattgctagcgatatatgggcttttctggtaggtggtgagtaagcccataaatgcattataccctagcttatgcacaacaccagtaagagacagactttgcatatgtggaaacttctcgccacagtttatccaactcagtttgcagaattggaacaataccgctcattgaagattgagggtcctaagctttccatgagggagtacctgggactggtgaagagcgatagcctgagctggcgggttgtattgaccctggcaacatcatatgctcgagtgcctgaaatcgttgggatttccgagataaagaatctgtgtgcgctagatgttgccacacccgcaagaccggacacatggcttgatagcaccgacctacagtcaacggctctgactgaccggatagttcgctcctggagcgaatcggctcagacgggagaggcattctcgcatctgcgagtcctggttctacggcatcagacaagtctatcgaagatagcacttcactatatgagatcgttcccgaaattgcaagcggtcatcgcattcggatgccctggattcgagtctgcactctctggtggcgatgtggatggatggacggttgcagaggtgaagcgatctgcaccggctactctccacgaatactacgaagctatctgtaaggcagctggcgctgactcaataccagcagaaagaccaatactggacttccagatcggcgagctgaaagattcccgtgaatcagtccgcgcaccatactcgaccatgtatctccagcgcacaggcggcgctcctgtgggagatcctgacctaacgaccaggaagcgaaaat

SEQ ID NO: 12259 - DNA, 272 bp, Emericella nidulans
ttttggcccgatggaagtttaggggggtacggtatgctcttctaattgtctttttggctatatggctatttctgtgcgctcgagattatgcttgaacttattactaggatgaagagtgattatcgcatcatcgtagtagcattccgatttgctggaagtctagtaacttatgcggagcctcccttcgcggacatctgcggtgccacctgctcatataggataacgaacgatacttattcgtaagatagtcaggcagggacgcacccctcacg

SEQ ID NO: 12260 - DNA, 1124 bp, Emericella nidulans
cctggcgatgatctagcgctggacccagagcaaccgttttagtttttccaagagtggtatgacgaggaggaccggaatcctgttacagtaaaacggaggacggtctaccttatcggaccgccgaatgtcgacagatcggcagaagaggtgaatagttgggcagctccaacactcggtccggaaactgggactgaagctggatatggggctgaagggaaaaaggaagcggtgttgaaacccccggcagtagatgatattttaccctacatctctgcattcttctccggtttaccagtaaaaaagctcaggccgccaccgtcgaaatggaagttcacgccttggaccgaagaattgccgaaaaggtcaaagaaagtgtcctatatcgccctcactacacccaaaggcgaagcaatccgcatccgcacccgcccgtgcccagcgtctgacaaactctacctacgccaactgaatctagatgacctgctcgacgtggcaattagcatcctccctgaggacgcttatgcgctttgcatgctagtgcaccacgacctattcgaagacgacgaggacatcttcgtgtgcggacgtgcatacggaggctcgcgcgttgcggtggtctcgacggcgaggtataatcctcttcttgatgactctttgtacgttggaagagaccatgcatggccggggagtcattgcgtctgctatatagaagatatctgcaaagaccatgaccctgatgacagcggaactcactctgggagaaagagaaagaggaagaaaccaggaatacgccagcaaccgcacaatcgcagcggacccctagaatccgcccttgctgctttcatatctaccccgccacaagcggggggagatgacttgccagctttatggcgctaccgcatcctccgcacggtatcccacgagctcgctcactgcttcggccttgaccactgcgtgtactacgcgtgcatcatgcagggcagcgcctccttggctgaggacgcgcggcagccgccgtatctgtgtcccgtggatctggcccacagtgtcggccgcgacgggttcgagtggacaaaagcgaaaccaggcgctgctggaatactgtgagcagccgggaacgagag

SEQ ID NO: 12261 - DNA, 2142 bp, Emericella nidulans
aaatggaattaagaatagagaagaaaagaacgacgataatgagagggagaggcgtgtgaagtgttcacggtgaggaatgccagaagcttggagtggagttgcgagcctgaggcacaaatttacgtcagggctttcctttttagtaatctaactatattctccgcacgaactgcgcgaactcaaggactatgagtacagcagctcagaaagcatggatctcaaaaggacctggagcaggatcatccagtgcccacttgatcccccctgccatgacctcgtcccacttcttgcacaccgacagccgatctccataccgtctaaagccatgcgggacacccttgaagacattcgtttgtgtaggaaccctgcataacaaattatcagcacaggttattagacagggaaagagacatacccattctcagcgagcagcttcgcatataacagcccctcatccctgaggacatccatcccagcgaccccgaacgtcgatggcggcagtcccttgacatcttccttgctcgcattccctgggttgagcctcagatccttctcaacctccttcccgccggtaaccttgagcaatgacgtaaagagctccattctcttgaatggcagaaccggcgcatcgcggttttccacgtagctcgacacgctggggtcccggatctgcgccagctgcgggtcatagcagttataatgtgccagcggaggaatcataagaacctgtcctttgatcttagggcgttgcgcaaggtctttgtttctgcctgttgcctgagcgatcgtcgtcgatgcagtcagccatgcgccggcggagataccgcccatgacgaggcgctctccatcgccaccgatttctgaaaggtggtcgtgaatccagtgaaaggcgtcttcagtgtcgttccaggcagtcgggtaaatgtgttctggggtgtggcggtagttgacgttcacgacgacgacgggcgtgttttgctcgtggagtgaggcgacaatccgcgcgcaggttgcatcctcggatgagagcgtgccgaacaaaaaaccgcctccatgcaggtgaatgtagataggcagaggctcagacgggcttacatttgcgggcctgtagctgcgtgcctccaggctgtagccgtcgcgggtggggatggtgtggtcgcgcagtgttaccttggaagagaggcctacgtgtgttaattacgtctaccgtccgagtgtacaagagctcaccctgctcgatcagctcacgggctgcgccctcctcgcgggttttgttgacggcgtccttgagctggttggggtcgagatcagggacgtcagcgggcagatcgcgctcaagggcaacccactcgtcgctggggccggtgtactcagagaaatccatggtagaaatattgagtagactgatgaacaaagtaataaaagacagtgcaggtggtcgccagagggaagcagtgatctcggctcggcagtgcagataaccgagaatatataggctgggtgggtaccagagacgacaaggccagatccaaagtatactgtaccccgcagtcactgtcgcaatcgcaattgcaatctcatcgtacataagcggaccaggttatctccattatgtatatcgtctcttactctaaggtcttacggacctcggttggcctgctgttgcttacactgggagggtcttaagaatacgcaaagcattgatcctcggcaacaaggcttataaaccggcttctagctgctagcaggacccagcctgtacgacgaagaaggctattaactaccttggctagccactcggccttgtcaaatgacacagaagttcatgccgctggtgggggccgcgtttcccccaagattctgcatctggagtgccaccaaaatccacggcccaacctgcttaaaccgcctctgacatggacattatctctgcattcggtctacagcagcagcagcagcagcagcacatcagttcagttccattctgcatgcaagctacagagtatggcctctgcactccctaagataggccaccatccaagctggagctcgagccggagcccaactgcaaagaccaccgcaaccaagcacccaaagccgcaaaatgtttattgtctctagttcccggctgctcacagtatt

SEQ ID NO: 12262 - DNA, 582 bp, Emericella nidulans
atacactcatgagcctctccgaccgaccagaaatgaggcttgaccctgcgatcttatgttaagcggcctgaccatcatccgcggaaggacacgcttaaccgatgcccgccaaaccctagataccaaaggccgcttctacgacagccatactgcacaagaagcacactacgactgtggcgcacacgaacaataaacgaagactcagacatacatgaaccacgcgtctttgcgagtatctgcaacacaggttttgaatagtcgttcgcatcctcacagagctgaaggagctctgctgcactaaccccccgtgcgacgaggctgcttctgctatgtcgtggcgtagaatacgcagtaggcaacggcttccctttacggcacatgcttagtgcattcatgcccactgagccggcccagcgttcagggactgcagaacagcagcatcaaaacaatcctaatccgcccattccatcccgtcatttggctctcccttaaagtgtatgccacccaagacccttatgggggggggttttaggggcaccccacccctgaggaatgcctttggcggtcaaaactccaattgcc

SEQ ID NO: 12263 - DNA, 4103 bp, Emericella nidulans
ggggggggtgaggatacgagatataaataaaacaccggctatcatgaacagatagaggtcttaaactaaggaaggccagggcacgtcaaaggcaacaataacgttgtggttaggagaggtgcacaggggtgggtttggaaggttgacaaaccaatagccaccccaccggcaaatatgggggggacgaaaccaagagacctgcccatacccgttggacatatgtaacccccgcacggggggattgagtttaacgggtggttttaaaaaaggaaatatccatgacaggtggggtaaaaagttataatggacacgccagatacttcggttaactgaaacgggccaacagccttagaggtcttcccgttccccgagattaaagtttgagcaagaaaaatgtgttataaggctcagtaaatcaatgcgactgaaacccaagaccattataaaatacatggctttgacttgtctcaatccggccatcgagtatctgttggacacgatgctgaggtttgcgcatggtaaagcttaagcatcatgatcgataaacctctgtaagccgaagaatgatctggcttatcttcctatcccatgcagtgccgcttccaagggtggtgctctgagattgccgcatgcacggcgtcaatagtttcgagagaccggatcgagagattgttcccttattttgatattcaacgcgcgactcgcgggaatagaataagagctgaggcaatgatttgcttgactgatcattgatctgcattcttatcagcaatacggaggaatgaagtaacgatactccttgtgcctgaactgcttctaattctcaccctcggtagacgtgaatggccaagccatcatgtgccgtggcggcgtctgtgctggagatccggagaagacagtctggggcaccacattctccgagaatctagaagacaacatctgataccggagcggcgccattgccgattgctccaagcctcgaacatgcgtgaaacttctcctgaagcgcccctgacgcgcatattgccgggggaagcggaccccggtcaagaggcgttgcaggcttgtgtcagaaagagagacttggatggaactggaccaggtatccggtccaacccccagattttacagtactcggcctcctgaagtacggtaggatccaagccacccttgctttcttggctcaattccaatggcactttgcgatatcaggcaccccacgacctccgcggtcaaccactcgacctcgtaaattggtgagccggccggcgccggagagataaggagtggtgcatagctagcagatcgtcgtaacccggcgactgacggctgtttagagtgcacacggttacataggactggggctggaagaacagcagttagagtgatagcacaactaccgaaaaagggagtatgcagacctcaagttcgggttcccagaaggatcgggttcaagtgttgatcgtcatcgggaggactggaagaatggaagtggaggatcacgtcgaggcttatcagttgacatttggcagaacgtaacctcactgataagagcagaaggcagagttgaccagtcgcacggcttgcctcagcctcaactcaaccgcgacaatcaaattatcctctgcttatctcgatttattgttgaccccgacgcaattcgtccaatcaaccagaattgccaataatgtgatctatccttcatggcctctaacggtctttattccctcttcatcctggaccacaccgttgccgcgcctgggatcttcatctcctccaggactatgagcaatggcataatggactaaggccacgaaactacgtcttcttggccaatgtccctctcccagtcacaaagctcactcgttcattgccactattgatgtctctaatgatggtgtggtccctccttagagccactagataagcacagccagcggcattcgacgcctcaaagaggtactactattctcccggtctctctagctgctaacactacagtttgtatatattacttcttattgctctttccgttgctctttgctaattcggttcagaaatgttcctagaaggtcctgattcccactactatatccgtgcttcactgcttcgggcccctcagcggagttcaatatgtccgcgttgacttctgtctggtggcctgaggatcgcatcaaggcgactatctgtccagattttatattcaagaacctcccgcaaggcacattgcctcgcctcgttgctccgctgccatggggtgagggtttgacaagcgagacttaccttgattggattctcgccaaagctggaaggctattcctaattcttcttgacatcggcatacctggccgcatcttccacttggtggatgaatcattcgacgataatgacctccccattgccgcccatagcgtcgaccgcttgcagctgtctcaggatccagatccggagctggattccaagttcttcctcgctcaatggcgttttctcgtccgaggtatcggtgaaggcgagcatatcaagtacacagagaatgaaggcgttccagttgaggttctgcagacgggaaccaatctggcaaaggaaggtgttgatagggtcgtcttggctggcgcggtctgcagggtttacctgcgaacccaggtgactgttggcggcgcgccgcactttttcgaagaggacgaagtccttgaggagattcgatcgatgagaaggttggctcacgatcatgtctactctgtctacgcatcatactttgccgataacacagtttgcatccttttctcgggagtatatgagagaaaccttatgtcctttctgacagacacccctcagtctttcaagaagcttgcgaaggagcggcggcgagaaattctagttaactggccgcactgtcttgcgcacgggctatcctggctgcatgctcatggccaagtccacggcctgattcgcccatcgaatatcctcattgattccgacttcaaagtcttcattggccagttcgaagccttagataccttacttcccccagtcaaagtggatgacgttgaagcttatcagtatggaccaccagagagatgggtgcggtctataagcgttcaaagcagcgggcctacaggcagcacactcccttcaggaggacggaccggtcgaaaaactggagaacgcccgaaactgactctcagccgtctgaagggcttacatatctcggaccctgaggctttgagcccccctgctgagtccgttgcctctcatggcaccgttattcgcgttggcggccaagaatcatcccgatactcgattggattttcctcctcttccgggtctagcaacggaagctctagtcgcaagcgcggcatttcgatgaaacgtcccatactctataccccgtccatcacgtcttccaacggctcaggatcctcagaggagcaagggacgatcctctacaactctgtcgggctacccactgcacataccggcggtggagcactggtccaagtatggcaatctcgacagaccgacccagaagcatccgacatattctcactcggcgccgtagttttggatatttttacttacctttgcaaacggaaaatatccgcttttgccagccatcgaggtgcaaaaaaccgaacggctggtcgaggtggcggtgttgcagattgttctttccatctggaccggaacattggccaagtgagctcatggataactcttctcgacagcgacgcgaagaagcgcaaagaccccgtcttccaggccatccggccgatgctcgcaatgtcgcgagacatggtaagccgagatccgggcgatcggccctctgccttccaggtggagcaactattcgcttgttcgatcaaaaaagcagagggtagagttgcgctctgctgttcgtctaacctgcatcctggccgtcgagggcgtccagatcgtgcgacgaaaaatgacaaactggctgtaccaaggatagcatcggcatcaccatcaccgttacgatcacgatcgcgatctcgatcgacgtcgagtctcgctctcccaggaagccaaagaaaaccccaagcccccgacaagccaacttccaagacgaaaacggcctattg

SEQ ID NO: 12264 - DNA, 811 bp, Emericella nidulans
tgcctgctgtttcgccttctccttctcctcccttctgtgattgatcggttcattcatgttgacgcgcaatttggtttgcaccgccctctttgccttttaaggtaccgctatctttaatccccctcttcgcctcttgcgcaatcccagtacaaccccaccatggcgacggcattgcgatcacaaactcccctacaagactcatttgggccatcatcacatcctcctgatacactggtcccaggtcggggctacggcgcacgatcaggctcgcggcccaactcttacgccggcagtacttccggatataacggcgctcacggcgctgtcgacccgtcccctctcgctaactacgggcgcttccacgaggagttggataccatgagcatgcggggttctgcagaccgaccgtcaataatgcaacggtcggcgtctgcaatgtctcactcgcgtgccgccacgccaactagatccgggaccctgaagaagaagtcgtctctgagtaaaaggggcagtctgcgccgcagcggaagtcgccgaagtatgcgcgccggaagtgtgcgcagcctggcattaggcgatagagagaaatatgcggtggacggcgaggaagacgtcaacagcgctttttatatccccgttccgaccagcggcaatccgacagaggttctggcagagcgcttccagggtatgttcagttccccaattaccgtcacttatattaatatgctaatcacaccgattagcttggcgcaaagttctcaaggatcttgatgtggtttacaggagctgcataagtatatgaacccgagcg

SEQ ID NO: 12265 - DNA, 2033 bp, Emericella nidulans
atgaagggaagggagagggcattggggttttgaagagtattcgcctattatatatccattacggaagtgatccagacttgcactgtaaatcagattcaatattgagtgcatatctgaaatagcctagttgccgcaaataaaccctttcgagcctgaacgctacatacctatccatcgaatcatgcaatgcaccacttcgactggatatgccaccaccccttaaaatggataaccggcaacttctctctcagcatgtcatgttcatgcagcttttcaaaaacgcctatatagtgcgccagaaaaacttgatttccgtctttgcgctcacgaacatgcaccaagacacttttgtgcttaaaggagtactggattgatgcacggcgccgcgtcaataatgcgaaattgtccaacatgccagccttgagaaaagccaaccatgttcaatatcgtccccattcagatggcacagagtggagatggattttgaaagttgttatatcaccgccaacgggaccaacgccctcatcctctgtagtgacggtgacgtagacgggtccgaggagaattattcctaggtctgctgtcctggatttatcagctgcaggtgtcttcagtcgtaatgccgggagagagacgagcaggccatcaggtttaactaaaccgcgctcgttactcgaccaggcaccctccccctgggagccagagccggtatctaatagcgatattggcgcccatttccaccctacagactggttcaggggcaatttccagagaagaattgtcagaggcatccttccaatatacgttagtagtgtctgcatcctcttcacccggcactccatcaacctcgcacgcgcgtcgatccccaaagcccaagcggctgcattgagcagcgggttcgtttcaatcagagtaagccagtactttactctcggctttaacggcttgatggccgtaatttgcgatgtatcgcttcccagcatgtgtccgaaacagatcgtctcgtcttcggctttgcttgccgttcgtccgcggaagccaagagagacaccttcgaagaaggcatgatagtcgtattcagtccctgtagcccttgagtcttcacgcttggagatgatgtttctaagccggaactcgtcacggatgtcccgcgtgctgaggttggagtgcttagttacagggcagaagacgcgcgcttggatgttaaagcttaggtcgtcgtctatttctgagagatccgaaatgtagccggcattttctacaattggcatccagatctcgtatgcttttgtggccgctgagtttgagctcgagctcgagtctgagtctcgtggtaagagggtcaatgcacgagcaagacgaattgcattcggttcgtcgagcacgttttgcagccctctgccttcaagcatgctagatacggctaggatattccgctccgcgtaggagcggtcgaagacaaaattcgatgagactgggccgtcattgaactggaagaggagttcttcgcccaacggccctctaagggcgtccaggcgcgcggcaaccagggacagtacttgatgcgttgttcatctctacccagatcatgcctgtatctgtgcccagagatacgagcggctcgacctgacccaggacttctgcgaaaccctacaccgccacgctgctctgaagctgaccttccctcgtgctgcgaaccccgtgccttccattccctatccctcagctccttcttggcctatcccactctgccccccaatctactaatgctaataaacacctcttctccacttcccgccccctaacctttctgctcccgcactggctctttccccaacaatccctacctctcctattatccatcccttttccccactaccctcacctccctactatcacacttcacctccttttactaatcctctcgatcttcatcttatccccatctccttttcttatcactcctaatcatcctctttccattctgctcccctcaactaactatatccactctccctttatctcaactctac

SEQ ID NO: 12266 - DNA, 997 bp, Emericella nidulans
cgagaaaccaaaacaaaagaaaggcttcggcgccaagcttctctccttcttccgcggtaccactgctgccggtatagagagcaaactcgccatctcgcacgcccgcgctgaaatcggtaacctccacgccaaaaaccaaaagggcgttctccgcaagaagggcctcgaaacgctcccaatgggccccgttgaattcgatgcgcggtaccaaggacataggggaatggccattattgattcctcgcacgaaccggcgttgctctattttacaacggacgagacggcgcacgtcggtgattatcggatggagagtcggaagaacggtagcgtgtatttcgatatacctgttagcgatatcaaagagatgaggaagattggcgggatggggtggaaggggaagcttgtgaccgggtgggctgttggcgggaaggaggttgttgatgggattgtggtgaaagggaatcactcgcaccaggagttccagttgacggccgtaactaaacgggatgaactgtttaaccggctggttgcgatagatggacaggtttggaatagcttttgagttatcaatggattctgctgaggtttgacaggtctggaagtaggccgttcgatggctgtaggataacaacgtggacatggatggagatacgggagttaccaggggttgggtgtcacttttcaggcgcttgatagcattttgcatagaaaatgaaacgtgttgttttatagagtgggcgagttgtcttgccagacccaaaagtattacactacgcctccagactatccaattttccatcccacttccctttctgttcccggcacaactctcttcaactatttttttctgcttcctacccggccgtccagtgtagtgacttagtcacttgccctgttgatgctttggttactttctggttcttcgtacaatggcggcgcgaacgaccacagtgccggcatatagacggggatattagattgggtgactccatgagga

SEQ ID NO: 12267 - DNA, 644 bp, Emericella nidulans
aggccccagcctccggccagcggaatgaggatatggacttgggcggccaaccggcatgctgagatcccgactgacaaacgacggtgtgcaggattacccccattaccaatattgccgcaacactaacttaaagcctatatccagcaatcacgacaaacgatggacgtacggacattcttgacaaccgcttcttagaagactatcttacatacgtacccatataaaacccactggctccaccttgagctagagtttttggcttaaaccgctgtaatgagtagaatcatgcaatggggaacccccagttcggtatagggtgatccagcactgggaccacgacttatgaaaatttggagagtcaagctcggagagatagaacacggccacctgtattgcaccaagccttggcttagggctcctatcctaagcgtcctggtgaaaactatccctttcggggactgtaaagacatccactacttttataaatctcaatccgggacgattattgtcgcagattgtggttgatgctgtattagatagtgaaacagcgacctattacctttactgtggctcgccctaatgtttatgtgtctactttcatgttaacgcttcatgataggttatgctctaaaaaaatctgacat

SEQ ID NO: 12268 - DNA, 852 bp, Emericella nidulans
  unsure (1)..(852): unsure at all n locations
tatcaattgatgtctggaacacancttcatgagtgatgtctaccacatatatctttccatgatcattatttttttttcttagaaaacccattcctagtatatgccatcttaaagtacaggagacgtttcgaagctgtccgggagtttactcttgaaagtggccagcatgaaattgagcgtcaaaaccagtgaagaaagtcagagaaccgtgactctatagctagtccagtgctttcagcttctgacgaggatccccgtttttcgttgggcgcgctggtacctcttggtcgcatttctgaagagaataaccctttctctattgggggggacgactcagaagacgagggtgatgggcggtacacacccccacaggactcagccttcgtccagacctttcgtatacagttattgtcgttcgtgatagacgattgtgggccataacagctgttagggttgtttgagaaagtcctaggtatgatgcctgcnggtcaatcgttctttttctacaataatttatacgagctaattatgttgtcggttttttccctttaacctaagtggattttcttccattccgtttggtatgaatgattgattcatctcccgggatcaaatatcttataagttttgcttgattattgtttcttacttctttaacctattcatccattattatgcttatgcagtattttgaagctctcttatcttaatgtgactcgtaatattttcacttcctttttttggaaccttattctacatttgtgtcacctttctttctacttttcggttacctataatgtggtcacatcttcttgtattttcttttatattattttatatgttctctttctt

SEQ ID NO: 12269 - DNA, 1716 bp, Emericella nidulans
gcaggctgagatttgggcttcagctgattgagaccaaacggatcgtcgtcatcattgaaagacatatcatttctcggtggtaaagtactcggtttgttggcgctttgtgcctcgcttgtaggtaccttcagggaagggctggggctcggaactggaaagtgggtggatgcatctacgggtgctgaggcgttgaaggcggcgagaagatcgtcctcgtccggagaggccgtgttgtttcgcgaaggtgctgtactagaggcaaacggattgttgctccctcctttctccaagtcgtcccagaactgagcgttctgccctccatattgcgcttccagacgtgcgcggttctctgcttctttcctggccttctcctcttgtaatcttttttgttgttcaataagaggaagattcctggtcgtattcgaggacccaaaggatactaggtttgcgaaactgtcgccgctgggagtggcaggcttcgaaggggggttcgataatctggaggaggcggagaggggagtagatcggcctgaggcgttttggggtctcgcggctggaaacagataactggagcccatcggcggaggcttggggacatcgctagggctgttggagctccaactgaggccgttcaggtcatccattgtttatgcgtgcttcaatggtttggacaatttggcacttccgacggcgaaggaactgaggttcggctcaccactaagggtcaatccaagcggcgctaatatatgtgcagtctaaaagtaaaatggtgacattaaaaaggtcgcttcaatgaaaaagactgaattcataaacattgggatgctgtgtcaatgactcttcccctggagcatcatgggcgactatgtggctcatggtaagtgcttgcgtgaccgccccgctgatagagagcgttctgccgtatttgatttaccgcctggataatgtcacgtggatgatgactgtttcgaggtacggagccaagccactgaacgagaaacactgagcgttaaaaggaccgtcaaagtgacccagaaaggccagggtacatcattaacattgagcttatgtcggacatgtccagtccgagcgaatatcaatagacattgaattatccacttcgcaagagacccttccagccctggggaatttgcatgaaactacctgcagggcgcctgttatctccgtcacaatgaggcgcatgaggcccgacgcttaaggcgatacaaccaaactactccgcaattttaaggctaggtcccaaaatcgatattggagaaagtctcaagctcaatactccaagatgatcgatgactcgagttcgcattccgtctaggcttctggcagtggcttcgggcttccagacttcaggtattgggcgcaagtggagacgcgaggttgaatcatcaggcttgcactactaccaccaacagattgaatctgatttttatgaagtgatgaggggcggaccgagcatggaccattctggatcgtggatgcagcccttttttatcataatctcagcggcacgagtcagcagccaatattttccagccacccggacccggtcggatatgtcagttctcatttccggctcaataatagcaccgagaagcttgctgtacggagcacggagcgatctacggcgcatttccatctcgattatcgttcagggatgtgaggggctgtgaacgctatcgctggcggccgttacta

SEQ ID NO: 12270 - DNA, 515 bp, Emericella nidulans
tctgcgcaaatcaatctagtaatcataacacccgttgccggggattttacagttgaaataaaccattgctggcccctgacctccgtacgccgtccttacccgccatgggagaaatgcgggagtgctaagcgtcacctggccatgtccgtctacacgaaaagtggggcggcatcaacacttccttacaaagatgcaccaccttgccgagcctttcgtatatagcgtcctcgtctagcgtgattcgtcactgctatcttgttgcgagctgctacactttaagacaggattgctaaagcttcacaatgcgatcttcagaccggagaggctccaccccaacatcccgcccagggcccgcccgaacttgctctggacgatagtgatagctcgggatgttgtcgactccagtcccaaagacggcttactcgttcgccgcacgtgattgcgctaaagattgcaacatgataacgcgaatcttgagcgacagctaatctattaatcgtcctgtacttcacttt

SEQ ID NO: 12271 - DNA, 3266 bp, Emericella nidulans
gaactgactagatgagcaaagaactttcctggatggccgcgtataaacgagtcccccatgattggtgtcagtcccccgaactgggtgattagttctaatactcttgcgcgtacttgtaaaggaccgaaggcgctggaatgtgctggccaggaccgacattctgggggggtggggggagggttagaccgtgtatcaagtattatcaggagcacccagagtgaaccgcctcgtgttcggcaacatgttacaatgagattaatagcatccaatctcaaactcagcctgattgatcctcctccacaatccaaccctggcagaatctgggggaggggggttgcgggcggggaattctgggggtggactctaggtggcatatcccctgtactctatctcatgattccatgcgacggtagaatgtgccgactgccgagaaggcttgcagagcttgagtacgcctcgagtcttggaaaagtcttattggctacttcgctcccgcgccatccacgccactgacgttggagtatgttacttgtcagaccaaatttagcccccacgctcagctctgatgctgctggggtgatctcggtagactctagtccggttccagatgctctatgctttgacttagtatattgcgccttctggctggataaccagtctggataataacagggcctcactgcgctttgatgcaaaccctaaccgcctgccccttttttcccacgcccatccgccgtccgaatccaccaggcagccccctgatagagcccaaatagcagatgaaagacaaccatctggtaattcctccttccaaaaataagcacaacacccgcatccgccagactcataaacgccccgatccatagtaaaagacccagtccggcttcgtcgtgcagcctctgcaggctgactagagcaataccgtaacccagctcgcggatccctttgacgaagatgagtggtgagacgctctccgcgcgaccatttggattctcgggcacttctcgggggatgccgaattcagagtattgactccgtggttggatgaagcagcggacggcccgcaagatcagcgcggttccgatattaccgccgatattggggctagaggggttgatgaatcctagatggcgttgagcttggcttgaaagcatgaacccagcagtatttataacgtgcagaggaagatgggaatggggttaggggccctagagactctgttgttggggaggtaagaaggacaatatggtcatacctggtagatgtgctcctaaccaggagacaactaccgccgcccattccatactgggctggtcggtatccatagcaaggtaaacgacctcagagtggttcatatagcttatcccgttgagctcggtagcataaagagtcagtgtagttagcaacggcgggtgtcgacagtgaagagccgctgacgcctatttcatattcggttgacggtagattaccaaatagatgatcgaccctgataaacctttattctgagttgtgctgagtaaaggtgctgatcattaggctgtgctgcgcccagagcagggcaataggatctgacatgctgacattccagataggcgccctggtaggagattcctcggggaatactctggtcccaagattgatctccaagtaacagtgctgcccaagagtgcgtcttcggcatgcatgtcaatcgcgtttcagttttatgtcttataccctgtaagtcatctgcttatccaagtataatacagggtgtggcagccgatcgggcgagagtcaaatgagtgcctgatacagctattttaggcacagctaaatactttagactaaattcaatgaatccttgatttgtatgtaaacaggtcatagggcgcaaaggtacagagtacaatagtaaggattccaacagggtccaattgtatatctctctacttactcctatgcagtgactgcaatagagactttcaccacccacattatgctatccactacacgttaatcgtacaggtctcccctttaacaagcgtcagccaatcgccagtactcccatcatcacccttgacaaattcccagttgacgacggtctcgttgacgacggtcaacttgctgaacccaaagtgcgtgcggtccagtttcgctgtgatctccgtcaaaccctcgccctcgtcaaaccagctgtggctttcgatgttgccggccatcccgttgatgatgtgcgtcattgacttgccgctgttcgtcgtgtaggtgtggttgtcggcaatcgaggactcgtcgatggtcccgttggcagtcatggggaacatacgctcataccaatgaatgtggcctgagaggtatgcgtctaccccgtactgcagcaagaggttctcaaacgcgtttcgtacgttcgtctgatagctcgagtacgcggacgagtacatgggccggtggctcatgacaaacacccacggggtcttggtccgatcaacgctagccagatcgcgcttcagccactgatactgcgcatacgcggtattatcatcgtaccggtcgccgtcaatcgtgccaaacggtccgctgtccgtggtctcggtttcctcggggcggggatgggtctcattcccggtgagatcgcgctcgaaggtcgagaatggactgttagcaaagtcggtttcgccgtccagactgacgaagtgcgcaaggccgtagtcgaacgagtaccagaagttgccgacgccccctgtttccttgcccggcatatggaagcggtgctggaaagccgtgaagttgcgctgggagggggggcagctgtagtaagtcaggttctcggctggccatgtcccgttagggattccttcgtttagatacgcggtgatgggattgcctggcccatcgaactcagcacacgctgactcgtggttgcccggcataaccatgtgcgggatcttcacggtgaggttggtcatccactgctgccatagatcccagttcgactcgtacagcacgctcatatcgccaccctgcgggcctccctgattcgccgtctcgccctgcggaaggggctgtttgtactcttcaggaatcggacctccgcctggcaattgcgtactagttccattgtagcagacgggccagtcgtccgcgcacgggaggatgccagagaaccagtcgtccgcgtagcttagatccccgccgtgccaggcaaacgcagcgccttcgttcgccgctttaaggagttggcgatgcgtgccctgggcgttcgtgtaccccatgtcgttgaggac

SEQ ID NO: 12272 - DNA, 566 bp, Emericella nidulans
gtggaccttggatctctgcgcaaattcgacttaatcctgcgggaaaagagcgacgaatacacgaaaacaatacgtaaggtacagactctaaatgtacttggctacaattaattcgcatcgatggagccgacttgccgacagattatagagtatattagcaaaggatactcacatcaggatccgaacagtgccctacacacccagcgatcgattaatactgccgtgaccggtataccgtgagcgttagttactgaggtatcaggaccacgatagcattgatgcgacaaaggcggatactatggccttaatcgcactattggtatccacagtcgaactacacgcatgaagttgttgttggagcgctgggcttgcaacgagacgccgcgatctccattaaagcttcgataatatccgtagtagctctaaaagacacagactaagccagacgccttgcggcgtacaataacgaagagaacgtgatctaaggggaattatacccagacgcgtcctaattgaattcagtaatgatatccttggcttgccaggggcaacgctgcgtgcaactt

SEQ ID NO: 12273 - DNA, 358 bp, Emericella nidulans
gttatcggtgtgcctatttagtacgctgttggagaagtaatctggtacctatctataccttccgatacttataggttctactatacgcttgtcgttgctttaccggagttacgtggcacaggtgatgccgcggacttttcgattggtccgaaattagctcgcctgctcaaaatagctgtactacagtactgccttcgcctagtgtaggctatttgctccggtattaaagtacgttgcggcaggctcgaatagatgattatcgttatgagcgcgtcgtactacgaaccgactcctcacatcacctggatcttcacgtgcggagtgcctcttgctcctcagctgaaattcgcccctcgtt

SEQ ID NO: 12274 - DNA, 635 bp, Emericella nidulans
atgaccgaccaagcaaccagcattggatatagtggcttttcatggccagtgcttataacgagtctgccgaacctacagataacacaccatgctgtgacatgagactctggttctagtgcttaactttaaagagctgtgtacagaaacctactcgcaggagcccatacaggaagcgatatggaaagtgtgttgtgtgggagcgttcttgggtggatacatatcataggggacgacctatcgcgaaaacataaagaccgtatgcgcattcaggcgacgagcaatataacgaagacgtatgtttgggacccatgctgtgctggaagtattgcagaagctacgaatcggcgctttccgacagaatggacatatagatcagatgtatgaagctgtcgtagtttgacagtcaggactaggacacgtgcacaggaccaccgactggggacaggtacactggattagctgaacctgcccgagacccgggtccagtgacttgcgttagccctggaaggctcataataagagatctaaccgttactgaaaggaagcaggtaaattgaagaagttccgaagagcatgaccggtttaccactgcaatgtctgcaacggttttagaagtttataaggtgatgagaaag

SEQ ID NO: 12275 - DNA, 898 bp, Emericella nidulans
cttcagtacgagtcgtaatgcgaagattcgctatactaaaccgtctctggggatattgcgaagtggccgctcgacatcaagcagagagaatagttcgacgccgaacccgtttgtgaacgttgagcggggactttcgcctaaggatgcggagtatgcctcgcagaagagtgagcgcagaaaaaatgaaaagagtatttgtctatctctgtgctttcttggtctatgcgtagctaatgaagtgggttgaactataggtttaacctcgaacaacgccgctgtcacttctgccgcttcctctcccccttctgttacacaagacgatgatagtgatgactattcggagatcgtacacagtgtacgcaagaatacgaggaatcggggcttgaagccgcataatgacgaatctttggagcttgccccggcgactcaggatagcgatagcgatatgaaggttatacgcagcgcaaggaagaaaaaagggggtagaagcacggagagagggaacacttcagatcgaagccctgctactcaatgcagcgatagcgaattggaagttatacatagtgcaaggaagcctacgcgaaacagaagtctgaagcgtaagaggatagacccctcggagcccgaagattgccatgtttcagatgaaagtgaagctgaggagccaatttctcggcctcgccggaaactcaggcgcggcggagctccccagctgattctcgttgatgagtcagatgggcaacaggaggtccgcggcggtgcttcagaatcaccaagcatacctcgcacgccgcgacgcaatttgtctcaggatcgacttgatatagaggaggaccttgaagatctacaagactcaggtatcgcccatctgttcatgctttgaagataggtctaatat

SEQ ID NO: 12276 - DNA, 1278 bp, Emericella nidulans
ggcgcaaccatcgcaatcgtccatatgaaaccgcatcctccattccttccgacaattgcattcgtatctgcacggggtgtactgactttcttgggctgcgactcgtcatcaacaggataccatttctgggccttctgggacggcacaagcctctgggcctttccaaactgcttcgtcgtgccaacgtccgacattttggctgctgatgacgaagaagacctgaaaagaagtagggggtggttgtcgacggcgggtggttgttgagattggtgtgtgacggtcgactcactgtccaaaggcggagtggtgaggtttgtgggaacgcaagccctatcagttagccgaaaggcgctagtgccaattcgggatcctactgataggtcgccactatggcctgaggcatcaggtacggctacccgcaaaagcaaaacgcgcagtcggtctcgagctccccgagccaacacacttccgcttctgagacctggactctggagctctcgagctgacgtatcttcctcacgtttgctgcttcaaccacaccacgtcgtcgacgtggacttagatacttgcaataatcgaaacactaggaaatcatcctctcttcataaacatttcttctttgtccatcgcgagaatgtctataacgccaattatcacattcaaggcgggtatctgtgacctcgaggtgagtttgtcaatgcgtcaacaccatggcctctaagctcatgtaactaactagaagtcatccatttgtagactcagtcctcgggtgtccatgccaaacctcagccgacacccggatacctttacctctattccgaagatgaattgattcatttttgctggcgccctcgaagtgctccccacacagaacctgagttagacctggtgatggttccttctgatgcgacatttacgccctaccgcgcagacagcaaacccacgaatggccgaatttacgtcctcaaattctcatcaagttcccagcggtatctcttctggcttcaatccaaatcccaacatgagaatgccgatccgctttctggagtgcaagggaccttaagctgggttggattgttaacaagcttctgcaaggcgaagagtttgatgtggaaagggagattgcgactatcccaaaaggcccatccaatggtgatgacgatgaaaccatggaggatgttgaaggcgtggaccatgacccaaaccaccctcacggaggtagtggtggcggtgcaggaccggatgcgactgggggagacgtgagagaggagggacagg

SEQ ID NO: 12277 - DNA, 436 bp, Emericella nidulans
aggaccactcgccaatcattaggttggttaaggccttttgtgtctaaaggcacacacacaccgccggacagggggtgtatgattgtcctccacggctcgaacactcagttcccagcttattccacttaatctcaaaacatatctgctcgtgtatgactactaatgccagcgaaagatagagaaaatgaatgcgtacctgaactgtgtgaggtcagtttaagcactatactacccatatgtctgcctcagcttcggtggaaatgcacatgaagcacatccgagggtcccagagcaggcacggccagctctcctacagagcttcgctgtgtacttgacgcttgtaactgcctgatttttcacaaccgacattgggcacgtagacatgtgacctggcataagcgttgaatagtacaagagcccatctcctgtaccccat

SEQ ID NO: 12278 - DNA, 126 bp, Emericella nidulans
cgaggagacacaaaccggacgcgccaaaaacaccgcaggaacacctgttctttttggatggacaaggtcccatcgaagaacgagcgagacgggccagacagggagtcaacgacagatagcaacgct

SEQ ID NO: 12279 - DNA, 564 bp, Emericella nidulans
ggatctctgcgcaaattttaaacgttgtacttgcctgccaaatgctgggctacggctgatgcctcatcgacttggttaccctctcagcgctgctcccagccaggaatctaaacttgacagtgtggttaagccgagaggaataatgcgaatatgtctggcgaggtcggcacagctgatccttaggcctgacaaggagagtgagtccccggtgaggtcgtaacacccgagctatggtttatacatctttagtagggtaagtagtcgagggacgacggttaagtatcttcctgcccttcccccctattcttcgacgactcactgcaagaggagtactgcgaagacgccctgacggtagctgttccagcctggggtccgtaagaaaacgcaggcctgcaaatagttttctaggtaatcgtatttgggcttcccggattacggggttggccttcactccagaccgacctacgggccctacacgtggttgcctacgatcttgaatgattccaatcagctttatagatagtttcggttagatttaaacgatagaaagagcgagaattactc

SEQ ID NO: 12280 - DNA, 506 bp, Emericella nidulans
aggaggagctagccagccttaacaattgatatcccagagaatctaagcgaatatacctctgaatgatacgagtgcgctttacattctactctaacctagtattctgacctcgagtctaagtataattcccttggaatagtctgctagtctttaggatgtgattcaataggttaatcgctcagaatgacctaacagatatagtgaactctgtgctaacttgacccgcgctcctgaaacttcaccgccttgattcaatagcccggtgactgcgtactgcacaggaaaacactgccggattgcttgaactggtgtgagtttaatagacgtcggaagaatgaagacgccccctgtacatagtgatcacatcacctactaacgcttccgtaacccgtgcgcagatatcgtatacttgaactccggggattaacctaatagaccctcataccgctcagttgacgacccgagtctcgtcaaaagagtgccgccctaatagcgcgattgaattc

SEQ ID NO: 12281 - DNA, 1717 bp, Emericella nidulans
tcacaatcaggctgaatcaggctcaaccccaagattccaaggcttgtacctgaaatccccgtcctgcaggagcccgagatcagcagtgctcaaaacagtcgggtgctacagtcaacaaacctacttcgtatctgttaccgactgacaaacatgcataggtgactggttcgcactcattttctactcggcagtaacccaagtccacttcgtgtgatgatttcgacatcgaatcgagcctacctagagcttgcgggagttgccgggcgagccgagtggaagggattttgcaccgctgtttgcggctgatgattgggtcgcagtcggcagaaatgatgactcgagtattttgatcaatcaagaaagcggagggtttttttcgcgcatggatccatcttcaaggctttagtccctgcgactattccctgaagagcaaatccgcctctcgatccggtctatgcttgattttcacaatccgcgccctaccgattttccgggcgttctccccatctcacggtctcaccctacacctccactccctgtttcccccatccctttcttcgactcttgactctttgcgtgcatcaccggtgttcttgtatattagagctcatcctgtgctcattcctttcagtttcgtctgctttgccgttgcttcttgaactccaacggccgttgatctagctttcccggctcttccggcctgcctctcatctgctcgtttgtcattcatttcttcatctccatacttaagcaggcgttcacacttatagcctaccgaatcaactctcgcgtaccttgactattgacacgcgcgcttcatctttgcttgacccaaaccatattccgtcgaaacctgacccaggcgctgatctccgatcgcgttcggcctcagaagttagaagtatacgtgacctgcaaagtatagtcaacgaggaaggagaagggtgcacaaaacaaagcaaccatcgggaggtgcgacctgttctgctgccacacctctcaacacggaaatggcaaccgaaatgcagtccttctacactccttcaactacaacccacatctcgtcccatggcccagcggcagtcgatgagctgatcaacaagtactcctctacgatggctacaacgtccccttccccgggaattcacacgtttgaccgagcgcaacgcaacatcctccagcgaatcgcggaccgcatccgtctgggatattatcggtacgaggttacttacggcctctatgtcatgactccgggcgagaagattgtcgcaaacacttttgtcgtcgtgtttctgggtcttctgatctgggctatgttcttctacttcccgggcctgctcttccagaagttctcgcgcctcgtctggttgttgactggtcagagcggtgaagagatgggagctgcgttggggatcttggatacgcaaccttcaatatctcaatttgcttcccaaaaagcagcattgtcatgattggtatcagtacatgatcgtctgcctttcgtggcatatccagactttggattaacgttttgttccggtcctcatatcttggtgaaactcggttcgggtacgggccttagcaataaaggtagatctctcgtttccaacccggttgtgatctaccgctaactgtctacatagtaaaaaattatctttctttacacgtggagttcggcgctattcgggtttgagttcttcagcaacgaaatagcgtt

SEQ ID NO: 12282 - DNA, 523 bp, Emericella nidulans
gaggagaactgcgccgctcccggattagcgtgcctggtttgcggaaagctgctacactgtatagcctactttaaaggctcgatgagttgatcgtaaatatttgatgtccgcaggggtcgtttatggatggattataaccgtcctcgccttgtttcaacacaggctataaatgcctccttaaaaccaagtgagcgtctgacgtctcgtatataggtctttgcgtaattaccgacctaacccccttacgcggttcgcttacatattacctccggtggttgtttattattaatctatttacaccctaacatttctcccgatttgacccttttttccgccattcttcctagaagatattctctgcgcccagataaacgatgacgtcttctacggccctacagcggttatagacacatcttgcacaaaagctctgccgtccataatgttctcccggttagcacggacggtgctttgcaatgcctggctgccagcgccgcagcgcgcccacgcaccccggcatgaccga

SEQ ID NO: 12283 - DNA, 383 bp, Emericella nidulans
tcaatcctgctaaccgtcagttcatacaggctgtgctgagactatcgtagaccaacttaactctgctacagtttactacgcgtcgccgcagtgctcttcaaaggatgagattatggaccttctggcgcgcttggcgggaggtataataccgcgtatcataagttatctaacgtccttccgtattatgatatctttggacccgtggcgatgcggccgtggcgcgttagatcgtgggctttataaatgagaagtttacggaatactaacggtccgcgtcaagtgccaaggccggttaggacgcgatggcttcggcggttatatgatcctcttcttactagagggaatggagggataatatggactcttacttggactccactccg

SEQ ID NO: 12284 - DNA, 1766 bp, Emericella nidulans
agatgaattatccataattagcacagactctggatctgaccatttgccgcagtgctgaagtagctgcccaatacattctcaaagacaatagcatccgttgaggcagtgaagacatgagaaagaagtataccgtcttgggtgcaggcaagtaatatctgataacgttggccacgatagaatttggccacttcttggactggtgccattcccagtggagaccaacctgtccttcaaatacctattcgcttatcacatccagactcatcaacgtgaaaaggttggtatgaaccaaactagacagcttacggaaatagaatctcgtagatcaggcttctattctattgctttttgctgggccttctttggcgtccaaccttcggaggaaagggtccgttttatgctgaaggcgacactgagataccgaattcgtcatataggcagactgccatctcttccagatatagaccggacttttgtgaggtgattgcggagatctcagcatcagcggagttatacttcgtggtcgacctccacggttcagtggtgggctttcgctacagaataagcgtaggtttgtacgaataatcctaatagtacgttcactgcactcagtagtatcaataatctaggcagtagtaaacattttccgtttcatatcgtggataagcatatgcttccaaggttcaaggtggcgtcctatggtgcgcagatatttgcggtataaaaccatgcgacagtatttacattaattgtttcagcccagtaatagtacaaatctatgtatcaaatatagcggtagccatatatgggattatgcactgattagctccttgaccttagggctccgaattaagcttgtcttgctgtgaccggaatgagtttcgacactcactgtatctatccttgctaggttgccaggccatgcatagcaagaaaattctcttattttctagacacgcggtagctgtgagctagggaatgagttacagttctcatccaggaacattgcagtgtattcaaagtctctaagggactctgcagccacgcgggcttatttatggcccctgagagtgagaaagtagtcgatctatcataagggaccattcgagctgaattacctgtcgtactgcgtcggtatggcagtggaatgagcagtaggactgagacgatcccatgtgtagaaggctaacgagcctgcttcggattcggtattagagaaacgatcgagtctcttaaggtatagtctgtctttgcccgttattttatcttttcttaggggctgattgatcacgggcgatccagccgagtcctgattccaaataccttgtctctctctgctaattttcgatcttctggatggttgtatgagggagcttcaaaaagcctagggctctggccagtacagtgggaggctaaggtggacttgcgcgaaaggggcaaaggtcccaacctctatcacaactgctgagggaattgttgccctcttgtaccaacgccgacacggtcagctgtaatgtcctaggagacgagaaaccctgacgaggcccccaaaccactccaaaaagccgaaattagatcaagaacctgccttgtcctttttgagtctctaggagacattttatagccggcaggtatcagaagtttcagcaccgacgtaagttctggtagcaatgactttcctggtttagatccacaggcattatttgattatgatcccctcttattatccaccgttgtaacactgagtgaccatgacaggttcattc

SEQ ID NO: 12285 - DNA, 364 bp, Emericella nidulans
ctaacaacgatgcgtcagttagaaggaatgcgcacaccctggactttggaatctggggtcctagccaccagagttaacctgaaatatgcgggtactcagataaagaatgcaaagcaattcctgatcgctatatacatcttactgccttcaacaaatcgctacctgaagaccctctgctgtcgatgacagcagtggatgggctagcttcttcaaatgcgtcttggttagggtttcgacggtgatctcgctttgcatccaggtcctgcagtatcagggtacacgacacctacacatcggaccgatagtaccgacacaaaactacgaagcgaaatgagcagaaagtcgtgctactccttaggacgtt

SEQ ID NO: 12286 - DNA, 542 bp, Emericella nidulans
gttggtggatctctgcgcaaattcactgagaaattgaaagtcgtgaaatggtacttcgaataaccgtggtacagggaatcagataaatcataatagaccgccttcgatgtcacgtcaaaagcgcgacaattgacgtgacatgcatgtagacgagttaaatcttagtctactcccggtaaaagaggcgaggacgatgaaacggcgagtggatttagaccctatcaactgtaaataaattatttagtcagtcaaaaatgtaatctgcggggtggaactaatagatcgcatgagatgttagatacggggggtcctgtcaggtcataccgcaaatcagggtaggcctttctctttgacttgaaggctgtggcgaataaggctgcccctgagtcgctaaatgaagatgacgtagcttgttccgattgtgacgttcgggtaacggtctataacgcggcgtgtgtatcgttgtgggttggaccgttatatgacaaatatatatgttggttgactagtacctagactttgacctcgttgcgtatattaac

SEQ ID NO: 12287 - DNA, 668 bp, Emericella nidulans
  unsure (1)..(668): unsure at all n locations
aaaactacatatagcttaagcgctccatcattattcagggatgttgacccacaacaagcttggttatcaggctgatgctcttatatttccatgccgacaaaggtaacccgtagagttcccaggatcccgaacagctatagcggcttctatgcagggcgagttgttttacaagaataagtagatattgtatcacgctacatcaaagggatggggaacggccgacctagcatgccgtctggctagctacaagccatgctagacatgtatatcaaataaacagactctgggctgtgataaccttacatgattatggttgatggggcgtcgtggttccacggtccgttgacgacgaaatagacgaatagttgttattagggttatttatgagccagaaagaagtattacgaaaaataccgagaaaagttctaggagatacaaaaaatcgaccaacgcaggactcgaacctgcaacctcctgcggcttccaagttttcgtaagaaccggaaacagatgccctaccattgggccaactggccatttgttgacagaaattgaactctattggtactataccctattaatacaaagtataaaacattctnctnccgcacattactgtcgttccattgcattacccggatcaagacattaagctactgagctattct

SEQ ID NO: 12288 - DNA, 578 bp, Emericella nidulans
cgcatcaagttggtggatcctctgcgcaaagtgtgtgacaactatgagaaagtcgtggctgaattccagttgttgactgctctagatcaattcagcgaacgtttcccatggttcattctcctacgactaaacgcgtcaacgcccacatagatgattgtcagctgctgttcctgctggtcctaataagccgttgaatctgccctgcgcgaactttacttacctctctagacacgtaaggctcgtaacatgcatttattactacctagctctccctatatagattctttatgtctggtaatggcgtatgtagtacccatggctgtgatcgctgcgccgatatggtgccgatgtggctaccgtctgttgaagacgctgcaaccggcgtggtgggcgtcgcggccgcttcgcgtccgggctcaggggggacgcggcgacgccgccgcggttgacccccattcccgttctagtgtttttgacgcaagtttcctcgatccgtgctcagtccgggctctcactctctcgcgatattattagctactgtaggtgtagaaattgattacgagaagctgttaaattta

SEQ ID NO: 12289 - DNA, 2166 bp, Emericella nidulans
tatatccatagtgaataatggccgccgacttcttcgctttttttccaatatcatctctgtagcactatcaagactacgcaagtgtggctaagtaatatcccctggcattcccagacacgtagcccgcgcaaatgtcgtgagagttatgataacaaagcgcatcacagcggcacgaaacccgagaacatgaaagcttgacaatagactgagaataccaaagctgactggagtctggtactggtctggtactggtgatcgctggacctcgccaggatataccgcgggactcgactccacgtttctctgcgtgaagaggccttcaggggctgatttgggcagtttgcaacagtcgtatcttgtcaataccactctccacgagatttttacaacatactcttaatcaacgcgatgggatttgtggaatgcatggactcgataaacaactacgaaggagagagaaaaagcacagactgcatgtaatcgatatcctcaattttcaacaccattccacaggtttgagatcagctgtctaaagtaatttgccttatctttgcatactcgatgatcattttgtcggcccgagagcactcagcgttcatttatcttcgccgggccgagacagtcggccggcgggagctcagatattacttgcacccccaggaataaaattcttctaaagagacttgtcatacacactaaaatctcacgaaagtccaaatgatgtctcaaacgtccgtccggctggcggtgattcctgcaagggcgccatggcgcctggttgcatcctctcagttccacactcggtcaagcccattgttatttaggctctcgtttccgcaggtatcaaataaccctgcgttcagaagaaggcgcgctgcatatggcgcagttggcactgttctggcagtctccgggttcgcctggacagcacagacaggaaacgtcgaggtccatgaggacccctgtgacaggagagccctaacgacagttcctatgacgaagctgatatcaggctggatgtacgtctagagaccccactccatcaacttctgctggctgacaataccaacccagcgcgtttgcattttgttcctcgccgacatgggtggacgcgagcgaaaccctttacaatatagtctctcaaatacctattctgtcctcaattgccaacgcgttcatcatgcgcacgttcttcaatcagttccttggcggcgaaacaacctctgaatgtatccccaagatagaggcgctgcgacgggaggaagtcggcacgctgcttgggtacaacattgaggccgagctcgacggctcagataagcggagggagctcatccacgcacagaccgagcatgttctgtcctcaatcgagactcagggacgactggcgagaaagttctggccggactctacaactacgagtggcgataatcgctgctgggtgcggatcaaagtgaccggtttggtccctagtccggtggcactttaccacggctctaatgccatcttgtccgaacgatcagccagagggcttgacaaggatgtcccgtatcctggcttgccgcacgacggggactgggaagctgcattgagtggagtgagcaccaaagaccgcgaggagctgctcgctctgcgcgccattatggagaagatcgctaccaaggcgcgcgagaataacgttcggatagtgatcgatgcggagcagacatggtaccagccgctaattgacagcctgactgacgaactcatgcagaaatacaacacacttgacgggcccgccacctgcattggttccttccaggcctaccttcgcaggtatccccagcttctcgaccagcaaatcagacgtgcggaagagaagggatacaagctcctctttaaacaggttcgcggtgcatacatggtcaccgaggctgctagatggaagagagaaggaagacaaggcttgggacctgtatggccgactgtagaagagacccacgctagttacaactacggcattcaaaggaccatctcaacgattgcagagcagatcaaaaacaatgaacacctgaagatcggcgctgtctttgctacccacaactctatcagcattgatctcgccatcaagctgatggagcaaaatgggatggccaaacgcatcgacgacggaaaaagacggtgcggtcc

SEQ ID NO: 12290 - DNA, 1000 bp, Emericella nidulans
ggaacgccgaaccggttggagctgatgatccatgtattcactttatacattccgaccagtctacataaaacccagctggtagctggtggtcgtgatatcctagtgtggacaggatttcaaggcacaattggcatacttgtgccatttgttagccctgaagaagtcgacttttttccagagtttggaaatgcatctggcatcgcattgcccgccgcttgccgggcgcgatcacctcatctaccggagctactactcgccggtgaagggagttattgacggggacctgtgcgaacagcacttccttctgcctaacgatactaataagatgattgctgcgcaattggatcgctcagccagggagactgagtgaaagacctcggtctgtacaatcgtgtcgttatccctttcttgccactctttccacatgctaacccccccgcacgatattttaacatcagtagcacactcgattaccctatctcggtcatatttgctcctccttacatctcctattgtcttattactctatctatctaacccttctcttacaacctcgtcatctccccgtatccttgtactctctccatccataactactttccccttttttatctttccatcacatcatatctcttctgcacatcactcttatacccttctttcatactccccttcaaatctatcttctaactcctactcctttccactacatactctccattttttactctcatctaaacacattctatccaactcttctttatgctttatcatctcttctcctcaactctattcactactccatttctacacaccctgtcctcactcctcacctctcctatactccatctcaacctaccgcacatgtcattttttgcaaccctttgtcctctctgcatctctctttaccatcccactatcttcctctattcatccacctctctcttcctatgtcgattacaccctccatatcccatatctatatcctggtttctctccc

SEQ ID NO: 12291 - DNA, 1149 bp, Emericella nidulans
  unsure (1)..(1149): unsure at all n locations
gtgaggcacgcagaacggagcccaagcatgccctcagtgcttgatacctggttgtcatcggcagcggtactgacaacccatctggtactgcgggtactcagctgtactctgctaacgacgagggcatcgtcttcgatatctactcgaacccgacctcgtaccctatgcctggtcctgagctgtacagtggttagatcgaggcgctcagggagggtgggttgtacattcattaacctctatagccatctccatctatgtgctcacacccactcagtccctcccctctcccacccctctattcttccttgcctatatatccgtctatctcccccgcttcatcctccatctccatcctcactctatgttccctcctctcacttctccccccctcatttcctattttctcgctctcgacctccctaattagtattctctcatcctcctcctctcattcatatcccatacccttctcattcttactccactcttgttccccactcccctacacactctcactactccttcttcataactccctcccttctccccactacatacacccttcaccatcttacttaccttacactccatacttctttatcccccatcctatcatctctcttttacgcagatcatcttttttccctcccctctaccattatttctttcctcaacctgtcttgtatctctttctcctactattcactatatacccctctactctttttctcattcctcacacacaacatcctcttcactcttctattcagctattcctcctctaccatcttatctcctctgactatcctcctatatcaccttcctgctcactcctaactacgatcactacttcctctccactctcaacatttatntcctcttctcatctctcttaccccccaatttctctcacctcacacattgcattttacgtttataacagacctatcaataatacgttctattcatccattatgtctttcctccgacaacttctcccgcttatcactcatactcaccaattctacacatcatttccagctcacataatcatctccgtcaaacacactccttctatctgactccttttcacacacacgctctcccatcccactgccctatcatcttaccttcctttgtcgtcctcat

SEQ ID NO: 12292 - DNA, 187 bp, Emericella nidulans
atttaaaacctaacccggcagggatatgtcggcctaagcctactttcttcccgcctcgcttattcccagcttgctgggctgatgtgaaccccgcgcctcagtcggtgttcgtggccgcgatcttgccgttgatgctgctgtcgagcactcgtggtggtggcgccgctggcgcccgccctggccatgc

SEQ ID NO: 12293 - DNA, 5494 bp, Emericella nidulans
tgtgtcacctcttgacccctacgccctagagcttcccatctcggaccctgcttgcgccatatcgtcggtagacctaaagagccgcgatgtaggggatggaaagtatgtgtggactacgggaactgattcaatctaccctgggcaatcagtcttcactgaaagattgaatctcagcagagccgatcgtccactcggagcccagagatcagtagttcagggctatgtgctggcgacgcctgcagagagaatccacgtacattgcctgtgttccaacgtgtttgctgatggacgttcatattatgtttctactgaggaggtgctgagagcatccaccttgcagcaagacgccataagatgcaatttcgtgcgatctccaaaccaggactctttggcagggggttgtgatccgatgtttgatgtcgggtcctatgtccggtttcataacccagcacacgcccaagtgaagtatcctggactttggcaggttccatcacatcagagttttgggtatgacttgaatatttttcgaattgtctcggccaaaacacaggtcaccgtacagtggcagaacggaagctgtactaccgaaactgccacttctcttctaccgagtgacgcaggcggagacgagctatatcctggagatatggttgccttgaaagacagcgtcagtgttataaactttcatactgcaaacaggcgaatagtgtcacgtctcgctcgtggccgctttaacgagacactgcgtatccaacaacttggtatcgttcacacatttgacagccgagaacggatagcgtccgtccgctggtatcaggatacggatattgagttaatcaatggtggcaattcgcttaaccctagctgttctttaggtagattgggcgatacaatcacggatgtgtctgtctatgaacttaccacatttcccgctctgagcaagaatctgggagattatgttgttgttgccccggcgtctattagtcaatcggttatgtcttcaataccgcacgatatacctaaggtgaatgagccgcgccgcatacactccattgctgctgatgcgtttctcgacccgtcatcgtatctgcagtcaataaaatccgcactcatctcctctgagtggtttaagaatacgactactgtacaagtgccttcactgcgtcggcggtacagcattcaaaatagtgatgcggcacctctaaacgactttttcggcaagatagtcgcgaaggatactagcggcaatatcaccgttcgattcccaggccccagcggctgtcgtgatattcaggttccttttgagagaattctggtagttatcacttccgctgagtcagtcactccaaacgtgcaggatcattcctcgccctatctgaacgaagatactctcgctggtgccaccgccaacgggtgtattgtgaaagatgataaccacggcttccctaactgtaatgagcttgtcacttcacaagagggcgagctcaagattgggacaatagaacgtgggttggtaatgacagtgtcggaaacttgtttggaaagtccaatgcctgacgacggagagattgctgttgatggcacgcctaccccagcacctacaaaatccggcttgccagccattcttagctttcccgtgccgacgctgtctcctccaggcttcaccgtgctagaagacctacctcccgttgaccatcacttcataaaccagaatcacgctggctcgtccacggaacggatgaagcgaattcgcaaagagtttgcgatcctcgaatcttcgttaccgtccggcatctttgtccgatcatgggaatctagaatagatcttttacgaatattgtttatcggtgccgaaagcactccatatgagcatgcgccatatgtggttgacatgcactttccttcagacttccctcattcacccccatcagcattctttcattcttgggggtctggtgaaggctctatcaacccgaacttgtccgaagatggcaatatctgtctcagccttcttgggacatggccaactcgggaccttgacgagagatggtcgccagcaaggtccactgtattgcagttgctggtctctataatggggttgatccttgtgcaggatccattttacagtgagttcccgccattccttcatctatcgactcatactcagactctttcagacgaggcgggctatgaaagtctcgctgccaaaggcagcaggacgattgaatcgtcccagtacaaagagaaggtgttcctcctgacccgccgcttcattatacatgctcttgaacatcccatccgtggccttgaggatgtcctcgtctggaattacctccctggactaccctctccacgtccacaactattacgcaaagccatccaagaagcgcgagtaatgattgagcatcataaccgcacttcagaatcccaccaggactctaaggcgtctgctttctgctcccgtctcagccaaggcgctactgtgctgttacagaaactcgttagtgctttggaaaggttggaaacagatctcaaagcacgggtggtctcaaaggtaactgcttcgcaaggatccgaccggtttatactttagactcatgtgtgattagcaatagtctccgaacacaaatattttctcgattacacttccttcccatgaatagtcaaccttattatcacaacaggatgtgtgacaagcttccttatgatttaaaacgctggtactaccagggtgttacgctttctatctcgctcttctagtctatggagctccttggctacagaaaacccagaacggatgcgacattgttttcagtcacaacgatttatttatgtaaagtcctacaaagacgcccaggagcagattgcatcgttcgctcaaattcttgagaagcaaagactatactgcagtggcttaataggtcttagagctttgagcctgctttactgggcaaggaggctgctcgaaaggctgaagtagaaaacgtgcttctatgggacctagacgagctgctctgtataaatgtcatatatgagtctggacagaattttaaaacgatcatggttctgatttgggagaaaatgccctggcattttggctaatcgtacagcacaggtgcactttatgtctcaacatcctaaattttttatgtttccacgatatttaaatcaatgttctcctatcctaaattcagagagaggcaaagaagacattagactgaacaaccaaaggtggttgcatgcagtcaacgacaacggggcctcgcgtccctgcggacatggtcggcgtcccgtccttttccagccgccgcccttttgactctcttcattcattccaaccatctctttcaacttttctctcattctttgcgtgaagtctaatcgttcattgtatcaacttttgagttaatttccagatctttcctatttttttttcctcattcctattctttcctgtttgaaaagcataatccagaaagctacgtagagagtgacgtcgtgtcaacatgccatcctatcggttaggtaaatctaagaatctaaccaccaattcaagaaaacgggactctaatgcaaaaatagagcaagcgtctaccggccgcgcaggctgccaaaacaaggaatgcaaagagcagaagatcaagattgccaaaggcgagctgcgattaggcagctgggtcgacacggagagattccaatcttggttttggagacactggtaagttgcacagcgttctatcgtcgataccaccattttcactttaatggcatggtctgatagagtttaactaataatggcgccttaggggttgtgtcacccccaaggtcatcgccaatatcaacgaacttgttggcgaaggtgacgacagagacctcgagacgcttgatgggtatgaggatctcccggctgagcttcaggagaaggttgcaagggctttggatcagggtcatgtcgacgatgaggattggaggggtgtaagtttttcttggcctgtatccgtgatgtgtgcaagaagagcgcatggctgacatcgtgcaggatcctgagatgaatgtgcgcggcagcagcggcttccgggtgagagcctcagctaaggccaagaaagcaaaagatgcagatgaagtacgtaggccctcatcgccatgagggaattcgcaaagtagctgacacacttacaggaagagaaagatgacgccgctgaagagcagaagactccggcaaagaaaacaaaaaaagcaaagaaggctgaacatgcagacgatgtacatatacttttcctggacatgagcgaaccagatgacactgaccagttcgtttacaggaagagaatgacgacgcaaccaaagagaagaagtcccccagctccaagtctaagaagcgcagccgcgtgcaagttgacgataacaaccacgatgcaggggccgcttcgcccaagaggtccaagaggaccccaacgaggattccgaagcaagttcctgccatttcgtctcaatccgatgacagcgcaaatgagtcccctgagccgaagcgcaggcctgcgaagcgtggtcatcaagccaaagaagcaaagcctgctcccaagcgtggaaagaagaaggctgtcgaagacagcgaagttgagcctgctgctgagaagcccaagcgtggacggaagaaggctgccgcctgagtatgcacactctgccgtgaaaactttcgggatgtacggtgtaaagagtcggtaggcgatgagcatggaggtgctgttggtatttttactactgttttcgatggctgattaatatttgccatttctcgattgagcgagcgagcgagctcgcaatttgtatccattctcactgctggagttatctgactggttggtcctcttgtagtgcatgtattcttatcagtcggggcgtgtttttgccgtctttcagttccatgaggtgtttgttctgactcatctcttcgttgatgctaatcacagattgtctaaaacactcttactacatccaagtacttcgtattggtctatcttcccttcccagaggtccaaaccagtaagccccagtaagttccgccaatccttcagcacggccgcttgatctagccctcattgggcggttctctatgcataatagggcatttaatcttcaagcttccaatcactccaactactgtcacacatgactgcctatcagcgtcacatgatagcgcgtctgcctatatctcgtcgttcccagcttcgtactgtctcctcttcttccctcacgcttcacagagtcgacaatccacgccgcgagcatctacttctatttcttcaggggaaaaaagtagatgcgcgtccgcgcaagcagtccttccaggactctgctccatctcgagcgtcagtagtgggttttcaatgaaggccttcagctacgagacggattttgtcttggaaaggctcccaggactcttttcatgcaacgtgcgtgattcggctacgtcatttgtgttcgactacgccgt

SEQ ID NO: 12294 - DNA, 186 bp, Emericella nidulans
  unsure (1)..(186): unsure at all n locations
ctcttgggtttccgccctgaaccttcttgggtacagctatacggcgtctatcatttgtgagtccagacgctttattgcaagcaagctaacacatgtgtgctcatangacatggcggaagactgccacagcatctgtaccgcagcgacgaccagacacgctaattgcactgcccaacacgtagcctg

SEQ ID NO: 12295 - DNA, 453 bp, Emericella nidulans
gactgtaactattttcgcaaccagcatacttttaattgcctgacgcacacacacgagcatataccccgaactttttaatgcgggtaatggatagacttattaataggcgggagaactcagtccgataattacaccgcattgcaccaagaccagcccagcaaattggattatctggaggagaatggcgagagccgaacgattaatctggtaggaaggacaaaacttacataatttctccgtgaatcacaggtccgccagagactggatggaggacatgggtctagattagcagcaggggaaatttaagactgtcaggtgcacagacgatcaggacccaacatctacagatagcatcttttgacgaccaagagaccgggaaagaagaacggggtccagcaggggctcctgatcagttttaaacaggtggcctatatgaaaacccgattcatgggc

SEQ ID NO: 12296 - DNA, 482 bp, Emericella nidulans
ccagcctttgtcgcgagcgtaacgagcaggagcagggctggagtcctaccatgtgatcaggtccggtcgatattctgttcggtcgggcaaccaccggagcaacgagtattgcatcatggtcacataataggctcaggcacactgctatcatgcaagacctaggaactcacttgtatactcacagttatacaggggctctacctggatatctcactgaacacgtatcatggcgagtaccatctaaacgagtgatgtggagtgagactagaaccctctgcgtatgtgtacaagatggcagagcctactcgatctgcaggatctatcgatcctcatatcgtccgacccaagctcatagatacgcatctaatcaccactcctagatcttgaactatcacatgaaagatcgtagtgcgtacaacttatgctggatggactgaactgaccctacgctcatggcgctcgacaaaaacgtgcctataggc

SEQ ID NO: 12297 - DNA, 214 bp, Emericella nidulans
ttcaaacatcctgtccacgaatacatgatcttaatcatctgacaaatggtcactatggcgccgtgcgcgcttgtttcctccttcttagacttgaatctccccttatcgattcgcctacgtaccacgcattacgcgcattctatggtcagccttttgggttcgatacagctttctgtcttttgcgaccaatgaccggtacttgaagatcattctc

SEQ ID NO: 12298 - DNA, 543 bp, Emericella nidulans
ttcacggcgcatcaagtatgtggatctctgcgcaaatccctcggctgtacgggcttatgctgattccccgttccccgctaaaccgggtactcgtagcgcttactctgatcaccccttctggcaatacttgtataaataggttatttcgtgatatctgctttttacgcgattctacttgttcactcttcacatgtctaatggttttccttcttccggtcttggtagggtttattcatttaattgatttgcacgttattcgcttccctatcgcctgtctagtttctgcacctcttggggcgtaataagctctaagcttattaatagtctttatatctgttgtcgattttgctataggacgttatgcgctttgaggattctacatcttctatccgccgtgagggtggctgaattcttacttagcgatacggaaaccgttaactacctatctcgcgtaattgaccccatgtacgtgcatctcttaatcaccttcgttcttgatagatccgtaacctacgtgttacacggatctgtaacaaatttacg

SEQ ID NO: 12299 - DNA, 993 bp, Emericella nidulans
tcgatattggtgaggaagacgcctctgatgaagaggaggatgaaatataaaatggtgcaattcgacgattttgttcagtgactttgcagacatagatctacgactaatgaccgtgcaacaatttcacagccgacatccagtcttccctcattgtaagagatttaccctacgagccaacccatggtcgataagtttgaactgaagaagcggtggtgttctgcaaccaccgaatatattatctatgcatataaattacagacgggtagttacgtggcatggctgggcgctgaaatgagactagaagaagcgccaccaaatgagaaagaggaaaataaatgcgacgcctgcgaaaggcccatactgcaaagagtcagaccgaagtttcggaaatacatggtgaacatacctgttttactagcagctcccagttgatgcgtacggctgctttcctgtactttttgctatcttcacgtagacggccggacaggttgcccatacgctttaagctattccctcgatattagaaggcctcgatattcttcgtcatacctttgtaccgcccgaactcgttgtttacccggcaagttggccaagctcggtattctgggatacctttgcgggtggatgaagtgtaaattcccaaatctttgcccagggcgggcctgtctgtaagttgtagggttgtaaattggggcattccagaaatgtagggacctgggatttgccgccaatccaggggcacgtatttataaatattcttatagccggccctttggttaattcccacgaggctcggagatttggcattaagtcttgggcggttgactatagcaaaaatttttggtttttaggctttaaccgggttggaaaatctgcacccgaaaggattaccttgttatacctatcatattggtatcattattaatccttctccttcttccactgggggctgatatacataccttcattttttttatttctcttcactattgt

SEQ ID NO: 12300 - DNA, 2056 bp, Emericella nidulans
cttgcatgcttgtggtgctccagaacatctttagcggccttcttcttgctgaactgcatctggagaatagcctcgtcgatattcttccccgcaatttggcgagccagcggacccagcttcttgatcgaagtcttgaaccagtgcgacttggacagcgactctcgttccgtacgcaggatcttctctgtcttcgacagccggccgcgactgcgaagctcacgcacgaccatcttacgctcccacctaatccgcgcctttggacgcggatccagcaccgccatcatgtggcttctgttccgcttctcaacagtgaaatcctccgcttctccttcttgctccacctgaccctgcttacgagcgctcggtgttcggccagaagccgtcagcttgggtcctgcttcatcctcggcgaaaatcgaaccagccccgagttcaccttcgcgcttgaggggagcggtctgacggcgaatagtgggtttggcatccgacttgccgaaaccgaagaagttctttatggaggagaaagcaccagatttctgtttcgtctcgggcttgtcgttggaggcattggggtcctcttcggctcgacggacgggtgtgtatgtgagagtgcggcgaggcacgtacgcaataccggtccgggctggcgaggttagctgactccaatccatggagaaatatttaactatgattatagaaaatttcgacagacgtacctgaacggatcagatcgccatagggctgaaaagagcccattgtagccatgaggacgaatactagccggctaatgtgctcccgttggcaagaaaaagttgattgaggatgttgcgtatatggtcggttcgacgcaccgtagactaaggagccgtgcctggggaatcaggctgcataacatctctggcttgcataaagcgctgttaagcgctcatccattattattctctacgtttataggtttccaattgcgaatcgtgttttctacctccacagtccacaattgattagacgctctctagaagccctctcaacacccacgttgagagtttaaggcatgaccagctgttcccctctgtttgggtccatgtcctccacaagacacgtcaacccgattgggaattatgctttggacatcgtgctgggacggttcaaccggcacgacggctcctcataatggggtataaggtagtattggtaaaacgacttgcttgggagatgccggtgaaaatccggctaactcgagtcagccacttcagcttcattccgtttcaggctccatcagagtacagtacgggtttagactacgggttgtggatctgattatggacagcactctcgcagcaccggcaaggcttgagactccgtctgtgcgctttgtccaagtttcatggaccttgcgcccctagttagaggttcagagcgcagcgctaagtaaattatctatatcgttgtcgcagctggtatgacgtaggggagcagaatttgcagggagtagtagacagtttggatgcacggccggcgtagtcgagactcggatgaagtctccaggccgaattgcagacactggaactgcaaggaatcaggaaacctccaggctagcagcttgggccctgagagcgagtcgaaaacgtgttaggaaatcagaaagaccatcatcttcactcttcgctgctggcccgtttctctgccgagctgctctttcgtccatgttcatctccaccggcgtcgatccactggttcaggttctcttcatccttcgacgctcagtcttttcctgtccttctctccctccaggcttctctgtatgtcggtgtcccttcccatcggccgtttcatatcgcgattgctgacgggttgtcattctagaagctcattctgctcccgctagagcgcgttctctagctgaatccctgcccccctccctgtctccgtcgagagcgttcgactgccgctttcccaacattcggtgcttcaccttgtcctcgcacgagccacactgtcgagctctcgatccggcaaccccggcggatagaggagaggatcttctctgagacagaat

SEQ ID NO: 12301 - DNA, 3522 bp, Emericella nidulans
acactaattgaccattgtataaaagacattatatacacccgaacatgctgatactattaacaacttataataccgattataaccattataaaagtaggggacttgtgagacagcgtaacatatattaaatagaaaggacgactggacgggccataaatggaagcttatcgtacacacggcgcttgatttctagagggtacaccacgaatccggaagtgacgttgcctaaatggcggaaagtctacaggatcatgattagatctagaccgtttgggcttactcaagaggatgaggcacgcgtcagcgcagaggtaaagctcggggatactgatccggcggatggcgctgtcatccttatcggccattagtagctggagcgggccaaactagatcaaacggaatatcttaccaatgaacgttcaaaccactgagcggagtaggtgtccagggcgtccttggggaggttctgaaggtgcctgcccagcgagcacaggcgctcggaccgcatagggtttcgcttgtaagcctgcatgctctaatcagatcgaatcatttttacgtgacgcacggatacctaccatcgcactgctgccaatctgatccttctcaaagggttcctcaacctccttgagcatggccaagtggcggatatcaataccaatgcgctcgcaggtggaaccaaaggagcccaaggcgttagctacgtcaacatcgatcttgcgagagtaagtttgacttgagatgatgaaagcagaatcaaagccggccttcttagtaacgagttcatccaattgctcgaccttgtcgtgatctccgttgaaaatttgaagaaacgacgcctgtgtacccgttgtgcccttgacaccacggaaacgcatatcatcgcgcgccctttcgaggtttctcagatccatcagcaagtcttgaatccacaggcacgcacgttttccaacagtgacgagctgtgcaggctgtccatgggtgaaaccaaggcagggcagatccttgtactgcttagcaaaggcagacagcttatcgatgacaaccgccaacttgggaatgaggatgttcaggccatcacgcaggaatatcaggccggcattatcagtgcagtaacaggaagtcgcaccccagtggatgattccagcagctgcgggggcaacttggccgtaagcgtggacatgggccatgacatcgtgtcttcggcgcttctcctcctcagcagcaaccttgaactcttcgtcattgatcgtggtgtgtttccgcatctgctcaatggcttcatcggtgatgggcaagccaagctcttgtacctgtcagtacgtgggtcgtgcatatagctggcggggtagggcaggaatgtagtacctttctcagcctctgcaagccacagccacaactgtctccatgtagagaacctattcctgggagagaagagatacttcatctcatcacctgggtgtcagaatagcagttagcctctgatcgggcaacgaaagtacgaattgagtcaaaaggggacttacttgcatatcgcgagttgagaggcgtctggtacacatcattgcttgaagacatgatgtcaggaagcaattggaacggtctcgagaaagctgagagactggaacgctgaggctgcgatttgaagaaagggcagagtggctgctggaataacgagctgtgcgtccacgtccccggacgaaattttgccaattattttagcggggtcgaaggcttatcggcgtcaatcacgttatcgagattgcttatcgtcacatgaccatgcccacttctgctcagggacagccgaaatcggccatgacgattgcggtcagaggtgaggacttccgctaacagcccaaggttacctcagtataggcaatgaaagatttttgccgtacaactattggtatgtatacattcaaaagcactgcctgcgtctcaaatatgaattgaagcttcaaagtggagcagggcttgtagaaccatccctgtaacctccaagcgctgtcatcttggctataaacattctcgtttttctctcgagttaacgccaagacagctactcaagtactgctgtatcttgtaagagggagacttccaggaagaaagtagtactcaccattaccctgtatgcttacctacaagctcttaccatgaatcaagctgttacgacaggaccggtattacgaagtaaataaggatcgtggtaagtatatgaacatgccaatgacgtttttttacagcccgctgcgctgcggatttgaaaattagcctactattgtttgagattacataggatctattaatatatgattacaacccagaagtttctatagtttcacagcgctattcagcttttcgacaaccttcattcacgtcagaaaatttacataaatatgggagagctcagaccgaagtttaaaaaacggttatgggggtattggttagacagttgtacttagaccagacattctcaatcattgcaacgatgcaagctgcgcagatagactgcccttgtcatacttcgtatatttgccacggcctttatcgagttcgtgataccgatcatagaaccgtgcatatagcggctcgagcaccgcttgcacctcgcgagcgagcacactccgtacttcccgctccatataaaaagacttgtgacgcgccacgaggtcgtcgaagcttgcattgaaggctttgaacttgtccttaattgcgtccttgtcacgggatgacaacgacttgacaatcgcgctagaatcgacagcgccacccgattgaggtcgactgccacccctagtgtgagacgtgtactggacgtcgagcaggtaatgcgacgtctccttccaagcatccaggtatgttgacgttgcgcgcttgcggaacgtgtcgatcctagaaacgctatttgtagaaccgaggaatcttgcaagttctgggcttgagcgtatagcgcggtccacaaggcagaagacgtttgaaagaaagacaccctgagcagcttttgtccggtgcaattggcgagcccgagcctccaaagcaatcagcagcgtttctatcacatcgagaatgaaatgtgaaaacagcacatcactgtctggattgacatccaaaggagtattcattgatgatgctgaggttgaacgccaatttccgtctcctagcgaagttaagatagaagccagaggcttctggtaccctgtaagctcgataagggagcgcataaccttatcgacaagaggggtgggagcgccatttggtggaagcatgggaatagcctgtgccctacgttttgtctcttccaaaagctccgccagagaatatttggcggtctcccggacaggcctcaatgcctccaggaacaaactcttgagttcgcccgtctttaactctatatcgtaagacttggctgtgacgatgtcgatgatctcgaaagctaaaaagcagtcggtgaggaggttcgtacgaatataatcgtttagttcccgtatagtttttgaatattccgcgatcgcagagcgg

SEQ ID NO: 12302 - DNA, 3353 bp, Emericella nidulans
caaggtcagtccgccccgaaaggactgtgtgtgatatccatcgtccgcggcgacacccaactgctagagggagatttatcgaccctggccgaccagtactgggtggacaacatgtgcaatccggttttgttctcccaagcagtggagacttctatctggaacggagggcccttcgatgttgccgtggagctgggcccacatccagccctaaaagggccagtggagcaaacgatcaaggcagtctatggacctatcccggcctacgctggactcatgcgccgcggtgacaatgaaatcgaggcgttctctggcggggtcggttttgtttggtcgcgacttggcccggactatgtcgacatgagtggataccgcaaaggcttcataggagctgatcgtctgcggccccaagtgctcaaagatcttccagtctactgttgggatcacagcaagctatactggaaagaatctcgtatctcccgccagtatcggctgcgacaggatacaccacacgaattactaggtcgtcgagtaccggatgattccgatgacagccggagatggcgaaatgttctgcgactcagcgaactgccttggatcaggggccacgtctttcaaggtcaggttttgtttcctggcgctgggtatgtggctatggcactggaggcagcacgcgagctgacagaaggtcgtccggccactttattcgagattgagaatgtttctctgcgccgtgcattggtcatttcagagcaagcaggtatcgagacggccttcactgcccgggtgatcgacgcgaaagaagggaggaatgatacaaatcgactggaagcagacttcgcgtgttacttttgctctgcggagggcaacgagcctttggtaaaagcatgcacagggcgtctcatcatcaactacggcgatccggcagccgaggccctgccgcaaagaacccggctgccatcgaacaatgtaccagtagatatggggaggttctacgatgcaatgaacagcgttggcctggattaccagggtattttccgtggtctggtgcatggaaagcgttccctcggctgttcatcggtcaaggctgcttggggtgaggatatgcagattgacaactacgttgtcaaccctgggtttctcgatgttgcgttccagtcagtctacacagctttttcatcccccgccagtggagagatctgggccccttatctgcccattcacattgagagacttgccgtaaacccgaatgtgtcttacagaagcgcaaaagatgaggttcaaatggaagcggatgcgttcgttaccgtatcgaactcgacactgctgaagggagatatccagctctatcagatagattcccagcatgctgccatccaggttgaaggaatctccatgaaatccatgtcagaacctcagccggagaacgacagatgcttattctccgagacggtttggggtcctgacgtctcattgggtgtttctgaagtgaccagccgggcaactgaagacgatactcctctggtagaggctttggaccgagtgtccttgttttactggcagaaccttcttcaagaagtcggcgcagaggagatcgcccagttccagtggtaccaccagcgcatgtttgacgccgtcaggttccaggtctcctccgtgcgcagtggacaacatcccattgcaaagccagaatggcttgaagatgattgggaaacaatccttgcggtaagcgagccctatgcgtctcgtgtcgatatgcgactcattcacgccgttggagagaatttggcctccgttgtccgtgaagacacacaacttctggaggttatggtccaggatgacatgctcaaccgcattttatatggaaggatatggcttttctgtcattaataatgctgtctcggacgctctggagcagatcacgttcaagtatcctcacgcaaacatcctggaaatcggcgctggcactggtggaacgacccggagcatcctcgacagaattgggagccgctatggatcttacacttacaccgatatttcccccgcgttcttcgaagctgcggctgagaagttcgaagatgcaagagaaaagatccagttcaaggtcttggatgtcgaaaaggaagttggcgctcaaggatttgacgagcatggttacgatgtcatcgtggccgcgaatgtcctccatgccacacgcaagctggaagagaccatgaaaaatgctcgggccctactcaaacccggcggctatcttgttctgatggagattactggcccagatgtcttgcggacgcagttcatcatgggtggtcttccagggtggtggtacggtgtggatgacggacgtgtcctgtcacccgccatatcggctcagcaatggaaccagctacttctcgatactggcttctctgggttggactgtttggcgccggatatgttggatgaatataagcactctttctcactcatggtgagccaggccattgatgagaaaatacaaatgctcagagatccggtcttatcaaagacgctactcccagcagctgacgttctgatcattggaggccggacccattcaaatgtcattcacgaaattcgtcgctacctttcggcctggacgagccgtgtcgaggtatgggatcgaattcaaaccaaacagctggatcagctggctgaattcgaaaacattatttgccttgaggagctggaccagcctttgttctccactaccatgaccagtgagacactgctggctctgcagaaggtcttgagcgggacaaagaatgttgtctgggccattaacagcgccaaaagccagaacccgcatgtcaacatgacagttggccttggacgagcaatgagaacggaggtccctggtctgaacctcctgttcgtcgatattgacgctgtcgagaatcctattgcatgtgcacaactcctttctcagatgttactgcaactgagaactggatctttgactgcggctgagaatacgctgtgggcagcagagctagaaattcgagtccaagacggacggcgccttattcctcgggtccttccgatgacgcaaatgaacgagacctacaacgctagtcggcgagttatctcaaagccagtcgatatcgagactacgtgtgtgaaaatggaagattctgcgggttctctgcgcctagtaccgggtgcatgcatggtagacggccccgttcagcgcggccacaatagactccgaattcatcgttctctccctcttgcgtttggtggcggtacaccatgctacttgtgcagtggtgacgtgagggtaaacaatctcccggctctggcgatgcccacctcacccgcgactcgggaggtaccaa

SEQ ID NO: 12303 - DNA, 646 bp, Emericella nidulans
  unsure (1)..(646): unsure at all n locations
taaagtttgacaaacccccctggctgcagccctccctgctgtgggacgttagacctttatattacagacctcatcaccattagcgaagggccatccgttctggggcgagggccttcaaaggctgctgctaagcgcttaggagccatcagatagctcatactaatcgtctgtctcacacgagtcgggcactgcaaacggtatcgcacgagaccaaggcgcgttacactaagagcattttatcgctctaaacttagtcttaacaagcagagatgaagtaaaatgacagtcgagtcgtgacctggaccacttacgcggacatatggttgctgacgaactcctcttcatctcagggaggatacctgcagaccgcttagtgcctttacggccgattgcgatgctgctgaggagaacatccgagctctactatgcgaacacttgcctcttttgagccgctacaacctactggctacgtgcttcgctgtactaggcacatacggtaactcaagcgctgccagctaaagcctccactttatgaatggacgtgcgagaggccactggccttcgacgacttggcgaagcatggntttgttaaaattgtttggaggggggggtgttatatgacactcccccccccccccccactccc

SEQ ID NO: 12304 - DNA, 576 bp, Emericella nidulans
cgcatcaagtatgtggatctctgcgcaaagttctttgaggtagttctttgtagtctcagcttcacccaagagatatgcgtcccgaatgtgggtcgagcggcgggattcaatacaatagaaaactacactacgatcagaacaaccaccatcaccactcctcaaccgtactaccatagagtgccgactcactcagccgtcagtgcgtacgctaaatgggcttcgtttacttacgactggggtaacacatagacctacaactaaaaatgatatttaaaacaactgggtcacgatcaaaagtgaccgtgcatattttaacatatctgaacgacggacgtataacctcgtatacattggtcactgtccacacagaatctagcctcaataattaaaaagcccgcacaagcttactattcgaagccgctataatcgattcttagctgttgctaatacctcagttgagcccggacgaatctggcttcagcgtccagcaacggatacactgcctgctaatgtgctttctgttcaaacgcgtcgtcgagctagcggtattcgacgagtattaacggatacaagttt

SEQ ID NO: 12305 - DNA, 647 bp, Emericella nidulans
gtaagatgtccgcggtggcccaacataggtggctaagaacggtccaactgtttctattttattagaatgatttgcatgcatagagtgttcaacacatgtacgagcctcacgcaagacccatgacttcatcagccaacggggcgtgcattgctccccctgtatccggctggatcccgggacccaaggcctagcggacccatattcgcatataaacgtatatttataccagaaggctacggggatcgctttcccagctttagaagaagccccacgataggcagagaggaagcatatcgcgcccgggatcaaaaggtgccagagacgtataccacccaacctacatcgtgaacggtgaataacacatcagagcatatattgtaagggaccacgttcgggccccaactaggagcgagtgttatggggccaagcacatcgcccattggagactacatctggcaaactagaaaagctggtggaaacaggaaatgaagagctcagcctcgaagaggttacctaggcgcagctttatacattaccggccgaattgaagtaacccaaggtcctcagagaagcgagacgcacccttcagatggcaaatatactttcatataggtgaggaaaggatttcacctcgggctgcgctacta

SEQ ID NO: 12306 - DNA, 105 bp, Emericella nidulans
cgcatcaagttaggtggatctctgcgcaaatgcccatagtcaagagtttacagacgctcagacacggatggagtcccatgggaccggggcgacctaggtggtact

SEQ ID NO: 12307 - DNA, 490 bp, Emericella nidulans
tgccgttcgcttgacagacatatgctgaggagctgaaacccttgaaattttgatttccccgactgcgattgtacactatctagagccatgtcgcaagccaggtggaaagtcggctctttcctgcagcaggccgtcgcaggtgtcgagtcgcggctagatcaaatgctgacagaggaggaagacgccaaacggtcgcaacacaaacaggcggccgtgagaacaaagtcgggcgaacaaactggtagtatgttgctggttagcatcataatagcttggttgctgacttgatagacatctcgcgcagttcgtcgaacgcccggaaaaatgaccgacttcaggaacgcctagctcgtgctatggccaagaacaacgctatgaatactccagattcctcctccgccgttgtatctcctattagcagcccggttcagagcaacggcgcacgatcgagcatggacatagaatctagtctcggctcaccttccaaggg

SEQ ID NO: 12308 - DNA, 251 bp, Emericella nidulans
gggttcacgcgtcttccgctgccgctttgaagcattcctcaagtgagtgactgctgttaccgccgaacccccgattaacttatcattgcgattgtataaatacatacacgcagtgacgaatgaagtttataagagctttggagaattgatttagagcgttctgacgcaatctacgattcccaaaatgataaagagttatatattgtacctaacttacccgaatgccggcccatcccacctgctacagctac

SEQ ID NO: 12309 - DNA, 1430 bp, Emericella nidulans
gacctttatccgctcatacgaagccaaatgtaaagtcgtctcaataacgccgagataactcgccgccaaaccccgataaagacctttaataccctcttgccgaatgacctgtttcacacaatcatagctattccgatattgcggcggtctcgtagtcccatcactatttacatgtgtccgatcaagctgcaatctcgtcttgaccagccagatcggattcgtcgctgtccctgtcacaacgcccgcggtggccgcggacagcgcatgtgtcgacgtcgcatctctgtccagaccaaagacctccgggtataagcgcttacagttgccgtatgcgtaaaatttgattgctgtcgccgggaccacacctgtgagactgggaccaaggccgcggaacaggctgcgccagccttcgacgcggtggatggaaaagagaatttcgaaagtttcgctaaaatgctgaatgaaggaacgggcgagggaaaagcgagcgtgtgaggaagttgtggtggatttgagctgggagcggtagtagtcggattgaaggcgcgttcggaggacgtcaagaggagatgtgaggagggcggttgccatgccgccagcgctggagaacattagcatacatgataagagacaaggtaataggatgagttgatcggaagaaatgctcacgcgccagctaccaagtgcgtccatgaactgtttgtctgctgcacttgcggagaagagatcggcccttccggtacagcagcgttcagagctgcgtctttcgagtcgttgcgctttgccttcatgttgaagggttgcctcgtggctgccaggtacctgcgagcagaaaggttgaggcgataggcaagaagatgagagattgtcaatccataaaatcacaatgggcgaaccttgaaggcgaaacggtccagaatttttagaatatgggttatgtaatcacctgcggagataagatgagcttccggagctgtcattggattctggctccgtataacatatgtcacgcaccactccacagaccctaaattttatggaagacagctttcaggtacagagatgctatcaaagaaggctttgtagctgctaacggctgagctaggttactgactgtttgtggcggcttatgtcaataggtagacatatttcaactcgttcggagacggattagcattattgggcgagattctacttatcgcaagttcagtgccaagtcccagattcactcactgccataagtatatgagctctgtggttttcaggtgtagatataagtataattggcaaaataactacaaatataactgtatacaaaccgtgtagccatttcacaggacgccagcatgagcactgaaaacttgaccagagactggagagatgaaataaggtgtcgcaaagtcgatgcgaagtgtatgtatggaccagtc

SEQ ID NO: 12310 - DNA, 320 bp, Emericella nidulans
ttgaaactgttaaactgaacacgtatggtctagcatttagcagcgcttatgggtcgagctgccgacgcgttttgttaccgtggttgataaatggtaataatggagatctgctccactcgagtctgctgccgcactgcctagatgctaataaggattcaggcatttagtgcatctgaaatcccgcacatcacacagaaaaactacaggaatgatcaatgacggagcatcttactcgaagaaggagaactacatatacccacctattatacagaaggaataaagaacatcatgcatggcgtgagcccggttcaagcgttctt

SEQ ID NO: 12311 - DNA, 898 bp, Emericella nidulans
  unsure (1)..(898): unsure at all n locations
taaaccactaaatagaaaacaccttaaattaagtcatatttttcaattctaagaaataaagacaaaattacttcaatacaatactaacaaaaaaaaaggagcctgtgacagcnatgttatttcatgaaccacgacgggatcccaaaataactcttactgtaaggaccggtcgattgactaccggctcacagaggaagcgcaaaacggcgagacgaatcgcgatataccccatcttgggtttctccattgctcaaataaaattcaatgagccagaatggaccgttgatagacaacctggccgacgcggctacgccactgctgaaccagacctcaagtccgccctgaaggccgacatccccgcgaagcgggaactcctcgccgaagtcaagaaacaaggcgaccaaggtattggcgaagtcaaggtctccaatgtcattggcggcaagcgtggccccaaatctatgctctgggaggggtccggactcgacgcaaaccaaggaatccgaattcacggcaaaaacatcaaagatgtcagaaggagctgcccaagggccctaccggcacagagaatctgtccgaagccatattctgctggttctaacgggggaagtcccacgaaatccatggcagcgcagttttcaaaaaacggctcaggaagaggacctggaaacaaaacctaaacaggttaagcgatacaaagaaatcccccaaagccccataaaatcaaaatgcgggcctaaaaaaagccaatctcaaaggttttaaaagggctaacaagaaaaacggggacaacttagcgaacccatccttcagaaaaaacccccacagacaaattaccccccacaaaaataggggagggaaaaaaaacaggcaaaagttaaaaagcgcggtcacagaa

SEQ ID NO: 12312 - DNA, 619 bp, Emericella nidulans
  unsure (1)..(619): unsure at all n locations
tcacatatcgtcgtagaagcctttccgaatagcctcggctgagacccgcaactggtagggcgcaaagtctgaaaactctaggaatttcggctccggttgggtggtactattggtgagtctctgaagtgtcttaattgcatccctggcttcggtctcgatgcgtcgctgcgaaacgggttggggagcattgtaccagtagtagaagagaccatcaaccgaggaaggattgaaagcaaccacgctagggatctcagcaagattgtaggaggcgttggcagcgtagttcttgaagctaaatactggggcgaggccagtgtcgctcaccacgccaccatagtacggcaagccgtaaatgtgtgagaggacgctgtgctcgtgcgagtcgaggccgaaggtcctcatgttgtctaggatagggggcatcccaacaatcaattgcttggcgatgataagcttgcgacctgttggagtgtcaacaacgagtcgcacgccgtcgcgctttctggtcctncgcttgccggcgaccactcttgacctgagaggagatncggctgcagttcagacccgcgttgcggtaaactgggaagtgcgcgatggcattgacacgactgccccgaca

SEQ ID NO: 12313 - DNA, 268 bp, Emericella nidulans
gggccggaaacaccttcaacatcccccaatacaccattatcgttttttttcgcgacccgtccggcgcgaccaaaggggagcctgtgagtggtgcatttgggctataaagcgctcggcgactgtgaaatggcctgctttggctgctaataaagaataaatattgtgcagacgacgcagacagatctgatatcccccttaggcgggatttgccccaaaatgccaaccgccggatcctagtcgcgattagtaacctttgtcgcgtcgattc

SEQ ID NO: 12314 - DNA, 813 bp, Emericella nidulans
ggggactctcgatcatgctgggtctttactgaggcgcgtaaagtctatctaagtgtctgacacatggccagaggttgggtggcgctggataacagccatgctagcttgagctcggttccagagctgacctcgtacctggacgactagaccgcagatgagcgatgaacatactgctaaagtgcatgccaccaagcaaacgggtccggtcttatctgagacgtgtctagaagaagcactgggacgaaaattggccattgggggacaccaacacacaatgccaccgaatgattgatgtaggagcccctgactatcatttgcaaaccgtggaaatctgcgccggacatatgtacgcctacctacaaggttcgaggcgttactggtctgacgataactagcgcgttagtaacggccgtgggtctatctgtctgatacgacaatggttgactgacaccttgaccagatcacaaatggactgggccgtacaccaataatctgtctgtccacaggttctccttcccccatggtcgcattggactttccttcaggattttggaaatgtcggttaatctttcccttatcaacgcggagcgccattacggtgatacctttcttaaatggcgcacgtcaataggttaaaattcccccacaaacccgccaggagcccttagggtcacccacggcctttacctccggaaatttcaaaacggcccttttccggaggaagcgtgaatttcccaggttttttccaaagaactttgctcatcccaaaataaaaatcccggaaattattgtgaaaaccaacttgcaacggtc

SEQ ID NO: 12315 - DNA, 541 bp, Emericella nidulans
tcagtcaggattagattccagttgtagtcctccagaactggttatatgcttggtagccaatcaggtttccgttgggcagtctgcggccatagttatataggctgacgatgcgtttagcgaaaagatcaacaaaaggtatttgcctgcaccccaggcacgtggtccggtgggacacaggatatgcactccctttagagcacttaacgccaatagaaggaacaatactaaccctcttcagcaaaggagggtcagcggctaattctccatgcatatcacaaaagcatcgattcaaactgccaggctacaacaaatgcagattagaacggaacagaggcagtgttcaagcgcgccggtcatcggatcaagcacgggctcggaggactaaagtcctgtttaatcttgatgagtaccaaacagaggaattgcgagtagtatcaacagttgcataatgatggtcgcggaatggctatcttgcttcccgctctgggagctcggatgatctccatcgcttccctaatgggagcgtagtacgctttaagca

SEQ ID NO: 12316 - DNA, 711 bp, Emericella nidulans
ctgcatttctctgtatagtccgagttgacaatgttaaatcggcggaatcaatttatcgaacttcatatatttatacagtatctttatcatacactatccccaataaagtgatatgttcatttaataatctcccacattccttccttcatgctccccaatatactgccctgcatcctcatcttctccggcctgaatgtcaaaaccccccctgttcttattcgacctctttaaacttcttgtctggcctttagcacctggccaattggcgccaatttcattacctgcgttctcagcctgggctggtaacgtgttcccagtgcccgtcatgacttcaccggtaaagcccatatctttcgtactccgcggaagatcggtgtaattatctgcggcaaaggcgagagacggctgaccctgtcccgcataatcaaaggagtcatcttcggctttttgatcgtcgcgtgggacggatgggatggtgttcatgcggcctgcatcgttaggaatcctggtgccgcttggcgccatgtcggagagagagccgccttgtgaggggaagacatattgataatattttaactttgttaacgtgataatattatagacacttaatagaaatatgattaatgtattcattgagcaggatgtgattatatgatagagtgtgtcctgaagccgatgagcatgatgaccgaaatgattcagagcaaaaca

SEQ ID NO: 12317 - DNA, 781 bp, Emericella nidulans
ttgttccactcccaaggaacataatccacatacacatcctgcactttccacgggtactggtaataccccgattcttcaaagtagcctaaattgccaatcgacaatgaagaacgggtagagtcagattcaacagcgccctcgatctgttgacagagtctcgaagcgttgcgtaatagaatctgtcctgggtttggccggaatataggaggtacagttgggaggaaaagaggggcagtggtcattatcttgatggctgctggcgtttcagtccccgttatccaggcgtcatggtctttcgaggaattgggaagctcttcgtttagaaacagttccacgcccgagagtcggtcttgtttcagtgttgacatatcggcgttacggtagtagcttgcgtttgtttctgaggtggtctgggtcgaagacttagtcgtgcatgagcataagggcggcgtaaagaggctcgtcttgggttggtagttattgagatgggctagttggcgtctgtgttgagtctcgtaacttccattaccttcttaacttcgcgaactccaacgtagacaccatgcacgctcgggtcatcagtggtttatgactgcaccatacagatgcccttgctcctgctctgctttggtttgaccctgagacccgtcttatacctggtggtccctataagttcggcccagtttaaggccctggcttgttttggctttcaatcaaggcggaattctttgtttttcagaagcacttgtataaaacggtttggcggcgttagcctttgttg

SEQ ID NO: 12318 - DNA, 971 bp, Emericella nidulans
  unsure (1)..(971): unsure at all n locations
ttcggatatcgccatgaccgctcgtaccatggagggatgaagaacctgatgaggttatcgttcgggtctttcaagggcctacagcacttactttggagatgttaagaattgatggccgcgtcgacaaagctaccaatggtaatgcctggaaagagctccgttgcttcagggataatcaggatatgggcactctatgggaggtgaggcatgcttggtatgtgaagaacaatagaggacacctttttcaatgaaggtacagagccccatttgctttgatatgtccgtcagtaatttgcctagccagagacatacattatctactcattgattgggacggaactctcactaaaatggtgattatcacctttatcacagaatatactattcactcgtagagaacattaacatcatatatcttttgcctgaaacctgacgtagacaatactcacaagctacttacaagcaatcatgatgcatcattatttgctccaaagaccatattttcctccctagtcgttcgaccctgctccgcatcagcagcgtaatcaaccgcgaaactgctttggataaaattttcagttcttcgtaacagtcttaactttttcttacgctcgcacaccttctgcctacatatgccggatgggggtctatgtccccatgccggatgcttaacgtttctcataaatgcatgggcgactaacgnggagcctatagctgcctaaaagcccttcaagaccgcgaatgacgattgttgcctgggcccctatgcccctctgttgtagggggtgcgttatcccaaaagcgtttttaccggggggggccaccccccccggcgtgtgggagaggtcccccgaggaggtaagggcctcctttattaaatatagctcacaaaaaaaaattatattttttcatcttctctctctcttatcccgggctttggtttaaaatttttaccccccctctgctactct

SEQ ID NO: 12319 - DNA, 5287 bp, Emericella nidulans
agaagatatagcatgtttacgccgacggcccaactccagcatcattttggacaatatgctgatgtgctggcacctggtttcttttgctcgactcatcttcattggcaaattcacgggccgctcgctggtccagaatatgcgccgttgttacgcgttcttccggggggggagggacccattcgctgcttttccagggaggtacgcgcatcacatacatcatgtccatttcttcaagcgtcttccctttgccctcgagtacaaagaagtagactatgagtatggctgcgaaaaggcagccggcgaacacatagccataagcgaaatcgatatctcccgtgataaaaggcgtaaagaacctgatttcccgctgctagcatactactgcatagcatgggtgtataatggacatgcccaataagaaattccacagccagttcgaagccgtggccatggccatagccttagctcgatagcgggatgggtaaagctctgccacgatagcccaaatcatggggccccacgtagtcgcgaaacctaaaattacagataagcgttgtgtccccgcagtggagtatccacccagaaagtatggggtatatctcaccagtaataaacaaacaggcgaagacaaccattgccttgccagcgccaggagtagcagaaggatcttccacattcagagaaaagtggccaactgaggcaaaaaccatgaaattcacaaacatccatattcctcctgtcaccaaactttttcgtcttccaaaatgctcgacaacataaaggccgaagaaagtagtgccgaagttcactccgcccaagatcatctgcgtgacaaacacgtttgagatacccgctccattgaagacagttgtacctagaataatggatcagtccgttttcccgaagcatcttcgatttgaatctggtccagggaccagaaagccacatccatatatgtgaaatatcactacatggtgtaaccacatggcactacgtgactatacgccttaaaaactgatgtagacgtaccgtaatagaagaaatagttagctccagtcagctgttgtagtgcctgcagtacaatgcctagggttatgcgataaaacatccgaggcccctggaacatctctatccacccatgaaaaccacctctggaggagctttcagcctcgagttgttccctaatctcagtaagttcctctatgatagcccggtggttctggggcacgccataaagttttgacatggtttgtcgggctttgtccgcgcgcccgtgcctgaagtcatagcgagggctctctgggaaaaatatgattccaataccgagaagcaaagcccacagaaacgtgattccgagaggaatacgccaggatgccgagttgctcatgccctctgtcccatagtttatgcagtaggcaacaaagatacccagggtaacgaacaattggtacgagctagaaggctactgtcagcagtcaggtactatcggggacaaagaatatcttgtcttgaatgaacagcttaccagaccatggccccacgtatctgttttggggatgtctcgccttgatataatggcactattcaaatccattagccaagacctggaaggagaaggctgcgcgtacctagtaaagagcaagcgcccacaccaaaaccggtcacgaaacgacccatcatgaattggtaccacttagggtgtggcgacgagatctgaatgatgaggccaacatgaagaataatgcaccaaaatgcaatggaccatttgcggccaagccggtcagccagtggaccagccatcagggctcccagaagcgtaccgatggacaactaccgtggctcgaatcaatttaaagatgtagttttgaggatatctttacttaccatggacactatcagccctgatcgcacgttattgaaagcgtaagttccatccagctgccgctggccgaatcgtcgtttaaaattgtccatttcgagaaagccggagatctgaccagtgtcatagccgaatataatgcctcctatggaaacaaaggcacctagagctagagatcgccaggtcacgaatggtacaggactttcattcatttcatcttgcttctctctatcgagctgctcctgatggtgctgctcccccgagcggccaagacgacattgcgcttcctcagatcggttattaagaaatattgttgataacttcttcatgataaatatctttgtagcagcaactgctgtgtataggtctcagacaaacgttcatacaatgtcgagatcagaatagcaggtatatagtgtaagcaaaccgatgacgaaagccaccaaaatttgagaaatgcatcaaaatatgcagcaagcctccttaaatgggctggatgatatcgcaaataagtataaagcctacgatgacgatggccatggctggccaagcccacggacatgatccaatggctcgttacggctcaaatgttggaggcaaacgaagggagtattctgtagtcatgacgtcaggaaccgttctttcccccagactcggcagatttctccaaattcagtttcgaattgtataaggataattactgctacctagaatgtcatacaattaaataaaatccgcgattctgatatagctcacagattttcagtaagggatgccgttcgtaaggagctggaactgatcatatccctttgtcgacatactcaaatacgatttgcgcactagctcccgcataaactccgccgcctctcgctcactcttgtcgaggacgaatcgatcacggaagtgtttcagcgtctcaggtttgaagcatggtaggccgctgtctaacatcaacgacacaatgtgcgacagtttggtgctatacggcctagacgctaaaaacgcctttacgaccaaagactcgaaccatcgatatggctgagtctgtgtgggattgtgacttccactgctagaggaatgtggagtgccactcatcacggccaccatttccgatgtgagtttgaatggcgcacgttcgaagcgtacaccgccgggcgcgatatcaaagcagaacccgaaatcgatatgaataatgtggccagcatcatcaaacatgatgttgccattgtgccgatccttgaactgcatcaagtaggaaatgacagaatacgcggccatgcttttgacgaagtttgttcgggcttcctggaactggattgaatcttctcccccatacttggaaacaaagtagtcatatagcccgttgactgcttcgcggcccagcatatcccgtgaaatagagtttggcagcacatcaatgaccccacatcctggtgctgttgaagtcacccggtatgggaatacccagacgtcgagaccaatgctggcaaatatacttcggaaggcggctatcatttgcaaagctagcatatcttgacggcagtcgtctccgactttaaagatggccgactgccagacctcgtaggtttcctggtgcgcgtccgattgatgatgatgcgaggattggaccagctcgttcgatggcaggcttgtggttcgcgtcttctgaattctgaaagttgccaaataaggcgcctttgcgtggctttgtagaggcttccctgacttgcgatcgattccaaccacaacgccgtctgggttgctgggaagataaacgccaacttcaactttgattttacgaagctcttcctcaatcttttccttcttttcaggcttgctcttcttgatgtatgggcgaagttttccagagataccagtaatctcgttgaagaaagagaattctctttgatagaagtcgcgctcatcgtcactgaaacttgtaatcaaggtgtccatgaatcgatccagggttggcttgagggggtccggctgttcgtgtcagtctatttccgtcattagttgctgttgtcacttactatctgagaatcctcatctttataggaattcgccttcatgttccaaatcacttgatgtgcaaacaattgagactgcttcgccgtttcgaggatgtaccgctcgacataacctagggcatcatatcggagagcctgaacaagctgtgggacgaagtagaatcgaacgtcaagggaatgactctccaaggccttcatcgcatattgcaagatgaacggatggttgccgtacggggcaggaaataagttaagccttcgataggattgacgggggcccagtacagcagatacttatggttgtcagttcaaacacccaggaggtatccatatgactaaccttaagttgagaggaaacgtcggctggtagcgctgatccaaacataatctcaagactactaggctcatcaatggccttctcaggaaagctaagaagtagtctccggatttcattgctgagctttccagacgggaaacgtgtcgcaagctggattgctaaacctgggctctcagcccaagcagccggcagcatattctcctagaggaattcttagaacgtggctacgaaggggaagggaaagaaaccaccctccgtgagatgcttgctgaattgagtagggttatgctttcggtcaggttccagcggatacaaccaaaccctgagccttgtcctctcgttttccaacagaacttggagaagatcttgttgcgcctgaagtgaagtgtaaggccatcgggtgttgcaacccacaccagacacttttgtcaaagcggttacaacatcgctgagaattttatcttccgcctttaactgcagccgattacctccaaaggaccatctgattcgttcagcatggtccagatagaagccctattctgggaggtggggatcttaccggggcggatgtttgaaccagttgagagcagcagataggatttggtgtttatgtcgccacagcgtgacattgtcaatggaggtgcaatgcctgagagccctgagacagaagtggattatgcggaaatggacttctcgggccagaggatggttactagcatgcaaaagtcccactgtcgtcctgtcaataaaacgagaaaacagatgttgcgtctgtgcattgcctagtcggacagcattaaaatggctttcgaaaagctggataatctggaagtgtggggcaagaatgttctgagcaaacttctgttgctgaagcattgaatctttgtttgtcggcagaagctcaattttggcatacatcgggtccacatgactgcatgtactcaatatctagaagtattattgaagcatggggcggattgtgctcacctgaaagagggatcaaaaagtccctgccttcgtagaaatcgtgttctgccattc

SEQ ID NO: 12320 - DNA, 363 bp, Emericella nidulans
ttcagttcagtggactactaaacgtctacgtagtactaattgatcagcccccttctctgactactaaagtgcctactaggccttgttgaagtacagtgctgcgttaacgtatacaagtgagcattgcgtcgtactattcaaacacgttgtttgaccggaatttgcaagagaaccttgtagagtgctgaaccgaggaggatagaaaccgctaagccggcttcgaactaatcgacgcacgcctatattccctcatagacgatcgcttaaccttttgtagattaagtgttggccaaccccgcctaataatatgctagttagttccgggcttaagcctttttcaacgccgcttttgccgactgctac

SEQ ID NO: 12321 - DNA, 248 bp, Emericella nidulans
gcgactgtcctacaagatgagatgagtgctctgtgcatgcgcggccgtgggtggattatttgcggggctgaccacgatggcagtgccgtgcggatggtacgtgcagccgacagccatagcattgctagcgggggttaccggcttggtctgaaggacagagattctgttgtgcaggactactgcttgaaagcgactctatgtacacatatggagtcagcgtctagggcacagtccgtattgcttaccgg

SEQ ID NO: 12322 - DNA, 602 bp, Emericella nidulans
gcgcagtcaagcttggtggagtcctctgcgcaaagtggtgtataagtatcagctagtactaccaggcactcacaggctgagcattcctggactagggaaaaaataactagggcccggaggatcacaccttatagtgaccgatcctatcctatacagactaaattctagatatgggaccgaccccaataactacaatagatcccagctcacagtccctgagattctagaaaatatttgacaactgaaaagtaaatgaagcaggattgttcaggcacgctcaccagttggattccgccaacgtagtctgccaactgccgcaggtgaaaaagtggcttctgttcatgtcctagctactgactggactggctggacacaatggcaccttgcgttaacctacgagaagcgtcctatcccgacgtccccggccaaaagcggctattttcttatgctatgatcacgtatgaagtatagaattataattggataaaatataggaaggtagtatattacttagtttacatagtattgctacgatactgggtcgtattgctgcggataatagatgtacggggcgctgcagacactgatgcttcagtctttgt

SEQ ID NO: 12323 - DNA, 538 bp, Emericella nidulans
tgcaagatgctttagtcagtgatatatgagaataacgtaataatattgttttagactcaaagtgtccgtagaaacagattgaataagccttcaacattggccaggcatgtaagagagaccctcaagtgccgtattctttggtgttcttaggtcttcagtagtaggtgaaaactttttgacaataatgattggtcagataattgtggcccggactagctcgctaagatcttggtaagcgctagcccggaagtgccccattttagaaagggatttagacccctttcggcccgaccgtgttcgaaactaagcgaatctacgtacgttaagcccccccctacattgggaaaattcacccttgggagaaaactctgctaactgcctttagagttcaaagaatcacttttgaggtgacccctctcattgggcttcttttttgggcccaccccttaccccttgctgttgacctttttggcctcctaaccccaaaagaagctttgtttacctctgtttgtccattgtttttactggcctaccgttt

SEQ ID NO: 12324 - DNA, 1042 bp, Emericella nidulans
ggatctattttacgatggacttacacattatatttttaatttgtcattgtactgttgaggtcgcgtttgtcaggaagatggaaagttgctgccataacggaggtgggttcaaagtgttgagtctcgtgtctcctgacaaccccgcaccgaccaagaccttagtttcttctttgcatcccttgacagcggcatctacttcatttttggtatttgtttactgagtctgtgtatataccgcgctctgaattatttgaagccattgatggacgaaatcaagactctgcaccacccaactgccaccgctactgtcactactctgacagtcttatcgcggtggagaaccccagatcacaatgttacatccgctatattagacgagcctttaatcctgacggtacttaacaggacccgccggtagccgtgtataatcgtgccacatgattggtggacaatagctcctattaagcttgacgtaaattaccccgtaccacttataccgaggttttctgcagtaggccagtaggccaataagtttccagcgagtttattcagcgggtcgtccgactccataattcaccttcaatattcctgataaccttaccacttttgataatggctttgtaaagtccttgccaaccattccttttcatttcattatagatctttcttcccgctactcaggcctctcccatacttagttctcccccttttttaaccccatcctttcttaatattcctctgcccttccgagtacagtttattcccgaccttcgtatttcccccatccttcacccacatggcctcgtctttccctcatcattatgtcccccttccctcttgtcctccctccctcccttctcctattctctcctactatccttctattttttcctctatcactacttcttatctttcatcctatacctccatcttctttcttaacctcccccccttatctttctatctctttcttccttttcctcttactttctatatctataatttactctatatcacttcactctctcttttccttttccta

SEQ ID NO: 12325 - DNA, 1914 bp, Emericella nidulans
taaagtcataggatggtcgcttcgtcgcgatttcacagcaccaaagacttgccatcggctgccaatctcctgacatacagtttcattgagccgcaaacacccttagttgacgttctccctgggagtatcgagtccctgtacattgaggactgcaagaacagatcgtctgggatgttgcttgaccaggttgggttggtgcttgacgcgcggaatcggaagacgaggttcaatgccctgaggcgcttggatatcgagggcttctttcatgacgatgaggaggatgaagacacgtctggtggtggcaatggaggcagagtcatcaaacagcgtgtttatgagatggtggagcccctggggggtgtttgtgaagaggctggtatcaagctatctctgcgggatcggatgtgcttgcataccatgcattaagcttgggtgctagattgcttttcgtcgcatttatgtgtttttttgttccgaggtttttggtatccgttgcccaggctggtatatggggtgtgacatcttgcctcacttttgcttttgaatcactttatagacgcagtacatactagacacatagatgaccccacatatagaccgcgatctcattagaatcagatagacattctttggcccctcttcacttcatcatgttcagtaaatgccctgcctggttagagagagctatacctaggaacattatcgtactctgattcaaaccacctggacaggtgtagtttagccaggcaagcactatcgcaagcaaagaatagcggttccggtgtaggtcagggagaaatctggccttgcaatatgcatactgacgttatcgatcagctgcggttctggccttagtctgtggtgatcatggcgtgaatttggatttagggcttgacatcgagaaagtctcactcgcttcacaacgcttacgtccaattggattgtctataatttaggtgttttccagaaccattggcgacttgattctatatcctaaaggcgtactcaagatctcgcggggtcagtattctgcttcgaaatagtcaataaacggaatgctgctccagtcaaatcttcagtccaatgagtaaaaactcatgtggatttaggtatcaatgagttccttatgcgtttcttacttcctcttcagattttctttccaaagcttttcttctcctttgctccccactcagagagcaatgattcagctcgattcaggtagaccctgccatcttgaagtgcagcaaagggttgggacccaaattcagcaggactccgctttatcgagaaagaactgttctcctacaagctacgctcaaggagcctgtgggagcaccatgataattaaatcaactaatgtacgttacggtcctccggccgtcccactgaggctgaaaagcagctaggcgctgaatattaccgatcaacaagcgatgcgcacagtattgccatgaagcaggataacgctgccttgaagacttttgcaactctcagtaagatacatcttcctgggacgtttgtctcggtgagctcatagtgtcctccgtaaaaaaagctctagcgctaagggagaccatcggtatctagggcctgttcgggacgaacttcttcaacccgtcaaaggacaaatcagggcacgtctggctggtgtctgaaagattttgcctctactgggctaattactacccccttgcggctctggctatagtggtctggaagtatcctagcgctacgctgggattagctgtgttggtggttaatctcctcaactatgctgttatgaagacacggctttggaagcggaagaggcggtcaaatgtacgggctatcttgaaaagagcaaggcggtttaagctactcactgtctaagctcgtggcgagttctatgacgagcaagtcgtttgaaagacgttg

SEQ ID NO: 12326 - DNA, 2453 bp, Emericella nidulans
ttgccggggccttagaggtagctgatgaagccgctacttggcgtgcgatgctgattaggtgggtagtggtgtgcctggtgagggctagactggaagtggggttgttgctgagggtagttccctcgaccaggtggcactaagttttcattagcaaacatttataactgcctctcgggccattgcaacttacaatgacctggctgttgcccagcatacactggctgctggtgctggccgggcggcatatacataacgtgttggggagcttggccgggttgcgagttctgatgcatcatcataggggcgccgcggctgggactggggtagccgccatggggttgaggcggtggcacatgaggataggcatgagctgggcttggagaatacatttgcatctgaggcgtgaatggagcctggggaacccccatgtaaggccctccagacggctgctggaccatgataggcgctgccatggcaccctgcggattgacgaatggaggagcgccttggtagtgtctcatgtgggcgggctgcggtgcgccttgattgacgaaaaattgaggcataggctgttggccatacgcaagttgtgcatgaggtgccatcggtgacgggtatccatgttgaagcctgggggatggaaacatctgcgattgcgaggcagacatttgcatacggtgggggtcatcaaaatgcggagggccagatccatgatgctgttgaggatgaacgtgaggtccatggggagggccggaggtaggtggcatggtaggtgcctgctggaactggtagggtaagtggggttggtgaggtatctgtggattagaggcagaccgactctgcggggaagtgtgagacgatttgaacatctgcacatagctcttctcttcgtctccattagtcgcaatattccacgtaggtagggtgctgtaagcaaagggaatcccgccgttcgaactatagtcccgatcagtctgctctgcactctcttttttcatacgcttgataggattgaattgatccttaagcgaagggcgctcggagatgggtcgtggcttgtgcgtgccgaagaaattggagggacttttggttcgcgggtcaggcttgacaaacattggcattgccgatgcgcccggtgtaaatgtactggccgttgggttaggcttaaattccatagccttgacgttgaacttagttgagatagatgatgtcggtgtgaggactttggttgggctagacacatttgactgatcggtagacggcgcagcacgggcatcttggattggcagcggggttggtactggcccggcagctgctccttttcgctgctggaggttgtcggcaaggcgatgaccgagcattcctgtcgtttggcgacccgaatatagaggttggtgcggagctcgtcctgcagggccaccttggggacccgttggtggatatccttgacggccacgaggataagcagggcggtctgtctgagacggttgagcagccgttgcgccgccttcctggcggacaggtaactgggcctgatctgcggtctttttctgttcgacaggagtggccgtagtatccttgggcggctttttctcctcagcagcattctgctgagcccgttgaatgatcgcttcctgcttgcgcggatctttggcgaggatggggacaaggtctttcgggactggagtagcaagcttgaaattctgggagaacttcatcaaatcgttgagcttggttgaccggtctacagctgcttggttacgacgtcgttgatccagcttgattcgctcgttgtttgcaaagatacggaaacgatccactacttcattctcatagttgttcccgggagacacacccttggtggcagcaggagttgtggaagatgctttgggaggggcgacctttcgttctgattcggaagcgggagcggcagtgaccgcgggtgctgcaggtggctgcgataaagcaggctcctttgctggcagtgttgtggggctggtttcttttgtgctaatcgcccgcttgacggagcccgtttgtggtggagcagtggcagcaagctgattgctgaagttcctgagagcaggcggagtgtatttgttcggctgcccagaagccaatgggggaaagttcttttcgtcacggcgcacaccactgtatttgtcttcctcgtccccggcatccggtgcttgaagtcctcgctcctctctcacgtgcgcattgtctgtgtcactgttctcgatttcacgggcaatgcgagcggcttcagcttcctttcgcttataggtcgggtccgagcggtcgatacgggtagtatacatatcctcgtcatagctgctagtagcaccgaaaagtcgtgcatttgtttcaaattggtcccattgttttaaggccgttgaggtactttcgagagacaaatcggtgcttgcatctgccccaggttcccagcgttt

SEQ ID NO: 12327 - DNA, 3058 bp, Emericella nidulans
ctcctgggatcttgggaccatatctctcaccacaatgcatttgccgtcgggacggggtcatcagccgacgatactcctcctccagctctgcataaagctctttttttcgcccctgcttctctgcctcccgcaactcatgccgatgtccaacctcgatcccgccatctagcggaagggaaccccattgtcccgagggccaggcgacctggacgtgcgggtctctcgcgccgagcatcacaccgccggcgacgccgtaggcacgtcgggtaatgacgctgaagatgggcgttgtggtgctgaagtatgcttttgcgagttcgataccccatcgcattgtcgcggttcgttcggcaacggtgccgattgcgtaaccggctacactggaagttagctatcattgagctcacgatgagcgggcggagtacatacggacgtcaacaaattgcagcacgggcaggttcatcacgtcacatagcttcagaagtcgagcaagcttctggcttcctgccgcatctagagcgccactgtttacttcacagttgagcgaaattatacccactggccggccaccgagccgagcaagacccgttattgcggtgcggccccagagagctccaatctcgaagaatgagccgttatccacaacgcttctgatgatcgtccagggattatacatgcgagtttgtttgcgggggataatccggcgaagagactcgtcttctcggatttcttggtcatcgcacgggattacagggggcgcattgtatcgaccgcagttagggaggtaggagagcactgtacgtagctgctcgaagcattcggcttcattagcggccatgttatcaatcgttccattcgtacagtggatcatgggcccgccaaggtcctgaaagccgaggccttcttcgaacgttgctccctttactacctctggacctgcgttgaacagggcgcctacgtcggcggccatgacggagaaatggcacgacgtgacacgggcggctccaagcccgatctgagcgtattagcaggtgtgcatatatgggtggaaggggagcataccgctggtcccagaactgccccgacgttggggatgccgtcattcaattgctgtatgacatagtgaaacattggcacatacgggagatagctccatccttccttccgaatcgttgtgacgctacctcccccagaactaccatcaaccagttttaccacaggcagcttgagtgcaacggccagcttctccagataaattgtcttccccgccgaagctccgtctgcgtgtccgctgcgtatggagaaatcgtctgctgtcagcagcacgcgccgtccacgcagctttcccattccctgaacgttattgctaggcacgaatgaaactggcttctcacgcatcggtcctgttttcttccattctactgtgccggacaaagagccgatttcctcaaaactattcggatctaaaagctgttcaagccgctcgcggacccatagctttccagattgtttctgccgcacatagccgcgacgcgataaatctggagttgctgcgatcgtgcgcagtgtttcgatttgttcacgaacatcggcatagtctgggggcaaattgaggtgtgatgagacttgtcgtagtcgtttttttgcggacgcagtggtatggttgtcatccggcattctcgaaaatggctgtgctgccagaatacttaagaggtcaagttgttgttctcgagttcctgtgcgattgttaccccctcatgaggggtaacagttgggccgagtaccgaggatcagacaaacagatacatcttagactcaacatcatcaggatatcaaaccgagcatctttcacacagtaggtgtaaaatgttggttgcacgcccaatacagcgaatcctggtcgcaaacaggtactaacccccgtacgaaagttctactacctgctgacgagccagaggcgagattgctgttcgaattctccaagctacaagagaagcctgtccatcgattaaaacatacgccttgtatacagacaatgaccgcacccattgcgatattgggcgcccccatcatgcgttgcacattaccccagatgggtatttggacatcgagcttttggttcgactcgtccagcaacacgcaatcgatgcaatccatccaggatatggcttcctgagtgaaagtgccgagtttgcaaggcgtatgcaagatcttggagtcattgttatagggcctggctgggaagcattggatcgcacgggagacaagctcagagcgaagcaactggcggtggagaacaacgttcctgtattaccgagcctggaatacgacatggccactccgcgtgcaacaggccttggaaagatcaaatcattcgctcataatgtgggatacccggtcatgatcaaggccgtcgacggcggcggaggacggggcatccgactcgtccatagagacgacgacctggggcacgccgtgcgcgcatctgcagctgagtctccatcacaaacagtatttgtggaaaaagcagccatagacgggtttcaccatatagagatccaaatcgtgggtgatggtaaagacgtgcagcatctgtgggagcgcgactgtagcgtgcagcgacggttccaaaagattgttgaaatcgcgccatcattgatccgcgatagaaatcaggagctggtcagcagaatagccgacgcagcagtacgcatgatgaaggccatccgttatcgatctcttgggactgtggagtttctggtcaacgaacaactcaatgaattctacttcctcgagatcaacccgcggatccaggtggaacacactatcacggaagccatcacgggcgttgacctggtccagacccagctactcatagcacaaggatacttccttgcgcaacttggcttggacacttgccccaaagcccgcggtcactgcattcaacttcggctatgctccgaggatccgcgcgccaatttctcgctgagtgtgggaaaggtgatggactttaacgctcctactggtaatggagccgactcgatactcacatagatgt

SEQ ID NO: 12328 - DNA, 255 bp, Emericella nidulans
  unsure (1)..(255): unsure at all n locations
agcgacaccacctggatcttattagctgtcctggcgatcgactggggcgtagggccgtnacacacaccttggaggggcgcgggaagcatcccggggactcccaccctgtctcgcagtccagggagatcgaccgtcttaccggatgcgaagtggctgactactcgcgtggacccgtactagaggtgctaggggggatcgggatcgcaaaattgatctcgcaggtgatgcctacaggatacaagttcgcaaccagat

SEQ ID NO: 12329 - DNA, 574 bp, Emericella nidulans
aagtagtagtagtcaggctggtctggacgtagctcagttagctcgccagaaccgtccctgtaggcctaccagatcatccagtagacagcaggtagattattaaccacacacaatacacagcttcgaccaatacaccactggcgtaggaagggtgcgtcccgttcacaccatctgatgtataggccagctgaaatggcagcagaagagctacagatagctacctgggaccagtgtaggctaccagattcctgctagatcagcctgggactgccagtgccctggggaactgggaaggtggtgttatgaaacggattatgattatgatagtaacctccactataacagctacagctacaacggttactgaataagtcctcttgaagaggtgcagccggtgctggtcctgcgtgagatgctgcaacagcaccgagtggccttgctctagcttagatgtagtctcgctagtaacgttctaactcactccctgttgggtaagttgtctcagtcttcttccgtttgcccctatgcctgctcttgcgcttcccctaggcttccgttaatgtttgcctatctg

SEQ ID NO: 12330 - DNA, 1237 bp, Emericella nidulans
ctggtcataatcgaaccgcatgtactcttacttagggctagctgtgtatacgaccccatgcctcgtttgctgctgtatcattcaacatcccccgagatccggaataacaatccccttcataaaggtgtaatatgccagacgtgccagggtgcgctttaaataacctacgtgagttactctggaagtagtatggaaagcgagagattacctatggctctctgcccccttgttaagacaaaatgtaaatatggccttaaacataacacgtacacaagcccatcccatgacagaacaaagtgggtatagtgattaattgacctctagagaaaaatacaagaagcgatgcgacaaaagaatgtaaactaggaggaagaaacataacataaccttaaccgggccttccggccaactcaagacgagatgcgtggtatcaaacgtgacgatataaattttcagaacacgacatttaggtacgaatagtttcatgtattcatattttcggttcatcagatgtgcaatatcggcatccacagcatgatggcgttaactagacgggacgtttgaatccaggtgatatagttaggtgcgggtgtcgcatccgattcgtccgaggagtgccttgcgatcgcttcggcgagaccgagtggaggatggtccgtttcgacgccattcagcgcttgagacctccgctgcgatggcattgccattagcggcgcttttgggatctacttcttcttcgtccttctcttcactgtcactgcgagtatcttctgcattgccggttcggaggacgcctatggccactcgaatgaccatgctgaaccagataatggacagaacctggagcgccagcagagacgagaggaaaatccatttgatcgtgcggttcatgcaaatggggccgtcgatgttcaagaacggggagaagaggtgcatcactctgtcaggataaccgttggttgagatcagctcgcctgtggcaccggagtagcagccccaaggcataacagcgggtacatccttgaagatggaccagcagagcaatgggtacatgatatggcgtgaaatggcccagaccaccataaacactccaaaagcgatgttgcaggacatttcaaatttcaagtacttgaggatttttgcagtctgtcgaaattagtgctccgcccatcaacctgaaagcgggcccgacttaccggcagcaataaatccacgatgtccatcaggttgagcacca

SEQ ID NO: 12331 - DNA, 578 bp, Emericella nidulans
ggcggtgtcttgaaacgctcgccagcctcggcaagagctgtttgggcatatcccagagtgtgcggtggtttacagatccggggacgaaacctgccctgccatcctctgagtcacttgtactcatttgaggcctaaagcacccactcggacacacccaaacagaggcgaccaaccagtaattctgcaacgatctattctagcatgtttagcttcatgatgattgcacagcatgcgatgaggatgccgtgatataacgagggtcggctgaagagacatgaggagcatcgagatggcaacctattgccgggtaagagctgttgagtgatatgatatgatgaatcttgcaggagggccatacacagactaacatatgggattaagacgatccaatgcacgagatcgtactgaatgctctacatgccgaggacttcattgagccccttagatttgccattaccaatattgtacgcgtcactgtgtcaaatgaaggacaatacaatcgggatgggcgattaacgggtgtaaaactgggcaacgagtcagtggcagacctcataacgtacgaggtcagaggggtg

SEQ ID NO: 12332 - DNA, 1267 bp, Emericella nidulans
aggagtagtggtagacgtggtggacgtagtagacgtggtaggcgtagtagacgtagtagaggttgtagacgtggtagacgtggtagaggttgcagatgtagtggacgtggtggacgtagtagaagttgtagtggtacttggagtaggagtcggcgtaggggaggtggttggagggggatggttggggtcaaggtcatacaggatctccctgatcttctcattataaccgacaccatcaatctgattattccgcgcctgcgtggcctcccacaacataacacctccaaatgtctccggatacttgtccatgtacttcttcaccagaggcttgacctcttccggggtcaaataatagccaaggttcgcagccgccccactagcgggcagaccaacgtagagcttcgcgttggggttggcacccgccttgataacctcgacccagctgtcgtaattgaaaccgttcttagtgcccaggacaaagtcgcgagcagagcagccaggtgtgttataaaattggacccagacaaaatcgatgacggcgttcttgatggcaacactaagctgctcatcagggatggagcactggggcgcggcggagatgtaaaaggtctgatcaggaacctccccgaagcgcctgcggaaacgcttgatcatgttggcgtagcctgtagcagtcagcatataatcaactcggttgctaggtaagctgcttacccttgctaccaaagaattcgatgtcaaagtcgaaaccgtcaaccacagcattgccaaaagggcgaggcttgtcggcgacagtccaggcgtcggtgactggcccgaaggcaccccagagaaagtcggccaacttggtcgaggcatcgatagtgtcgaaccagtacgtgggagttgcaccgcccagggacaggaacactttcttgccagctgcctgacatttagggatatcttccgcgatgttggggcagtgtgagtacagctgtgaagcgatgccatcgaccacaaaggtatcagcccaacattgattgccaaaatcgctaccaggcagcccagtcagagggttctgttcagggaagctattgatgaatccgatgttgataatgtcgtaggacgtctccgcgcagaactcggcaagacgaggttggttgacaccttggccgtagtagacgcaatgttggatttggcttctgcgtgaaaagcagaggcaagggaagcaagccctgagaggctgaaacgaaggtaaacagtttaggggccattgtctgaatgaagg

SEQ ID NO: 12333 - DNA, 536 bp, Emericella nidulans
ccgtttcactccactctcatctcctcttctcaggcttatttgtgtacttttaggatgggcatttttttgtatttttctttatctatggttagaagtatagttggactattgtatgttctattcaagcaagtagaagaaaaagacaataaccttaactatatgaaaatatcttcgtcttaatgagcaatatctgaattctgctacagtcctgtatcttacttagagctgtttctatctctaccttgatggttaccaatcttcgaaatcgggagtcaacggagtacgtaagaatatataaattcgcttcccttctggatttagttcggtaagcgcactcaagttttaaaattcaagtgactgatgagaagctataatttaagcagcgaagtagaaattatcttgttaatctcgacgacagaacatccatttcattgaggccctgggtatcaatctattcccgcaaccaatgccttcaccaccagcacagcgcctaaatcaaacaatggaaatatgtcagtttacgttggctgcacact

SEQ ID NO: 12334 - DNA, 484 bp, Emericella nidulans
cagaaaccactcaacgtttgactactaccaacctggctttgcattgggctgtatgtgctttatcggattgctgacgagggggcctagctttttgttcaaagcaccggagatcggaacggatgaaggtctatcgagacaatgttgcgagcctggtaccatgcttgtatcgataatgccaggaatgaccaatctgaaatacgcacgaaatatgctctaggagccatcttggctctacgatctcaacctctacaaggttacaagaaccgcattgaatcaaacagtaatactcttgacccctagctatcacagtgcttttacaactatacatcataatatgatacatatcacagcgtaacactttttcaaagacattgctccttactggatttggcaccctgaggaccacgttgaactgatcctccatttggcttaccattctaatcacacagactcaacttgtaccaaaaagacatataccactatt

SEQ ID NO: 12335 - DNA, 2799 bp, Emericella nidulans
  unsure (1)..(2799): unsure at all n locations
ctcgaagccgtattctggaatgagaacatcgaacgcggactcgtagacgcaaagcacaataccctcgctaatgaggtcaccaccaatctcttggcgtagtttgtccatattgcgacaggcttcgatatgaacgctctgctcctgggcgttgtgcgctgaatccttcttattgttgcaaatatcagcggtcttgctgagggattcgacgtcgtctgagaactcgatagcaccatcagacagaacggcttccagttggcggtggacaataacatcagcatagcggcggagagggttagtgaagtgagtatacacaggcaagttgagagtatagtgagggcgcatttcatcctgtacagtgcctgccacatagtacttcgcacgctgcatggatttcacgaagattgtttccattccctgtcgtcaattagatacaaccgaataaccaagggacggtcttgagtaagatggctaaccttgcgcaaatcatcgtccttaaccttgcagagactactctgcaagcttccgctgctagattcgtcaaacccaaacccgagtctgttcatgcgatcgacaaatgagtggaggcgacgggggtttggtgattgctggcggcgaaggaaagctttgtcaggcagagctgcaaccaacttgcgggcaacgaggaagttcgctttgcagcttaattcttccacgagttcacggacagccgaagagccaaagatgttgctttccaccggcacgttctcgtcatcgagagaatgaagaagacggagaggagggatctgagaaacacgatttccgagtctcgcttcacggaatttcgaggcggtgcgctgctttaaagttagccaaaagagatctgatgtattgaacttagtgggagcttttcacctgtaaaccacggatgatatccaccgagactccagacaatggaacatccgacgttcccttaattacagactcaacctcatcgaatcctagcttgccgctgctcttgataatactcttgccgatccaaatatcgtcgtcaatggcccccgtttctgggttggccttgaaaacgacactgactgtcaagcgctcctcacctgggagcaaagcgcatagttcagtcgcgatacgcggaggcagcattttcactagacgatcaacaagataaacggcagtgtcgcgtttcttggcctctcgatcaaccagcgaattgggtttcacaaaatgagcgatgtcagtgacgtggatgccgatctccgcctttccatcgggcagagctttgaaatggtaggcgttgtcgagttcgctggtcccggtcggttcaatagtgaatgtagtttcctggcggaagtcccgacgggaagacaaatcaccttcacttgaaattgaccagttctcccagccaatgctcttcagcacggcatcagtaaactcgtcggagccaaagttgttgtcgcggaggagagcctcagtttccacctttagatcacccatttcgcccagttgttcaaccagagtaccgaaggagtgcagcgacgtgatgggccatctcttgatgcaagcgacgaaaatacgattagcgtagtcttgatgcttctcgacgaaatcgcgcggggcttgctctgtggggatagcaatcaaaggcacacgcttgtcggtaggtttgaaccaaacgatcttcggcttatcttgttgccggtcttgatgacgaccatgggcaccatctctcgcaagtctctcggcttcctgcttttctttcgttgcttgactgctagggcggagtagaccaagtgtgccggagaacatctggccagcaatacgttcgataacggcgacgacatgaccagcgtataggggcttctgttcatcactaatctcatcttcttcgaccagaagcaggctctgaccctcgacctcgacatcgtcattcttcttctgggttggacgctgtcggagactgccacgccgacgaatgctaccgtcaggtcccacctcttgacggtccccagtagagtctgagcgggacatcttgtctgttccagcattactagcggacctcgcgtccgtgatatccttgcgtttcttcttctcttctttctctttcttctgggaccagacttcgtcaacgtcaagtagttcgacggccacgaaatcaccctcaagagcacggtttcgatccttgctaccgcagatgaagatgtcggcatctaagtctggagtcgtaacatacgcatcagaacgattcttcttgttcactctcaggacaccagagacgagttgaccgttagacaaaagcgcgggaagattggcctggggaagatagggagtgaacagagtcttccgctgctgctgctgctgctgttgggtttgctgggcagacagcggctggggggcgtgctgactagcttggaggccacctagaccttgaccgtttagttgcccactctgctgcagggcttgaagctgagcgagttgcaaggggttcagctgctgggctccaccaaacatttgtgggggagccataaccacctggccttggggcaattgaatgagctgaggctggccagggtattggaaggaaccgatacagccgattgactggttcatagacgcacgtgcacggtgtccggactgaaatcctgagttctgctgaccgagacctttagattggtcctggccttgagattggttgttgggctggcgccagttaccgtcaaagttcctagatggggttcgggcgtgggncgaatggctgcctcgacgttggttctcagggccagaggaaccatcattcgcggggtattaaaa

SEQ ID NO: 12336 - DNA, 408 bp, Emericella nidulans
acaccgaacttacgcaattttaccgtcggggtcaacttacacttaaaccgcgtaccccgctagacgggacggtggacgtagaccgggtgacggagagcgtagatgtattcgtaatctatcgcgtaatttgccgggtactacggcaggtaaccactcagagcggcttaaaactaaatatgttgtaataaccccctttcgacgacatgtgcgtggcactggaaagaaaatgaaacgtacgagtgtacgtagacggcaaagaatttcgcgtgacgttcctgcgaattctgcagaaattataatccattggcgcctttactttcactgcttgctcagcctgctaatatgatttattgtggcgtctcttcacgatagtccttccctttcagtaatgtattaggaatagcagca

SEQ ID NO: 12337 - DNA, 615 bp, Emericella nidulans
  unsure (1)..(615): unsure at all n locations
tttcacggcgcacaagttggtgatctctgcgcaaatttcacgacatctgtttagttgcgtcgcgctgctctccctcaactgcctgtcgttgttgtagttgttgtctggctctctgcagcctgctgcctcctggggactgccgcctggaccctgccagactggtaggaagcctgcgactagggaccggaaggctctcgaagatagatgcagctgaggcaagcagggtgactggagtagggactctgacacatgcgatcgatcgggatggcggcgtgaacaggaaggtttatcgcgacctcccaaagcggattctgtcctaggatagcatagtagggctggctngaaagatagatctccagaggttctgcttaggttngttggcagaagctctactgcggctgggtctttccctcgttcgggaccctcgcttagaggaccctacccgagtcgccggcggcgtcgattccgagattgctgaacttgttgtctaatgttctaacaaggctcgcgatttcggcctagaccttgttttccgggttggtgacgtccttgagttattagtgtcgttatgccctgttctcgtctgctctagtgctgtataattagccgcctatc

SEQ ID NO: 12338 - DNA, 322 bp, Emericella nidulans
cggccagccggtgttatcgcacatgatacccacccgttattaccaccgcacggccagaacaccagggtggcatattgcctacgactggggaaggaaccgctcaacgacggccttaagagaatcctgcccttagcatgagaagcgcttgggatgccttgagtgctataacaaactcagcaaacgacagaataatgctgagatgaagccacttgaaatacctatttggcaacgtacaagcgaaatgtactatgcaaaaaacaggactcaaagagaagtaacatcaaaaaaccaaatccagcctgacttgaaaaagagctctacg

SEQ ID NO: 12339 - DNA, 201 bp, Emericella nidulans
gatgcgagatcttcggacgaacgaaagtgatatcagtatagtgttgcgccgagggcgtccttgcttattccggcgacgtatacattgaacgctgattcgttttcattgcgttattattaagcgctctccgcgagtccgccgcccctctaacccttgacaggtgctgacctaaagagatacgcctaagcctgtagtttggac

SEQ ID NO: 12340 - DNA, 2156 bp, Emericella nidulans
gggtctcgggttagtcccgtgtctccaatagtgttaaccgaacaacagtgtcgctagcgagcatataaagataacagtcctgttctccgatgcacataaggccactctagtcgcaaggcggagatagcttgtgtagactagggccatccttagcaggtagcttgaggagcacaagcaatacaacagagcacacgtagtgcagcaaggtgaacaggatatggagaacgagcaggcttgaaatctgaggaagctgtttgtagatgttatcgtcacgacctcaaatggctgggttcgttgtaggtgctccttgttgtctggccagtcctctgcgctcgtcttctatcagagacgcttttctagagccttaggcgacgctggtattgcttttggactagagctgcgaatgagacgcgaacatcatccaccatggcgaagcaagagtgatttactgcccgtgttcccaaccctttgagaactctcgggcaacaagctgcctatggccaactcatcaactgccgatcccctcttcgcgatttatcaagaaccctgctcttacctaaccttcagccttgcaggcggatgctaccacactgcttacgatgcatcggccatgaaccccctgtgagttctccgctctcctcgccatgctcataacagaaccaaccaaccctcgaatgaccgtaagctactaagatactgtgttgaaaatagtaacagcacccccacgcaaccgtacgggctccccgctcttgtgctacccagatctgcatgtcgacccctcaatggtgcatgatgatatcatacggattactgaacctagtatattggatgtttgcgtaacacagattctttgctgagccctgccatagatcggcaagagccttatccgaccatacacaatccgaatatggatactttccctggcaaatgcgactgttttatgctcaatgcacggcgttcaatgtgtctactgcactggttatgattagaatctcattcatggcaatcagtgatcagcgaggatatctcgtgcttacagctcagcatctgggttgcgaaggcatcccctaacgcccgactgggatcttgtggccttcaattctcataaacccctcaacgtagaagagccggacccggcccaagtgtctcctgggctgacatcgccgctaacctagacgatggcctccatggtgatcgatcccagctggccggccggaacgccgccgccgggtgtggtgccgaatttcgacgatccaccgtcgcgaaagacgaccattattgtgctgttggcggtgttcgtaccgcttatgctgtttgttgtggcggcgaggatctatgttcggacccgcattgtgaggatctggggagcggaagatagtaagtcgagtctgtattctagcctggatacaaattgtatcagagtgatcgctaaggcatctaagctacatgcatacttgccgccgtaagtcaatgccggaagttcacatccttcaaccgagttaacaaccaaactaacaaaccagtgcggctctattactcatatggttatctacactcaaagtgagttgcaatcatacctctcaacgtcgagccctggcgattgtagtaactaacccgctgtagcgttaccgctgggactcggccggcacatgtgggatattcgagcaattgatctcatagatccctcttccaaccgggtacttactactcatcctattccacatcaaatcagattgaaattcaattagccaccgagctaacggactggctcaaccagaaattctccgcaggcggtatcagtttcccttggacgctgtgttttgccaaagtgtcgatcctattcttatacaagcgcattttccctctgcgccgggagattgtcgcctcgtggatcggaatcgtcgccgacgccgtcatgtacacgttctgcatcggcatggccatcggaagtgtcgtgaactgcgccgggcttgaagatacagacgatgcctactgccgcttcatcgcggggccgatggtgattatcgtctcggtaatcaatgtcgtcaccgacgtttatgtgctcatcctgccggttccgcgtcttcttaagctgcaagtgacgaggaggaggaagatcggccttcttttagtttttgcaagcgggttggggtgag

SEQ ID NO: 12341 - DNA, 570 bp, Emericella nidulans
tttcacggcgcatcaagttgtggatctctgcgcaaatcactgcagttctgtggatcgcaccgcgactacggtcaccgttatgcgtatgcaaatgctacgaccagcgtccgcacataaactggggactcctggtcagagtattagatgtgttgatattctcgttcgcttgtgtcttcaattgtagttctgatatttgggttttagatattatattacattctcacctaatactaaaattttctgacgttacgcttcgcttggttgtccttactaagcccccagcccgctctcacccgtccctccagacttgctattttaaaacaaactagctaactttgctatcgagttatgctgttgcaaatcgtaccccgaagcataataaccgagcgtgacaagctcatcacgaaacagcggactcatgcaagctctcgtcgataagacactcatcaaacccgtcttatgcgtatgcctatgcggctaaggcggtggaggaggcggtgacgaaaggagaaaagggggtagcgcggatacccgaggtcccgagtgagaaagagaaaagcagtagcacga

SEQ ID NO: 12342 - DNA, 873 bp, Emericella nidulans
tcgacttattggagaccactcctcccatgtggctgggatgctagcggcggcttttagtggacatttattgccatggcctaggcactcagatgtgtttacatcttatgggctcatgctaagagcgaacctatgggatcaatagggccaaacgagggcaactgtctagatagacccccccggcgcaaaggataaactgaaaaagtaaacagcatcctacaacctgactatcaatgtaacacaaacaaccacaatgatattaggtgcttcctgtgtctctctcctccgtcctggtcaactgaaccactacgaaggcgctagtatgcattcacaggcatgtgagcacatgcagaatgtgcacgaacatactaattccagtgtagcccgtcagcttcagactcagcctgtactacgcggattctacaatctcgatggggtactgaatctcttgcacagacgggctgatctcgctatcagggccagagcataatcgccgcattatgggggaaaggccgagtcaaaggtgcttatgctacgagagcgctggcggcacagacataccccggaccctgacaatggcttatgtctaagatccaatccctgcgcgaaaacattcatatgccacatcgagacatccgcggccactgtccacgtgatcgagatgccgtggctctcccacagatttcgctagaaagcacagcacctcagagagagccttaagtccttaagagcgcccgtttctcatgatgtgtgacttagtttcgtctccacaacggcagccgcccctagaatagccagctaacctggcgggaataaccatccggatcgggaacttccttgccgtctcttaaggggaaatctttgttcccccttacg

SEQ ID NO: 12343 - DNA, 730 bp, Emericella nidulans
tcatacgcgaggaggaggctggagtgagagcgaggagagagattgtgaggcttagccggaaagagagagactatacgttctagacactttgcctgtacagcttgcgaggcatattgaaagacgaacggtgaccgaaacaaatgctgtcgaatacctctactatatggcaatggatgtacttactgatcatgaacgccttggcctacggcactccgtcgctccttgcacagaccaacaattggggtgcctttatcttctttgccccatggtgcttcgttgctctcgcttatgcctacctcatggtccccgagacatatggactcagtgttgaagcaatggataaagtcttttaagggccctggctcaactcggcgcgtcatgttcacaggagtccttccccccaggggggagtccaccgggattgagaggtaagtaaagttgcaaggaaaactattacccccttttggccatacaagtcgcaagttgtcgtgcctaaggccgacaaacaaaagtatttgtcgctttaaagctccccgttgattattggcccctcagggcacccggcctttcaggccatttcagtccacattccaattctgccccccttaatcaccctccctttttagagctcataatgtccgcaattataggtcccatttttttaaccaaaatttagccctggaggtattcaactctttttttacctcataaatccaaccttgcgaatttg

SEQ ID NO: 12344 - DNA, 4105 bp, Emericella nidulans
cagcaactctcattagctatagaggctcttaattcattatgttcatgactctcgcgaccaggatggtggggctttactcatatgctgtgctggatttgcggttgaagccgaacttccaagacagctacagtggtcaggacgtccaaggcttgttattcgaatggctagcaatcgggcaatcttcatgacctggatttcacgagatgtaggaaatttcattttatctctagttagccacttatccgcttgagcagtatgttctactgctcaacgcaatagccagacttaccacctgtagagcttcgcgctgaataagataagacaccagctgagcagggtgagcgggggtggttaaaaataaacataatcaacttttggatgcaatcaagcatcttgtataagtttgcttaaccacactctatggagagatacttgagtgcattttgccatagcccgtgctggcaaactattcggcttccaacgcttgtttacccatatccgtaggctctgctaatggtattaatgtctcttgttataacatggatttccggttcactttaggtatacgagccgcaacaactactacctgcatcctcgctagagtgctatgcatgagaaatgctgatcatgacgggtgtgcatgagtgtctgtcgcaacttccggcaggaatagccttgagaaccgacctcgagctagactctaacaagagatggggatatattactagtaaaaagaccagagaatttgagcccaacggcgggcatgtctcgatgccgaatcatcttgtagtatagtatcatatatagcactacggcttgccatcacaatgtatcgcgctaagcaagtaagatatcatgttggactgacagtaccgcgagtttgagtactttcagatttttcgactgacgcacctgaaagagacattgccaataataagatttctagtgtaagtaagccattcgagggtaaagcagttatggtatttaagaaagacaggcaccatagccgtaaataaaacttcacggagatcaaactttctcaataaagattatagctagagtattttgagacatacaatcctgagattatctcatgttgtccaagtctgccttctgaaggcatccacaatgcatcccaaaatcccccctttcatcccctccgtcggtcccttgaagcaaacatgctgccactaaacaacctcacgatccattgccctgtcctcctcatcctcatcatgaaacccactaagcttttcaatgatcaccgccgcatagaggtcaccactgacatttgtcattgtccggaaccgatctataaaccaatcaatagcaataatgaccgcatacatgcccgtaatctccacatctacactccccgcaatcataacagtaagaaccaagctagagctcggaataggcgttgtcccaatactagaaagagtcgacaatagacagatgataacataatccgtggggctgaggctgtgaccctgtgtctcggcgagaaacacgacgcacagagggaagtagattgccgtgccgtccatgtttacgagacagcccagcggaacggtgaatctggacacagtgttggaaacgccgttttggcgcacgactcttaggctcagcggcagcgttgcagcggacgaggcggtcccccaggctgttgtccaggaaggggagcatctcagccagaaagtataaggcattctgcgcgtgataatgaagtataacgctgggaggacgatgaaaagatgtatcgcgaggttgcagagcgcccctcctattaagacaccgagattctggccaatatcacgaatatcaaggcggaacatattcggcaggatcagaaagaagacgccgatcggggcgagttttattagtatcatgataaccttcataatgattgtttcgatctcctcaacggctttgagaatgtatgagcgctccctgtcgatcatataccccactacgacggctgtgacgagtacagccagcaagctatctgtggccaaggcgtcgacgatatttaacggaactagtgactcgaacatctgcacgaccacgtcagggatgttggtttcctcgcgctcagcgaatgtctcctcatcttcttcggccacattgagcgattcggaactcgcttgcgtcataagccgtcgccagacgagagaagtcaagattatgctatgcacgattgccaaaagtgtggtgagcacgtagtagctgatcgtccagcgggccagaatgtggcctccgttcgaaagttcgcggaggcgttgtacagcgaggatcatggatgtcacgatcatcgggaggactatttgcgaagttagaacagcatggggaaagttcagaacgcatcatggacgtcgtaccagcagccctcaaagcgcgtagccataaggcgccgaagatctcgatgagggttggggccgcgtaggggatatcgtcaacggtactgctaacagctagaccaatcgcgatggcgaccacagctgcgctaactatttgcagggcagagcccggctcgcgaatggagtaccaccatggtttttttggatgctcttcgccctgcgcgctgtgactctgcggccggatggcgtactcttgggggtcatccagtgtgcccgagtgcgctgtgattccggatttattctccatacggctgacaatagtgtgagattgccgaggatgcttgggcggtgcaggggagcgaacctctgaacgatggcctggaagacactcgctttcatataaagtgacaaacacccgttaccttatcgccgccccaatccgcgaataaacggcgaccccaccaccgcggcttatcctgttaagctagtcaaaagcagtataccacagctgctgatatccatgcccttccagcatcatgattcgcggagatacgtcctcagacgacgctttcgacagtcaagattgtattggtcctgatttcatagtgaggttacatccgcctagcttgcgatatctaggcaacatacttggccttaatcccggcaggtctacttcttcagatacaagagaagtggcttatcatctcatctcaactgtccaacggggagcgccaagacacgtagaccaagggcttggagagcggcggaggagattgcccagccgccaaggccggactgagcgcgagaggggataatgtcagcccggtgccgcgtgatgcatagacagtatcactgggagttcagggtcttattagctcgttttatttgtttggtcgattcggccaggacattggtgcagccagccctggatagcttcctagcacatttccccagctcacgtaaactatgggcccaaagaaggtataattacagtaattaaaagcctactaatggaggtgaaaagcaaaaactaacacataattggatagcgcgcgcttcaccatcttcttgtcagatacttcgtgccttacaaaagtctttagcgctttctgggacttagctggcaaacgacctccttgagcatatgactttcaaacatagtcagctattgccaccagtcatgctttacaaatgcctctatcagtgcatgtattgcctgccaaagttcctatattgtcgcagacacgattgttcactcgacatcaggacaacgctcagtccgcccaaagttaaggcgcgtgagaaaaaatggcacaccgtccaaactgtcaagcagtgccttgtgaacgcatcaacctctgcgtgtcgtcactatggttatgacaactatgggtgttatatatcgtggacgggtcgcaataactgactgatgaggaacagagtattcccagatcccagctgcctgatctcagcatgccctgactagttacctcgagcttatatttactacagcaaaagcaaactataggaatgccgctagagaacgtgtttatgtatatttgtagagtcaatcatacacctcgtccgtgtagtgcgagtgggtccgggcgcgatctgacagccggcagatcagccaatcagaatgacgccagatctcacccgtgcaaatttgatttgccctcctcgccgagcctaggtcccgtgactcacccaatatcaagccaccacgacagagtcacgggccttgt

SEQ ID NO: 12345 - DNA, 2017 bp, Emericella nidulans
ctccgccgatgactgaagggcacggcccccgacgggaggtatccggaggcgaactcggtgacagtatggatggtttaggcttgggctgcccggggggtatgcatttagcgatcggccggcccctaggcaatccttgcttgacgcagtacagcgctccctactggacaccttaacctccccaagcaaaacgctcagcaagtactgcagcttctgtgctacttcctgtagtccaacttcccaccactcttcaacacctgcacagagcccttcggtcgtctctcccgggtgaagacacctttctgttctcacgtggaacataggtggatgtgcattgaaaatcggcgaaattttaaccatgctcgccaacaacaccctcaaccctatcaaacaatgtgaaacatctcaacggttgcgtggcccatgttcgtgaaacagagcggacgtgctggatcgagttgtcaggctagagtacaagtgattctatgtaccagcttcactagaagcgggctcatcggcaagcgcctacagaacaacagaggtttggctctcatctcgtgcaattagctccttaagggcctccccaagcgcccgtcgcattgcctcgttgcatgtcttgggcgaaaaccttggcggagatttaaagccaaagaccctggcaatatgtccaaactaagacccactgccgctgcttcgtttatcgcgatggtaccatgccggtctgcatattccggaaccccttttgcatacggatagtgcgaggtgtggaaggaattggcgcctgcccaggccataagctaagttcgtggatgaatgccggatcaaaaaccctgccgtgaattgggcatcgtttgtgtttttccaaactcgtgaatcagaacagttttgtgttaatcaagaacatgtttcctttgaacttagttgagcgcacgccgagtggcatctcgtagatattcagaactgactcgccatcttcagagatgatttctgcgcgcagttgatagagatagggcatccctggctgccgtagacgcactgactctattaccatttcctgtcttcctccaatctgttcgcacactgttgtactatcctcgtccagaaccaccacgcggtgcttggagttgttgataagcttcaatataccattagagcttcaacattagtcacgatattgacaccagcaatgaagacatcataaacagagcaaagcgtcgagcgagacaaatcagcgtagttacgtagttaagaatcatgctagtagtgttgctttcgcttgccatttccaaagacctcaatccgccccggaggtattgtatcccaattaagctcgttgctaacagcgattgttataacatgaattggtttccggcggtggtaagatgggagatatctgcttcgaatgacgtatatcctccaatatgctcaaccacaaactcatcgtccacgtagacgggctcggtggttggcggcatcaaagagcaggaaagtttgtcgttggccaggggcacagtgacctttctctgatagaagaaccagcttgagcggtctcaaatgttttcgtcagcgaagctatcattgtagccggctggaagtggacttgcagctttggcgatataacttttaccacgccatactccatcagcacaaggcacaataccggtatatacaagccggtctggatacatctatatcttatcttctctcccttggcagatcaccagtcccactgaattcatgcgaaaccacacctaagatggaagtataacgagacggaagctgtactatcaaacgccctacagcttgctaactacaaaccatcttgtatccgcagcatccgcgtccggtaaacgaaccgttccgaatcgccaaagcagcataactggcgcggaaaatctggtagatacgcaggtatacagagaaagccggcctactcgcagccacaatagctaaacacttgccctttcagagacggcagccgtatacctttgttgttactgctgtcaatttatcctctgct

SEQ ID NO: 12346 - DNA, 728 bp, Emericella nidulans
  unsure (1)..(728): unsure at all n locations
acagcactcctatacaaacctacagacaccaccaaagctctgtttatctcacccatcctaagcctctaagcggtttttaataataccggcgtctccataaaaaccaacaacctncctatacctaggagtacttgccaagtccctagatcaaccacaactaaggctcgttatgttttataactccacaaacagacaaatttttgccccaaccctattaaacttctattgttctaaaaacaacatctaaaacatctctttgccgcatctcattactcatatattttgacactctcaaacttaatttgattttaaacacccatttattttataaatgagcactatcttttcaacacccctttttccccctacttttacatcacttaactccaaaaaccccttgtctcccctctactacataatttccattttaaccctctcattaaaatctatattcaaacctcctacttttactccttaaaaaaaaaacaacatattttatttatatttttactttttacctatgccgcccaaatggcgaccaataacatctctaactttccctccgttcctttttttattatacttccctaaaattactcccctctttccttattaacccctcaattaactttaacttttctattccccttaaacactattattcccttataaaaaaacaatttatttcttcaatccaaacaataaaaacttttcttttaaccttaccc

SEQ ID NO: 12347 - DNA, 578 bp, Emericella nidulans
gcatcagttggtgatctctgcgcaaatcttatgtatatatttgatcaaacacttgtatttacccagtccttccaggtacagcagtaaaaatcggcggtatactctgcgcacgggccctttcaggtcggtgcggagcaccaccctgctcagtaaagcaggatgcaaactgtgccagtctgggcagattaaggttctgctctgtcagaggccaggcccttgccaccaggtaccctgtgctctgtaggaggtgtcggtgcgagccaactccgtcaagcgtttatagtcttgcttatgataatctgtcggtgctcacaccgtgctggtactgaagaagtcgtctgacgtgagtcggatcgaattatgcgaaattacccctaaattctagccctgatggattctatagtctatctctatacaggaccctacgttccgacagctacccctttacgattaatgagagtctcttagtctgtaaaaatttgatcacatatcgacttcctttcgtatgatggaaaagaccgctgcttaattgtctccttatacaaattatagtagtaggcttcgattggctctatgca

SEQ ID NO: 12348 - DNA, 386 bp, Emericella nidulans
tatacaccggaaccctacaaacgacgcaggtcttttttactcctgtcttacacttcaatgcgcctggcgaaacgagaccagcagcccgccctcgagcgacccagcgattcgagcagctcagcacacaccggcatgatcgactagatcgccgtcgaacacggcggtgaagatggatgaaggctggcgtaaatagtaggcgaatcgggcaaagacttggtgaaggcccccgaggagggcctcgggatgctactttggactgaagcagtcagttccgactagcgtgactatcagatggccctatgtcacgtgcgtgagctccgcataagtatacgataatagttcggtaggtttgggatacggtgcctcgaaatgtaaaggcgcaaaat

SEQ ID NO: 12349 - DNA, 610 bp, Emericella nidulans
gaccgtatagagcctgaccacctggaccctaatgataccaggccatggagaagcacgctaggacactcagtggtgagggacacatagatctaaccagcaaccagaccagaagcacaagaggacctccgtggaccacgaccttgccagctgatgcactggtcgaaccccgggattttacagctccttgccaaacgacattagttcttgctctgtggcatccgctgttaagaaaccactcgctggtccataacactgacgtccactgatactattttcaaattacacctaagcttggagggccatattactcatatagggactctcgaataagactctgacagaatacacgccagccgacagtcaattcaactgtacccaacgccgagacagacacagattctatactactaaccacaagaacctggatacccgctgttgcatagactgcaccccacgcctaataacccgctatgctatattgcagtctttgttcagtatgaaaaagcgctgatcggcatattgacactgccatgtctctcgtttgtgacacatgagacttgtcaatcgtgaaaggactgcgatgtctcgcgagatgagttctgactcccac

SEQ ID NO: 12350 - DNA, 673 bp, Emericella nidulans
cgagggcccttctcccatggcggtgacgtctatttctttgtctaagtacagagcatctaccgagggagcgttaattagagaagaggcgtggggcaaactccaaacactaagcagagcgaactctcccctcgctttggctccagcgtcagaggcacccacgctaagtaaaagaagactatttccttacgagaagcgacatggccactcaaacactctatagacaaacccacgggtgtgaattcggaacggacgactacaccgaatcctccgaaccagcttggaggcagggattacgaaccaatacctatgaagacgaagccaaccaacaatccatcatgcattcctagattgatataatagtggaaaaacaaagggagcatgaccgaccatcgtacatacgcccacgtcaggacaacccaactggatctgccacaaccattacgcctccccgatacctgaacaaaaaaacaaacctgcactttgcgacaaaccccgccacctaacaacgtaacaactgaataccaactagtactgtccgcttaacgtgaaaacgcactaacatcaggccgatgctggaatccacccccccactgaaattacatgcatgtgacccacaaacgccgacaattacaaaccctctggagacccttgcctccttatgttaagccccaac

SEQ ID NO: 12351 - DNA, 1834 bp, Emericella nidulans
gactcagacgaatgacacggctcgactgctttccggggagctggaggcagtggtctgttcaggttcaggtaccgtaggcggttcagcaatcggcgtaggaggcgcagggggttccgggtcggatgtggcaggcagaacctgactttgtgtcggcgtgctgtcctggggggttgcgatatccactgggccctcttcgtctgaagagctctcgtctaggccttcaagttccaattgtaactgtcgctcccgctccttggcggcctcaagttcggctcgttgacgtgcgagcctggcttcctgttcctgtgctgccttcttggcctcttccctccgacgtttctcttcctgtttcttgatctttccttgcctgacctgctcttcaagagcacggagacgtgcttcctgttcttgctgctctcttgcgaattcgtcttcacgttgcttggcctccgtcctacatagcgaactgtttagaaagaccaaataaggttcgttgggcaaacggtagtacttactctagacgtttagtctcctcctcctgtgcttgctgctcctccttcaaagcttgctcaagtgccagctgctctgttttagctgaaccttcagcagccttcttagcatctgcttgtccagtactatcagttcgacctttgcgcgatcctcgcggtggtgctggtggaggctttttcccggcaggtttcgctgcctgagtagaaggagtacgctgctcttcagcgatgcgacgttgcctctcttgctctcgcttagcatcttcctcttctgcccgcttcactcgctcctccctttctctcctctcgcgttcctggcgctgagcaagtgtttcaatagcgtccgtttgaggtttcaaaccggcagctgccatccgttcagcgattctcctttgggcgcgttctcgtgcagcggcaacgcggtcttcatgcgttacaggtgaagcccctgtcaatccgacagatgccggtggagatggccgcgcagcagttgaggtatgtgctgacgattcgcgagaccgcggttccagagatgatcctctcgagtccctggataaatagtcagcttcaatctgggggaaatgctttaaaacagtcggctgtgtaaatgacagaagtatagacgggtgttcaagctccgatgctaatggtaaacttactcttccttccggatatgcgctgtgcggctgccacgattcaagtcatagatgaagtcacgaataacgtcttcaacgccaagtgcatcttcccaccgacgcctttcatgttcgcgagtagagctctcttcaccttccttgaggctatcttccaagctcctagcaaactctttgacacttttctctacatgggggcgcacttaatgatggtgttccctttctgccttcactctagcattttcttacctttaggcgacgaagtgcaacctctttgtccccctgtgacgcatgagccctttttccacaaggctctggtagcccgagcttgaattttagcacccgcacgtgctttgttacagcccgcttccttacctgcccatcagtccggggccacaatattaactcctttgggttgcccctgcgctcatgtgccggcaatccatataaatcattggccacagtccctcttaacttttaggtttctgaccccttctttttggctcattttttcacgtcttccccacttttttaagcctcaaaccttagtatgctcttaccctcttatcgatcttacggtagtatatccctagcccaaccattcccttgccatatgtttaatttcaattccttcttttttattctcttctctttgttttcttatcctttttt

SEQ ID NO: 12352 - DNA, 966 bp, Emericella nidulans
catctccacgcctccgcctccgcctccccctccgccggctgcggctccccccccgttgcccagcgctgagtcgccagccggtattccaccacctcctcctccgcctatggcgcctcccgctcctcccccaccccccggtccacccgcagcagcccctgctggcgccccggataggagtgctttgttggcctctattcaggcaggcaaaggactcaggaaggttcagaccaatgaccgaagcacgagcacctcggctgggcgtgttctatgatgccatttcttggatattgcattctctacgttctgagcttcctttttttttttttctacggcacttttcccctctactggaaaatcaattgcagcatgtagagttaagctttctagttgctcttttcttcgtgtccgagaaacttagttcgcgttgctataagtattcttgcttcgtgaatatatttatccaatactttatttagtcctgttaagctgaactaatatccataagagtggagaaaaaataaataggatgcagaaccgggttctgcagcattaatgccttcaatgtgaggtcgtgacgaagtcataaacctcaccataaacctcactattacccaactagcattgccgcagggattggacacccgacccaaaaattgaatacatggataactagcagatcgtctcaaaaggctaagcaagggaatcttgagtgcgtagaccgccgattagtgacacccccttgggaacctgaggttctcgcacgctgaagcaagcgaatgcaacgaccttttgaattgctgggcagcattggagaatacgacccacaagatagtcatccatcacgccgtgaaatgagacatccaactctttcaagttaggatagtttttgccctccgcaaacgcttcttcgaaggccgcataagaaatatggcgacatgacgcaatgttcagtatccggatggcaga

SEQ ID NO: 12353 - DNA, 3557 bp, Emericella nidulans
gccggtacggatgtaaatcaatcgtgcatgaaatatcatcagcacgccactaagggagacgatagccacctagcggtggtcataatctcaaagacctcatatctgcaagcgcatcaagtcaggtaacaggtcaaagcttgtgcttagccaaatgctggacggtaatatccagagcgtttttgcgaaatctgcggcaggatttacacaaacccgtggggacagatcagggcaaagtccagggctgagcttgcaccacttttgttctttcaacgttaatattgtagactagaggacatgggaggacaggataatgaggccgtagttgtgtggcataataaaagatcacaatgggtgttgcatatacagctactccatatgaagtacttggtaacattgcccaggccagattttagtagtgctgctcggcatatgtcagtccggacttcaagcgtgaatctaatcataacgtcaagagcttgctgtgggctcaaattctgcaggccagacggtatggatcgagacattctgtttgaaagtaatggtaccgcatcttcagctgaattccgcggcctcgtagacgaatctgttgccatactccaagtcgtccgcactacaaagagtgcgccagaccttgtcgactcctctcagatgatgcatcgttttcagttcattctatacgtcgcgtagagttgttgcgcaaacgctcaccgtatcgatagaacaaaagaggccccggaacgaatgcaagtgcaaggagccctagtaacgtattcccccacccgtaatcagttctacggtacatggcaggccccgccagtggcaagaaggtacttgagatgtagcgcaacaggttgttggcgcctagagcagaggctgccgcctgggacccaaatacgtcgaccaggtagagttgtgccggcatctaaatgaccaattgttagcatcagttccttagatattgtgagagacctacaatcacaaaaaaggctccgaaccccatgaagacagtgccgattataggcacgatccaatgaaccttgtagtatgctgtccagccgtagatgatcaggcccaccccgacgaacgggctgaaccagatcatcaggagcagccggtactctggtcgaacttgttgcactccgtctgctttcatctgtgccgcctgtacccgctcattgagaacgtaaaatagaagcatgctagcgactaatgctacacccagacccaggtataccagcccggatacagacgtgctgaacccgtattgaccctcgaagacgctaggaaaggtagtaaagagaaggtacatcacaccaaacaccaaggccacgtagagggatatgacgagtagaataggcgatccaaaaagcagcatgagtggtcggatcagaatttggagaaggacctgtccgggtgagagcggagtaccactggcaagcctggaacgcagtttcaagtcgccagtagtagcacgtagattggctgctttgcgctccagaatgactttagggtgcgtctcccgcatgacaaccagcgccgtcgctccggccacccctcccagaatagatagcaaccagaacgtccaacgccaacccattcctgcggtaacgaagcctccgatgactggaccgagaacctaaacggattcattagccaagccgatgcttgcacagaataaagcctagagagcgggagcgggagcgacagcgagcgacttaccggtcccgtcagaggtcccatactgaacaacgccattgccgccgctcgtttctggatagttgtgatatcggcaatcgttccaccgccaagcgccatcggggtaccaccagcgcagccggagaagaaccggaagacgagaaactgggcgaggctctggcttaacgcactgccaacgataaaggccacgaacatcatgttggcggcgtggtaaacaggcgcacggcggtagagctcgctgagtggcgacataaacatagggccaatcgcgattcccagtacgtacagtgtgaccgcaagtgtactggcaacactggaacttatctgcaagtcagcctcaattgccgtgacgcccggagcgcacatcgtaggggccatgttcctacagaaatgttagccaatgggcaccttaattgcgcatagagagacgccgtacgtgatgagagccagaatagagattgtaacaacatgcgcccatctcttgggctctgaccagttgcgaggattggtcggatcgtcctctccgtcccagtcgacaacatcggtctctgggtaagtacgattttccaggttacccttttccagttgttttggagtcatcctagtgcttttggctgatgcgtagacgtcgatgcaatacgagaatgaataggatcaaagccaatcgaactctcaccctttgcaagctgagagacgccatcgaggcattaaatagatggaagagaccggagataggacgatagcatactagaattgactgcataatttggtcgtagggggtcggggacgtggcggaggaaacatctcttcgccatatagtggacgcatagcagatcggaggatcggagggtcggatcggacgatcgcagataatgatttacctggaggacctagcattggcgagctgtcgccttataatccagccccgtctatccgactagctcacgactgtaaggtcgacctgtatcttgaaggaacaggaagagagaaagactaatctctctgggaggggacaaggctgtcacgtgcgtatacctacgaatgcccgaaaggagaacagcagtgtgtttatgcctcaggcacataacactaccaacaccattctcccctctcctcaatcaactattcctctccaaatcatcacaatacttattcgcccatgaagtcctcccagtttgtagctcatcctgacggtggaaaatcatcccagtcgcagtacaaccccagtcggcgcagagagaagccgcagctgtcgtgcaaccagtgcaggcgtcggaagtaagcaatctgcagcatcattcacactacttgtggcactgactgtctagatcacgatgcgaccgcaagaggccatgctctttttgtgcctcacgcggtcagacatgtacatatccggagaatggctcaactgctggcgattcatcgaagacaggcccgacggcacagtcgaatatgcatgatcgtctagttcaactggaacgccttgttatgtctgccatgtcaaactctgctgccgttgctagcgtgcatgccaatactgacgcaggagtgcggcaactggtgccgacctctacagatacactgctggaagacactccgatggatgagcgttcagagtgtggaagcatgcgaatcagcgcttcagagctgcgctacattggaggggatcactgggttgccgtcttggaaggaatagccgatctaaaagaccatgtggacagggaggaacaacggcggctggtagagaaccaggtgaggctgcggatgaaccgagaacattggcggtagtagagactcaaatgcaccgggtcagaaccgatatggtgcaatattgttatatg

SEQ ID NO: 12354 - DNA, 545 bp, Emericella nidulans
tacgcggcctttgttgcagcggaagggtggcgtcccgaatgcacgcgtccacacacttacatatcaaatttttcttttcaaaagtttgcaaagatggggacagatttaatacttgaagggacaacacgaatccaatggattatagccgtataaatccagatccatgcccaacatgcgagcgatactcacctaaaaaacctgacggaatgttctccgtacccaaaggctttaacaggcaatgccagctcttagccccagatttggctcaagcatgtataagaaggtcgatgtacgtattcaggcttcgaccagaagcttgcatcaggcatccatcggaagctgagtcaacactatctttctgctgaaggaataacactacgtgtattgtaggtaggctgttaggcccgacatgcgtgctccaaaatcattatcctgtatcgtagtgctaaacattctgctttataaacatgaactaatgatattactttggggctattagcagaaacgtttggcaaaatttccgtactttatagctacgcatagct

SEQ ID NO: 12355 - DNA, 500 bp, Emericella nidulans
cggtctagtatataattataaacgtttctttattatgcatgtcataatttacttttaataatatttataattttaaaaaaacaaatatggcaggatactagagatatctatatttctatttaaaaaaattctagaattcttaattaacacttaattttatagagattttgatctaaaagatctattctaagaccttgttaactaataagattttaatttatttaggtaataatattaagtctataataatacataaaagtataatctacccttagacttcttagccactaagataagaaatataaaatatagctataaatagttagaggatctttcttctcaattatttagaatatattatcttactactttaagcttctctgctgataaccaatatcttatataatagagtattataattaagattatttaagttttaaattataatttctttatcctaaaggcagcttatctaattttagacttcgttaaaccggtgg

SEQ ID NO: 12356 - DNA, 2054 bp, Emericella nidulans
gagcgcggaagatgatgtactgagcattgccaagaacgtggccgagaactacgaggacgaggaactaagggataatttttttgaggttgcgcttgacctgtgtgttgccgacactattgctgttttctgaatgtcgctttttaccaaactgacagcttcattattccagtgtcttggggcagccgctgcaaatacctttcattgctactaccgtgcttgttgctaatacgataaaatcggacctcgccgccgacgtcctaaaacacgcagttgagcgcttccagcacagtgttgatgccggtgcttggcgcgaagtcaagcttcttgtacgctatctcggatgcttacaatgtatatagtagggggatggcgcctttgcgatcttggaggaacttttttcccgtgctgttgatcttcaaaccgcgtcttccgaagatgtaggctgttcttacttctttggtatggaagtgtgctgacatctgcattttgtctagctaattggattggagctcgtgaaaatcattctatacacgatcccgtacatcatggcctccccggtcagcgggtttgaaagtcaggcgctgggcctactagaaaagactgatatcatcgcatctacgccgcatacgcttgtagacttggcgaaccccttcggacctgatagtcagaaatcggcgactgttcccagcgttatcagcctactccaaagccagctacaagccgaagcgagtcgaaattgggaactggagtgcctgccccggccatgggcaaatgtaagagaaggcgatgaagaaccgaagcgtcttgaagaagggccgaagcatgtgttacctgatatcacgataccgagccccgtactaaatggatcgagggcaatcttcccagaggtttttctgtctgtctatggagatcaggatattgagacagttccatcaacgtcaaacattgcttcttctctgctgagagacgctcttgttgacaccattaacatcatggactttaaccgcattgcaacggcaaagttcctgattgatctcgactgttattttacacccagcatcttcgtgaagcgtgccactccattcgataagttgcgcgatctccctgatgaccggacaacgtggaaaccggaggacgtggctgtagatgctgttttctctcagctgtttcaattgccttcacccgagcacaaacttgtttattaccattctgtcctcacagagtgctgcaagattgcaccggcggccattgcgccgagcttgggtcgcgcgatccgatttctctatcgcagtctcgacgtaattgacctggaacttagtcaccggttcttggattggtttgcgcatcatttgagtaattttgggtttacttggaagtggagtgaatggttggtcttttatcataaccgacacgcgtgccacaacattgctaactaacctggaataggattgaggacctagagcttccccttgtacatccaaggatggcgttcatcaatggcgcgctagataaagagattcggctgagttttgcccagcgcattcggggaaccctcccagatccttatcaagacctcatctctgaaggaaaagagaaggacacccctgacttcaaatacgcatctgacagtgagttgaactggtgtatggaaaacgaattcttctttggaacgctaactttccctcttcagcgacgccctatgcaaatgaaggcagagaaatcatgcagctcattcgtagaaaggccgcagacgatgaaattcaacctcacatcactgcgatcgaagagcgagcagctggtctgggagttgagatccccctgttaccctccacggatgccttcgttacctccatctgcttcgtaggcgcaaaatccctctctcacgttctgtcctgcatcgagcggaacaaggaacgcctcttggcgattggacccaagtcacctggtgcgcgtcgccaattatcacatcagtcatgaatactgggttgacacacccgcattgtaatcacatcattgacagctgttgactcacaatcctacaccctttcgtaatg

SEQ ID NO: 12357 - DNA, 418 bp, Emericella nidulans
tatcgcctcaagagttacttatgtactactccgatttcactggtcttccgtataggacggatatatgcgtcaactgccttgaaatgcctcttaatgcggggttcctcttgctcataacctgatttgttcaaaactggctgtactagctcatcggggcaaacgtgcgataacccgagggttccggccgggatgaggcagattctaggtgaaaactgtggaagctgagcatgggtacgaagttgattgctaggttctgctagagaattcaacgtagacgtttgctatctcgcttccgggttatggagctgactagacccatagggccgttacagatccctccttgtcgcttgcgtgtttaaatatagctgatcatgcgttgttactagtacactattcgacgggaaattactctcattca

SEQ ID NO: 12358 - DNA, 735 bp, Emericella nidulans
caccacaatccgtacacccacccacaacctcccccaaacccccccccaccaaccccacaacaccctcaacccccccaaacaactacaccctaacaacccccgaacaaaccgacccccccccaacaaaacctaccaatacctctccccccaacaaaccccccaaacccccccccccctcaaaacaccccaacccccaccccagcccaacccaaccaccccccaccccgggcccccccccctcttcccttccccccacccccccaacacacgaagcacccacccccaaaccttcccccccccccccaacccccaacaaacccccacaccccccccccaccccaaaacccccaccaccccccccaacacccccccacacaagaacaccccccccccaacccccacacccaacaccccccccccattactaccaccaaccccccccccacaccaaaaacccaccccaatcccccaaccaaccacccacccccactacccccccttccacaacacccaccccaccccatcaaccaccccccccacccctctcccacccacatccccccaaccaccaatccccacctccacaacccttccacacaccccccaaaatcccccctccccccaccacccctagcccccccccttaccacccaccacaccccccccatacccccccccctcccaacccccaccccaccccccatacccacttttcccaacacaccaaccccctca

SEQ ID NO: 12359 - DNA, 543 bp, Emericella nidulans
  unsure (1)..(543): unsure at all n locations
ctacagtctgtatttcagtgaagccgggaccttnnatagtttattgcttaagtcaactgacttaatggaccacccagtgcccgaactggggggtctcaaagtcttcggggggaccctcaacgtaaacccatgcatgctaaaggagcagcgctaaggtggtggcctggactacctgtatctccaggattaccggcagaagcttgatgcgcgcaacgatatgacgggctattctgcgtgcaaatgccgctcgactgtccacgatctgcctgaggcgagagatcaggcttataagaacgtgagactccaggggggatttcacatctgggacgtgaactactctgactatgtgcttgtcaaacgattactagtcacatgcctcgcttgcagacaggcgaccggccaccggattgttgcggattacgataggagagataaactgactgctgcacagtaaccctatgcatattgcaccagagcctcacaagttgagacctcattctttgccacatatagctgcgcaacagctcctgactgacttgacct

SEQ ID NO: 12360 - DNA, 620 bp, Emericella nidulans
ttgcgccgatggagtagcgaccgctcgtacgaccagccgagggtcgttgtgagcaggcggagcatgaacttctcgatcccgccgttgagacggaactggttccagcggccctagaccgagtcagcgcgatcggatatgaactttggacgcaactcacaagttcgtgcagtttgggatcggaactccatctggcgaatccattagcgacttcctagccattgattctcgtgcatgacatgagggagtacccgttcatcggccatttgaaccgctgttccactacgtccacgaacccggctcgttttaatcgctctgccgactcctgccagattttaaacgttttgcccgaccgctcgcccgactcaacgacgacccggccccattcgtgatagaaatgatccggtcccattgacccatcgtcggcgatcggctgaacggagtgttctacaacctcgatgtatccgcccggtttcagacaatgccagcaatgcccgaagaactggtcccagtccgggatgcacccgaatagctcgcggatatggataaagtccaattgattgcggaatatgtccagggagggtgatatcatcgatttcgaaatgcatttggcggaacgaaga

SEQ ID NO: 12361 - DNA, 1730 bp, Emericella nidulans
tctacgcatcccagcatccaccgcctacttacatccaacaaatctaggggtactgcgtacaactctccaattcccagagtacttggatgttttcagctatactctgataacacggtgtggcatgtgaccttatattacagaatagctaaagataagtgctgaaaaaatgcgtcaagtacatcaagttgtaaggattaatgaataaatgactcgtcgcatcataatcaataatcattgtcggaaacagcattgtgctctttcaatcattctctaaatccttcgggctcgggtcccctattccatcctcgttgatggcgaagagacagtcactctccggaaggcatgggctgtcgtagatcttgcaaactctggtctcgcctctccccttcttcaagctcaatctcgttgtactggcatgcgcgatgatattaccaccaatcggcttcttggggtcaggattaaacatagcactcggccctccgtcaacctgggcaacaacttgattcgttataacgactgcaatgccgaactcatcggctagacgttgcaatgtacgcataaatttagccaagtgcgtttgtcgagttgatagttcaccgcggccgttgaagtcagttctgtatagggaggtagctgagtcgacgaccaagagagagaatcgggtctcacacatcatctgagaagcttgattgagcagttgcagttggtgatcggagttgtatgctcgagcataagccacattgtcaagaacctcctcgcctaccagaccgtaacgctgcgcaacagctagcagacgcaccgggcgaaacgttccttcagtatcaatataaagacactttccttcgccgccacccatatcgaatggtagctggcatgtgacggcaagggtatggcaaatctgactctttcccgtcctaaactcggcgaaaatctccgtaattgatcctgtctctattccacctcccagaagcgtatccagctgcttggagcccgttgtgattgagataagttcgcttcgtcgagcatgcatttccgtggccgttgtaaaccccatagggactaatttcgccgctatcgaccggtataggttagagaaaattacagaaaaagaaagtacttctttgatagagctcaccctcaaccaggattttagtggctttctgttcggagatacccttgatttgttcaagtaaccgtttcggtctgtatatatcagtcattatcctctcaaacacaagagcccttaatccgcgctaggaacgtacgtatacgcgatcgactcgacagtgtgataacccgcatcgacaaacagtttgatgtcacgactggtcaggcctgccataccctggatagttttagctgattgacgcttacaaaagtggcggcagtggtcttacctccagtgacgagagcggggttggtgctcctggtcctggcagtccgctgtcatcgaactcattttgagtttccatgtctgcagtcatttttgatcaggtactggaggaaaacgattgcggaaacttctgaggtttttgagcattcaaattgcgttgccacttcaacaaagacgcgtctttctccagcgcgttgctttttggacctagccagaggatatttctttcggaagtgccttcagttagtattttgatgagccttgcagttttgcagttgatattgagatgagagctggattctgctctattgagttttggttattccctctagcttta

SEQ ID NO: 12362 - DNA, 482 bp, Emericella nidulans
ccgggtcgacgagactcctagagtggctgcggcagaatctattgctcaccttatcaatgtattctctgtgcctagctgcgtgcgattttgtgtatttcgacgagacggctctactcgcattggcgtgtgtatacttggctagtgtattaggtatgtcctgcagtccctcagtagcctgtataccccccttgacgacatcttcacctaatgtattgtattcgattccctcaattcctcctcgctttccgtacgtatttggtcatgtctccaaacatcgggatatggaaggggtgccggatagcccttgctttgggataaagttcggtttttcttacgtgacacgaaatccgctgcttactctattgtctcaaagctggaccactccatgtatacgaaaactagaccatccggccgtggaacgtacttgaagaaacacaagacttcgtacttcctagtctatagcttaatactgttatccttat

SEQ ID NO: 12363 - DNA, 556 bp, Emericella nidulans
caagttggtggagtctctgcgcaaataaaaagggtcaagttctgctagcttttggtaggggaactataaccttggttacgacggtctgggaaattactatacaacccaaccgggggtgttagaggtggaagtttggggcttatatatggcgggacgcgaacggtgaggcggatgtatggggtttcatcgcggcgttcttataaaatgccataaggccaaaggccagaaagattctcagaataaaaattcacaaaaaggcgccgccgcgcgctgcccagatgataaactaaaccaacgtcacatgatcaaatgtaagctatcctaggccccctcagaagcaagctcatgcgttgtaatcctccgctgggatgatcacttcctcagctctataagcttttccccttctacttcaattgaaattgatatacctgagtataattatgattattattataccgaacaataccaacatgccgcaggcgattcacagaataaacatcatgaattgactatggagattatatatgacgcgcacacaacgcttgctgagaatttg

SEQ ID NO: 12364 - DNA, 496 bp, Emericella nidulans
cgcatcaagttggtgatctctggcaaatggcggggtcacaatgcgggctcatatttaggggaaaactagatgtaattccgagtcttacttgaggggtgtactactctcgtagcatgacttctcaacaagggatgtgttcctgcgcgtgaatacctgaattgcgtacctgtaacatcagatgggaatctgcacgctgggacgttaggatactttatccaccaagattcacgatctcacacaaatagttagagttgtgacttcagcctcggcgacgcgtagtctagctgtcccgcccggatgaaattaagggcagggtgatgaacttagtacacgtatgatatgttgaaaatgcgtgctcagatggaatgaaattattactacaatcggcggaattgcgcaggctgttcgttagattataagcgcgccgttctacgcgcgactatcggcactattttgacgggttcgtacggactgtaggcttgaattattattaatt

SEQ ID NO: 12365 - DNA, 4302 bp, Emericella nidulans
ggatacgcttcaagttttgtctactatcctcttctctgattttcccttcaccacctgctccccgctcggctcccatgccctatcccatcgtttccatcgctcgtttattgggaccggcattgcctggcgctcctgctgttctctcgctcctctggccgggaggatcatgttggagataatctcctgatcctagtcgtggacttccgtttcgcccatgtcaatgtacgcccgtttttagagtcggaagtctttgagtactgcacactttccgcgccgtttgacgcatcggtgagttcactgacttcatggaacacaaggttcgacatgaactgaacaaaagcgaaggtctttcagtgccggacactacatacctaagtcggctgtgatacaagagcctgacgaatcatccgtttcgcagcctttcgtatacgaatttccttattttgagcttgacaaaatccggcatttctattcgatatctgttcatatcttgtcgatcgactgttcaatactggtgctgggagggagaattgagaactcgaactacatctgaagaaataaacatctattacaaccgcgattcgagcagctacaaggcatataaccccctacgacggcccgagccatgaataaccacttcgtgcccttgctcgctctgctagcatggacaacactatggatatccgtggacagttccagttccctcacatattgctctagtgtcaataccgggacgggctccgctagtgagttttgatatttgcacagatttcttgcgtgtctaactctcacagacttttccatttatcagtcaaatggtaactgcgaggatcattgcagcgacagcgctttcgcgattctgttagacaagaactgctggtgctctgatgttgtccccaacgaggacgacaacgttgacacttcaaaatgtgacgataactgccctgggtatccggacgattcatgcggaaacgcgggcgacagtttgtacgcctacatccagctcgggagtccgtcatcaacagcgagcgcgtcgtcgacaaaatcgacaacctcgtcaacgtcaaccacaagctccaaggttagtatatggcatctatgctgtggtttgatttcatactgactacgtgaagacctctacaacatccgacaccacgactactacccattcaagtatcactgagacccaaactcacggtggtgtggtgactactataacggtagacagttccagcgcaacatctgcagcggattcgaacgccagtacagaggacagtgacagcgactccggcctcagcggcgggtctattgcgggaatcgtcgttggagttttgggtggtgttgccttaatagtggctgctgtcatcttcttcctcgcaaagcgtcgccagagcgacccgagcaactacactggtggcattgacggcagacaaagcaaaggctcccagatgagctacgccaaccttggagacaatcatagccacaccttgtccaacggatcttccataccagcgcgcctgcccacttttacagataaccgcctgaacacgggcgcaatgttgcgtcgggatagcgacatatcccttcaagataacgaagactattcacggccagttcttcgagtgagtcttctctttctgcgcttcaggatttggccatactgaccctggtttagctcaccaatcccgactagtcgcccaccacttccacgattttccttgaatcatgcatcgaatttcccttattttattcgattttttgcacggcgaaacagcggtgttatgatacccatttgaccatcaactgttattgatctaggagagggcagctcttagcatctcctcggcgtgtctcgatattggagtagtgtattatcagcattatggaagcatttgatatattggttatttgaagcgagccggtctcatctggggttagaaaactgcacatggctcactgagtccagtcacacccgcaacagccccttatattcggatgcaacggcaaacttgttgtcgcagtacccatcgtatgtcatcataattatacgccatatttgacgtgctctctgcacagctgcatcttcttccacgccgttcggaatatagtgctccatcgagctatttgtacccggcaaactaggtcatgggtgccagtgtcagccctaacctggcaacagactcatcagcttcttggccccatccataaccaaagatcaacttcaagtccgaaccgtccccttgtagaaagataggatagacaatgaacggcgcttatcgcaacgcgaacgataagcttcccatacccccagaatccctcacctaggcagttagtctctggcccgggatatttataccgttctgggaaatgtacattcagtccagcagcgtgagatttcccctctcttcctccaacttctctctgcgcggtcacggccatcgtcatacgcccctcgtctcttttccggtttcgtcgaggtgatccggggaaaatacgtagacgccgatagaggcagggatgtacctgatctgcggaattgagataaccactggagaaccggggtttgacgattaactgttgggtttatacgatagagtgatatctgggctgataagatatgtacgatacgctacttaggaaaggaaaagcgatggccttttggtttaagtcttaagaagtatttgtcttcctgatctatttcagtgctccattatttacctcacatcgtcctcgacttcgttctcgcatggtcctgtctgacctcccagttcaacatggatattcatacgggcttagtattcctcgctctcgtaggcttctgtttcctcttctcccactctgccccccagcttcttgcccgcctgcgcggctgcaaaacagcagctcgcacgagccaaacacctccgcgcgctctctcacccagcttcagcgccgatgataaatcaaaaacagcaacacagtcagcaaaccccgcgactactcttccaccgcagctccgccatgtcctgtcgaccctcagtcttcccggcgacgacgaatacaaatacaaggaaattcctgaaaaagaggtcctgcgttgccccttgcccatgacgcaggactaccgcaaatgccaagaggaacggtacacgccgactgggttttcggttgccgaagtcaaggcgctgggcgacttccccgattatgcggcgctgagtggggtgccgctgccgagggcttacggggaaaagtttgacgttgacaaggcgctggcgagaccgtaccggccgttccggtgggcgtatcatcagacgatgtgtatgttgggcttcatgttgtgtgctgtttggtttgcgacggccgacggctgacgctgtgtagcactaacgaagatggagactgattggtggcttgagctggaaaacacgtacaaagagcggattgcacagcgcaaggcgctgtttgcgaaacatggaggtggtgttttggctgccctgcctggttcggaactcgcctgcaaggagcttatggagatggcactgcagttttactgcgcccggtatccgcagtatttctcgttgattgacaggcggattttcaaaaacaggatcctcggtacggagcaggatgttagattgaagccgcccctggaaattcttatgaataatgttccagaggactttgggatcatgatgcgcgatgataacacaggcaattactttttgcgcgcggccgtaatttgttcttcgatggggtggaatgtcgcgagtaagcttgggctcaggcttgatcacattcacgccaccatacctgactataaagaaaagatggagttttctatgaaccggtaggtggatgcatagatattcgcgtgtaagcgtgtaagccgctgagtctgacgacctccgcacagattttttaccaaaatgccggccgacaagcccatacaacgaggatcatggggactagaagttggacagcctttgcacacgccacctggagacccccatgagaaaatttcgcgagtcccaggaccccaagttacgccctggagaaattgctacctttgaaccgactggcagaactttcggcgcctgcccttttccgaagctattggcttcaacttcaaagcacctttcaacgccataacaaagtttcgcgaccaggtttgcgttccggcgcttcggggaaaaattcttggggaaggaaagaaaacataatgggggacaagggtccttgtccgtgagcattttgaacttccatatttgcatttggcctcaaagaaaaagaaaaggcctgcttcaaaaactggggggggtactt

SEQ ID NO: 12366 - DNA, 557 bp, Emericella nidulans
tctctgcgcaaatacgccgaccgatcgtgtgtatcccgatgacctcggagaggttatactattcatccccggttataggtttctacacgtttgctactatgtcccagtccttattgcttcttatgtagaatggactttgctgcattaacttatccccttaattttaattcatctgataatactgccagcttcgctccgttacctggcttagtccaggcctagattagatgactgaaattaggttataaagtgctataaacgattcctataatgtaactggtgctgggccgctttaacttccccttttaaattacgtaacgctgctccttatgagcctcctagtaataagggataaagtctttattctacgcttaagctgcgcgggcgaccttcatcaaggcttattcatatgaatctcgggccgctagttattctactattcttgtttccggacttataaatttatacttagcctagttcgccattatgtttttgcggtaggctttaataacatcgccgatgtattaatacggttttactcgtcagccttgaatgta

SEQ ID NO: 12367 - DNA, 2003 bp, Emericella nidulans
aaggctgctgaggtctcggctagatcccggaatttgacccgcttcgatttgtggaaggagacagttgacttttcgcatctacgcagcttacagctttggagagtgcacttagatacgcttgagatggcaacagcctgcgacttccgatcgttaagcaccctagtcctcggactgttcccacgtcgtcgaaacccctctcaagcccacctctcggatcaagccgcgggcgctttcattgcaagccttcgcccgctggagtctattcatctgactggtcccttcttccaagaatcattcagtgccgtactaagtaaccacggcagttcactaaggaagctctctctgtacccaaccgaaacttcacgtatcccaccaatagatcagttcctcatcacgtccactgaaatcagacagatacggcagcagtgcccaaatgtctatgatctgagactccagattgagcggacattgggtgatcataaagaacaagatatttatagagctctgggggaactgccgggacttcgacatctgtctcttcaactggaggtgtggaatgcagtggacttaggagccatggacaaagcagcactcaggcagccatgttatgctgagcacatattcatcaatatagcattggatgcggagctagcccttgaaatcttcaacctaatcgccagcaactctcgcatagaaaccttggagttgatgtcagggactgagtacgtgtggaaagatttagtggatatctcagaaatcatgagacggcactggagatgctccaaggtacttactggccatgaagacgacaatgtaattgttgaggaactgggagaaaaaagccgaaagcgaagggtcgagctcaatgcccacgttggattagggaattatgaatcgacctttcaaagattgtggccttcgaagagtggagacctaaaaaaatggaagaatgaatggcatagctttcccttacgccgaactccgacaaggacattcaatgagctggagatgccctcaaagaaagggcaaagtaatgatgtcgtattaagaggctgaggttagtggccctctttcagcaagccatggccatgatgtgttattcattccgcaacttatctatccacgccgagtcaaatctatctacatcttatcatcaaaggcacccgcaccaacaacattcccgtttctatccccagtgtcatctgcatgacccgacccgtctatccctggttcccaccaagggtctatatcttacaagctcggtaacgcaacgtcaacatcatctacctcaccaggattggggttcgcgctcgtaccacccatttgaaacgctgatgccgcggccgttgtcgtgtctgtaatattatctgacagaagacttaaattggaatcgcggatccaggagtcgatgtcgttccgctaggcgaggctctgggtctggccgtgtaagttgaccggcttgaggtcccgagactggaggaatgcactcgctgatcttgtctctaacccccgtgtgagatgatgtgcatgtggtggcgaagaggacagcgaaaagagcgaggtgttatgcccctggtggtccggacccgatgccgctttttgggtgggttagtcgattttcttcgtgcgacaccccatcctatgattgagccctaccaccggcaatttcttcgtggagatttgataatcgttggtactccttgcctttagggcccgacctttaatctgccgccactttttcaaaagaccaaaggcccttggtttgggatttaaaccttgccccttatcatgccttaaaaaattaaaaccgtttttctgttctctaaatgtaaacccctcttttatggctaccacactcctaagtgtagccccttaaaatctactccttttttttttcaatgctttctctctaagaacccccccctcttataactctctctcctttattccccctcttaccccctataactcttccccccttccatttcccctattctctttcc

SEQ ID NO: 12368 - DNA, 904 bp, Emericella nidulans
  unsure (1)..(904): unsure at all n locations
aaacagcaaggggcggtgcggtttgttaacagccgttggtggcagaccaagggncgacncacacggggaggagtgttccagccgagcggagacagcacccacacagcgacnccacagganncgctgnngactccaacatccaatgccccaagagcgtatagaactgcacccaggggtcagctatatattgaaacatactccgcacgataccgcggtaatcaactccgtgtaggagctgaccgccttttcgaccgcctgccccaaatcattcttcagccggagaatcaaaaaaaggaaaagaaaaaaaaaaagctaactcgcaagcaaccgcgccaaccagcgcattctctatacaagtgccccgcgaaaacaatggctggtggtgcaatggaaaatagacttgacgcccgtttccgcagcccaggctggcttccaaaaagaccggaaggcgaaacaccagcccaaagaccaaaccttatttccatcgccaaggaagcgcaggcacgaaaaagggccaggaaaggccaaaaagccccggagggacggaccatcctgtccaaagagagcagcgcaagagggcaggagtggagaccagatcccgacggtggtccccggacccgtccaaggtttggcacttaactccgaacgtttacggcttttgccattaaatttcctacacgtcttgcctgtcggggaaactatccgtgttctaccaacccctttcgggaaattggtcccaggctattaaggaccccgcctgttgcctcaaatcaacgaacataactcacggnggaagggtgtgtttaaacctctgtcccgaggaaccagggggaaaaaaggttggcctccccttttgggggcccccctaggtcgggggggggatcacctaaaggtgcccttcaaa

SEQ ID NO: 12369 - DNA, 876 bp, Emericella nidulans
  unsure (1)..(876): unsure at all n locations
cgagaacgagaccgcggggggatttgttcttccgngaggaggcacgccctggcgagcgagaattggtcattcgtcgcacaacagagcgcgaggagcccgtcatggttcaacgttacgagcgtgatacagattatgaccgagattattacgaacgtgagttcacagtataggaccggtcacgccgtagccctaaccctattatcatttgtgaagatcagccggtaatcattcaagaaggttgaggtcctgttttacataatacgcgcgaatctgactatgacattgtttaccggtctcaggtgggtacgagaacccggcttactacttatatttgcctggtttgagattcctccaactataatttgccgtttttaagccgaactgagccctatgagatttttatttgagggccccaaacgggtcggatacattttcggatttaccacggcagggttcactttgtaaagcgccctggggtttttttacattattaaccgtctttgtcatagcctctggtggggtagaccttcctaatttccatatttctctataaaggatgaactcaattctattggttctgtcactatgccactttctattttgccttgtgtttctctttctaatctttctagcattttttactttttggacccctttatcttattatttatggttatacatctttatatttttttattttttttttcatattctatcctttttctttataattttcaatttctataacaattttatctatttttacaactcatatatcatattatactatatccattatttttttaatcttttctaatctattatattttttttctactcttttacccaatctctctatctttcttctccctttat

SEQ ID NO: 12370 - DNA, 649 bp, Emericella nidulans
  unsure (1)..(649): unsure at all n locations
cagtcaagttggtggagtctctgcgcaagatctgcttagccgcagctaagagcgtctaggatcctagatagaaaggtagtagctggtagcaagacgtagtagtaggattagggcgtggcagtcgagtcgtagaggttagtagatagtctagcctccgtagtcagccgtcgcagtagtagtcgtagtctcaggggtctagagtccgtagcagcagtagtagtagattctgtagtagttagtctgaagtaggtagangagattctgctagtgggtgcagcttagtaacctggctagaggttctgaatagtacctgctacccactgggggaaatattgagcgtctgaatcccaatttattgtaaagactgatatagcttcccgaatattaacttcactaatctgatggcttactgcttaaccgtgggcacaatcagcgttgaggcttccttaacttattattataatgtgtcggaccgtctcgcgggatgctgttagcaaccatctagattgctagcgtatcatcacgccgacacgtcgaacggctaacgctgaattgacgtgacggaggtatagggaaccacctgcctggccggggcgagccgacgtagagattgtgtcgggtcttcaccccacgtccagtctctaacaga

SEQ ID NO: 12371 - DNA, 971 bp, Emericella nidulans
gaaaccacttcgcgtttgaggcatggcgctggctggggatatccgcgagaaccgctcgacggcgtgaccgtttttgctgcgtcggagtaacatgaagcatacccacaagtggtagggagggaggaaagagaaagaagtatgaaccgggcaggacccgaggaagaagatatactgcttaagtcggggttgttttagtgacggaaagatgattggttctgactccgcaagttggaaagattttcgacctcggaagatctttggctaagtctgtccgacggcagttgagatggccgaggaaacactaactgaattgccagaatattgagattcggaacttccatattctttatattctactaatttctgagatgcatacttagtttactatagcctatgtgtactggaatgggaataactttctctgatccgggatcgccaaattactgtgctttgaacaggtaatacaactcctttttgcacttaggaaaagacccttttgggcattccaaaaaaccactcggtattgtacaaagcccgttgggaaaactcattactattcaaatttgggcttaacgcgggtgtttttgaaactccccggtgtttctttaagatgcgaacacaaatctttttttttaccaaaaccgggcgcgttcaaaaaatcttttagtgataaatttaaagggttagaatttgggatcttttaccggagcctcaaaaaaaaaagtttccgggttatttctaaaagataagatagccattttctctcccgcgggggaataaaaatccctctaaactaggggccgctttccgaaaaacaccttcgctaaattaagacacttctgatattcgctaaaaatattcgccttgagaatattttgtacgtaggaatgggtttaccacacactttttttgttttttatcccctccccctcaaaatatttttttattacatatcttttcttaatatatca

SEQ ID NO: 12372 - DNA, 885 bp, Emericella nidulans
ctactgtggtgtcggaccggcaaggtctactgccgtgacatcgttgaggcgactaccgcgcctgtctctacgccggtgttaagatctctggtatcaacgcggaggtcatgccctctcaatgggagtaccaggttggtccttgccatggcatcgaaatgggtgaccacctctggatctctcgtttccttctccaccgcgtcgccgaagagttcggtgtgaagatctccttcgatcctaagcccatcaagggtgactggaacggtgccggtctgcacactaacgtctcaacgacgtcaacacgtgccgagggtggcatcaaggccattgagtcgtacatgaagaaacttgaagcccgccatgtcgagcacattgccgtctacggtgagggtaacgaggagcgtctcactggtcgtcacgagactggtaacatcgacaagttctcatacggtgttgctgaccgtggtggctccatccgaattccccggcaagtcgccaaggatggtaagggttacttcgaagaccgccgccccgcttccaacgcggacccttaccagattactggtatcattgctgaaactgtaagtttttctaatcgatgattttttgaatcatgctaaccatttcagctctgcggtggtctgtaaatttgtctaaattttcgaaattagcgctcgtatacccgccgggtcagggtcgagaacaaaagagcagctaggccgtttcagttatagaattctcttgtccttctttctttccggtggagttggtttctgatgccacggcttgccttttgctttcttttaaccctgctggttatacatgcaaattctttcatttgttaatgggagttatgtgtcacgtatagcatacatccgacatggatcg

SEQ ID NO: 12373 - DNA, 740 bp, Emericella nidulans
gacagaggcttttcgtacttttaaccaactctcctccggggacaaccactttggtacactgaacactatccggacacacggaaaaatctacatggtctttttgcaataaaggcacatttttatggcctggtagaccaattaatggctctgcgaagttacctcttctttttttcgtgatgaaagccacgcataaaaatagcccatgaacggatggaagactgactggaaaaggaactgtgacatgtcctggcaccaagtcaaggccaccccgtgtggcagatacgaggagcgtaactcgatggaatggacagactagtgagacttcttggaaacgcaatgagagaaaagagcgggtccgcgggaacctgcgatgagtgcgcccgctgttcaacagcaacaatgagttgtatgatgatgccatatcggcgaaataattgggacctattcctgaagatcaaccgcggccaccgcttgcgtgctccttcagggaacgcccagattttaaactggtcccgagctcagtttactaatgccctctcttaaataactctccgaatccatcctgtgcttttcctcctttacttctctccgagttccaattctgacattgtaaccgagcccccctttattaaatattctaccgtgaatacatctattcaggtacaattctcttcttttcacctacttacccattctatccgtattatcttatttattatctttttctctctttctccctc

SEQ ID NO: 12374 - DNA, 286 bp, Emericella nidulans
gatgctgaccaactaacgttggaagtgtgttttatattgtccctgcacctttgtgatttcttcccccgcccgagatctatagtttgagatctacctgggcgaggtggcttgggctatatatcctgatgaatgttcggagtgcgttccctggggatgattgtaaaacggctccctacttcttccggtaaacgttgaaaacgggccacaaacgaaaataacatgggtatacatttcctatctcctccggatcccttaagaatatctgagcaccaaataagtcttagcg

SEQ ID NO: 12375 - DNA, 522 bp, Emericella nidulans
gagccacagggcgttactggtataatggtcgatacgtcacggctatattttatgttttccctggctctaccacaggaggcctatagttatagctgactgtacttccagaccactacccacaaacaggaacctatctgtatgtaggtaaccaaggactcagtgacctctaacaacagtaaaacactaaacctcacaataaaaactgttttaattggtaactaacacatgagatcactacactctaaggtcccgcgatcattgctacatatataaagactgggcagcatagtgatacagcagaaacccctatctgcagatacagaacgtatacatcactccctccggaattggtaacgctacgggcgcgagaaggagccgccgattggtctataggattgagatgccgcgcacgaacccgcatattctcaagcggaacatcacccggacgcaccgagcgagcctaacatcactaaatgggcgcatgcccacttaatgcttgaatacattagatggcgtcgcact

SEQ ID NO: 12376 - DNA, 3922 bp, Emericella nidulans
ctgcgacgtccttcatggtgaaattaatgctgcagaaaatggataatgcaggcgaaggctgacaatagaagcgcggagacaagttcctcgctgattagatagggtagaaggattagtgtgcagttcggcttggcttgggtggaggcaaatccccatgccacaccgtgccaccagtgcagtgacagtcaccagtcctgtctagacaaactgtcgacgggtgagtggagggcagcagactacaaaagcacatccgtgcgcagagtaacgacaccgttggttggcatctacaacatcatcatcatcatcactcagactgttgatttgaggcatcgcatgagccctttaaacacaagcattcgggcttcagggcttgttttgcaagccgttttgactttcggcaggatgccccatacaagaatatattcccctcttcttcgatcagcagaggcgcattcctgtggaatgaaactcagacggtcaaaagcaaaccgctgccctggtaagcgtactccacttgccatgctcacggttcagaagttcggtaagggcatgatgttaaagaggatgacttccagatgcggcttatgtcagcctgaaacaccggtaacctaacgttagcaggcgagcttcaatgaaattcgttggcggctctggtgtcttaaagatccattccaagccagtcgcggattgggcagtagacaaggctaggcgtgttccagtagagtttgaattgccgtccacgttctagtgcccctcgtcttcatccaagtgttgctaggattcggttcgccacggccgggcttataagcaggactgggcttctgttgtcacgttgtgtcccgttaaggtatcctaggacataatacgccttcgcaggatgcgatcaaaaagcgagatcaagttccagtctcggttgcgacccaagacgagattcggcgggaatcgagatgaaatcggcggctatgatcggcggaaagtggtgctgtttcagccctgagccgtcaagtcctcgtagtggagacaaccgacgaaccgtgaacaacgggacttggaatcttgaatttcgatcagcatcttgagtccacagtccaccctgattatgcgagtagccccgttgtgccggtcgcgtcaggagtatgtgggagaagttgtgggagtcatgaagaaaaatgactgagattcgagttctgcaggagcccgaataccaggtttatcatataaactgcccacctgacaaatcggactcttggcgtcagcgctgtcagcgtgcctgggcggccgcgtggcggctgcttgatttctttgggcgtttgtcaagccgacccttgaagtcagagcggggtcctaggctcccgaggtccgggaagcccgcggcggtagtccgaccacacaagcgagccttagcgaagtgccaggatatttaaacttcaggtctaggacaaattcggtaaaagttaagctggaggatcacccgaatgcggtataggtctgatatggttgcatacaacagtagcagcacatagtactaagcgatagtagtaggtagcatctacacactagtgctctattcacataatgtacgtagagactaatacaaacccgggtcctgcaccgaggtaacatttgacatggctgtttcacatacacgatctcgcaatcttccaacaccccttactccaggatggcttaacagccgtctcagactctcactatttatttgggtaaacttctaagtatagcataatacagacataccgcgatatgccgccccttcccgtgtccattcatctccaacatatggaccaacaattatagtggagggggtctaacgttgcaagtaaacgttggtctggaacccaagagtgcaccttgggactgcagatgtggcaaaaggaccccgagaatgctcaggagacagcaaccaacaatttgcgctgttccgtgcaaagaaacgctgggccgagcgtgtttcgtggataatagcaaagggcaggtgatatatggttagtacatcgatatttcatcacgaatacctgctgtttggttgagttggactattgtaagtgagatgtcccaaagcttatatacaaatctagaaacaatctcgacacgacaagggagcttcatgaatcaatcactaccacttcgcctccttgcgctcctggaaggacttcaaaatctcaaccctcttctctagagccgccacttcacgctcaagggcagccttgactttcccctcgtcgctgccaagcttcgcgtagaagtcctttcggtaaggagtcgccgacatggccgcggagaaaatgggcttgatcatgaaagaatgatgttgcttgagggttttgccatacgcgtcacggaaagagtcagacagctctgtgccgttgtcgagattgtggcggagagccttggcggtgaattcaagacccctaggaaaggagatgaaggtttagtataggattactttcccgacccaactttcctcccgttaaacttcgggcggcactaacctaacgagccaaaccaggccttctgtggcaacatgcttctttgtcttcaattcattgagaacgagggattggagggtctctgattcgccgggggcagccagctgcctgtctctaactttctgcacgtacgttagacggagcgacacctgatcgcggggataagcggaccttgatgttgcctgtcaagtcgctcttaacgggggagaatgcggcagaaccaaggacgtctattgcagataaaagattagcactgttccgctccacgagtaagctttggcataccgaaaagcgtggttagagactctgcagcttcgaggaactccgaggtagcaatggcattgtcgttggcagcatcaacaggaacatcatcgaatgacctcttgagggtatcgaaccaggtgccaccggcgggaatttcagcaggcatgatgaatcgttctataaactgcagcgcttgaaagaatcaaattgtgtataggagaaaagtaaggggtatgagctgtttggtgtcattcatcaacagcttcaccgccactagtaggccacgcaaccatgaagcatggcggggccgccgcgcaaacaacgcaaacacactagcatacgcaaacagcgcaaacaggatctcccaccgacatacaacgacgtcatagcttcaagttaatgtttcagtctgaagctactgtgctcttcgcatcgaaagaaccttttggcactaccagcatctcatcatgaatcggttgtttgggtgatatatttttaatcaatctacttggaatatctgaaagtgggctaatattatctctcttctcgatcacgttcgtcgaatgggaatgcctggtgctttgcaccaagaatgtcgatgacatggagcatggctgtcagaactctggtgacggtcatccgggcctcgaacaagactcctatacactcgagaagctggtatgatattctatcagcctaggaagacctgtcaagtaccgttgacaacctaatagcgtcacgcttccgcaacccatgtccatataacgagtcgacgattctttattggccctattcccaaaaactggctacaaagccatcgcaagtcatggtacagaaaacgattgagttccagagactataggtccagagccgttactttttctgcagagtcggattacgctcaggaaacagggcaatcggcatctgaccccccatcgattgaaccggaagagaatgagtcagagacggaaatagaacaggatagcggtcaggaaaccccgcggttgacacaagatctaagggttttgacccacgaatatgaggataatgatgaaccgccgccttcggtggacccccgcggcggcgacacacatgggacaaaacccgactccaggtctgcatattcacagcaagagaagggaatgcgagtc

SEQ ID NO: 12377 - DNA, 563 bp, Emericella nidulans
tctctgcgcaaatcccatctacgcttaaacatcttgcgattctcgtaactagtatattctaataactaatcacctcatacttctcgatcgtttctagcgtagcgttataatcgttgttcacttaaaaatgcgattaacttcctgcaaccatatcagattcaataccatttcagatcatctcaactaaatccttataattgggcaccgaatggcagacagtgaaattcctgcaggaggcttaagcctcccgcgtggttataattctggttagcccgggtggctattgactaagtcaagatacactgtttagagtctgaccgcacacccactggcgattcacacacgttactcccccttaaattccgagggtgccctaaggtggggtcccctgagaggaagtcgtttggacgcccgtccgatgccaagcgcggtagaggcggtgccccggcctctcgatccttaagatcagatgtgcgccctcctccgaacgaaaactcgttggggcgcgcgaggatccagacgtcgaatgtggggcttgctaatgtgcttactactggaacctg

SEQ ID NO: 12378 - DNA, 3537 bp, Emericella nidulans
atatccacagaggtgacacgctaagattgggtctgacgtcggcaggactttaccaaagtatatgtttgatccacaagattttcctggattttcttctctttttcccttttccagcgcatcagtatctggccatggggagtacggcaatgctggatctatgaagaaaaccaggaccgggctaggtgagcgtctcagacttcagtacaccaggaaagcatccctttcaccctgctctctccaggttgcgagcacattcttgatcgtgttcgctgtggcctctgcataccctggcggcggagggtccgtaggcgccgttgctggatctcccataacccaggcgacaggttccgggcagtagctctggtacctctccttgagctgctggacgaactctggggcgtaaccacgaccaaataccactgctcgcgggggtcggctgtagtcgtgcgtgcccacgtcgttcggactggtaacagcaggctgggggtcctggcctgagaggagaagcggaagctcagcgtgcactgcctcaggagaggcgatgaaatggatgactgtgctgttgttagtctggccaaaccggatcgaagacgaggggaggggaggaggggctgagcccagcccaccataccctcgtattctgggcggagaacttcggagacgggcttgccgacttcgactctacggccgcagaggataacggggatcgattcagccatttggagggaactaggcgagagctaggcgagagctaggtgagagtcaggtgagaggtaggtgagaggtaggtgagagtggaagcagtggatggcagatgtgagatgttggatttgcagctacagctatatatgtcatctctcgctcttccgcaacagtgctagcttgatattccttcagcccactctacacttagtctagaacctatcacatggaacgcctacactaagcacgggcctcgagatacggaatccccgtcagcttgaatcccctgtcggtcaactgcaccggcttgcgcggcttcttccggtcataagggtccaactctccattgcgatgcacaggcagatcgacaacgtgcatcgcgttcggccagtgagtggtcattttggtttctagacggtcagtaaagagcgactgccgtgaatacgacgagcataccttcaaacgccatcttcttggtctggagctgtttcgttgtcgcgtcttcgacgggcatgtagcaggtgtatacggcgaaccgcggctgcgaggtcttggaggagaggttatagtgcggcgtgcgcgagtcccctggcctaagtcagtggtctcgaagtgggaggagaagaggacggagaatgcctggtggaatacgtacagagcaggagatcaccaggctcagctgtgagcttgatccactcacagcccttgtccctgagccactgcagtccggcgtcggtgaacccgtaccactctttcgtcctatgcagtatcatattaaacgcatcaatacctacgaggaatagacagatcgttcgtaccaggaccagatccgctcctcatccttgaacgcctcatggaactcctcactcagaagatgcgcccctttacagacgatcaaacctccgtcgtcaggcccgttcggcaacagattgaccagaccctgcagacaccggaacccgggtttctcgggatcctgatcctgatgcggccagggcttgtttggcttgatgtctgtcctgtttgggaacccgatattgaccgagtcaaaggagacgatcaggtcgggcgtatcatagaccttttcaaaggctgcgatcacgccaggctcttggcgcaccgcccaggtaaaggattcatgggagatcgcgtagccgagacacatgcccttctcgttgatatcgggcaggtggtctttgtggatggtcgatgggtcgtgccggttgaaacccaggccgctgactcgttagtttactgatggaagtgtggatagtgggatagtatgggataaataagaaaaaagggcttacaattcctccaaccagtcgtagatctcgtctgcgtacttgagcgcacggtctctggggacggcacccttgacaactgcaagcccattccttaggaggtcgtcgcggaagtcgccatagtggacgtcagtgccgtgtgagaagatgcggccggaaagagcggtagtcatcgtagttgtcgacatggttggtctcaggtcaagtcgaactggatgtatgctcagtgtttggcaacgctcctgactttcgtttatatccatgcgacgggcattgccaccaccggttcggctcggctggcggttcggctaggattagggctggcaggagtcaaagcatgacgctatcccagagggttctgctcgccctattcggaagagtgggcgcgcaggcagacgtgggggtggagccgaaatagtgccgtctcaacaacatcgcggggacagcgcggggagggtctctagatctccagatctctaccgggacaacgctggagagatcgtatgggaggtacctatgccagacctaggcaaccacatggagcacaaacgcaagcggctctcgtacgcatgcaatttctgccgccagaggaagacgcggtgcgatgaagaacatccctcatgccgcaactgccgggtcgccggggtgcagtgcatcacaactgacaagcgtcatgccggggtgatagtgaccagccggcgacggatcagttcaagtcccagtacgagcacggctctgagcacagctacgggcgcggcggcgacgcccgtagagaaaacggtcctcagaacgcctgtctctctgagccaagcgtctccactgcctgcagcaagcccagggctgcggccgccgacacaatgctgggaccggactggctggcgcagcggacggctgcccatgatgccgcggttcctaggagggtgtatgtttgagatcatgaccgaatggctggacctcgccttctatcgactccgaatccctgccccgtaccctgcgccggctcagttagccgcgtcgcggtctgtaccggtgtcggtactgcagtctgcgccagatctgccgccgggtcaggaaaggcggatattgagcgagaggttcctgcagactgtctgctcggtgtttccgttcgtgagcgcgagcgaggtgtacagcctctgcgacccccgcactgacactgcatggccagtctctgggcaggcactggcctacttgattgcggccaccgcgctcatggcagggtatgcgcagccccagtcagcaccggcagtctacctcagctactgcaacagcctgctcggccacatggtggccgagcggagccggcaggctgtgcaggccatcctgctcctggccatcgccctacggagctgtgaccagatcgcctgggcttgggacattctcggcttgggcgtatcaatggcacagtcaatcggcatcaaccagacccactcagaacccgattcgactggtggtgtctggacgtgtttgagaagatcctcggctttcagagcggacgggccttaatgatatggga

SEQ ID NO: 12379 - DNA, 517 bp, Emericella nidulans
  unsure (1)..(517): unsure at all n locations
aaagatgtgatttatgttcatatagcaagattagctaaggtttatattttcgccgaagaacattttggatatattataaacttggtccacacataaagtaaagctactctgagctgacctaaaatcaactaacggatacagctctgccacgtcgtcagcacccattggcccaaggtctgactctttcttcctgtggaataacgcccgaagcatgatatctggcccatctcgttaaataaagggtttagtctcgacagcacgagggatatatttttatcagaacaatgtccactgaattatgtataggcccgttgctggattatccaaagagacgatactcngtccgcggttaatgtggatttcagcgtctggataacagggttctatgcataanatatggaggatacatgtattcttgctcgggatagacttctttattttcaaatttggttcctaccctaaacttaatactttacttttaattaaattataaatcctagatatgcaataacccttt

SEQ ID NO: 12380 - DNA, 1602 bp, Emericella nidulans
cccatgtcttgaacgcgatcttgaaaaggaagggatcgatatgggaagcggatgcaggtcttcaagtggtggtaagagaggtgtctttggcggataaccacctgcttagcttcccctggcttcaatgacgccgattcccgcagagcccgaaggaacgtgcgatgaaacgccttaccagaagtaccgtcgccgaggccatggtgatacacgaataccgcagtaaagcgtctttccgattcgccatcagtcagtactatgagccgccagtagggcaacggcgccgcgaacccggtatcgtgctgcgtctgaagcaaagtttgtaattcgctgtcatgcttgtccagcgtcagacccttgactctcttctggaaagaaatcggctgagctagatcgatctcaggaagtcgcgcaaagtaaggcttgtctgtgtcttctcctattgggattgcggagaggatcggatgttgattgatcaaggtttcaatagccttgtatatgtattccttaagcgagagagtaaaggtctctggaatggtgtaatttgctgtgatggcaacgttcatgtagaagcgtagagggtgtcttgtggtggagtacttctccgagaggcccagataatggtcagtagcgtgctgcagtctacatcggcaactcacttaccgactgaacgcagccgctcgaaggcgactgtagtagagcccattgttatgattctttggaaaattgtaaccagacaagcttttggtgggagagaaggattaagaacaatactctgtacagcaccgttacaattgtgcaggtacctagcacgtgacatgacaacacggctcatgggccaatcagagatatgtttcatatatacgagactccagttgatgaaacataatggacgacaatagtgtcgaaacgagtagacagattcaatgatgcgttgtttctgttgcaagaaggctgtgcttagaggaactggtgctcaggaagtatagtcctatgttttgggagtttttggtaaggagttggtctggtaacgtgccgcgattaacctggagttagggctgtctggtatcgtgcctgttatgcagctgggctgctttagactactgacactttttattcccaaaaattcgtgggattagcattcgcttttctctctaggaggcttaggatatagagcccgtccctgacctgagttatgaagaccccaagcgcctcatgctaaagacgcgctatgcggctactcgcgctaaacagaaggggaccccgaagggtatgacgtaatcataatctgactcactacccaacaaccgtcggtggtgctcccgacgcccgacgggatttggaaaggtatcaccagccatcgagcttagcctaccgagcctagcctcaattaagctcagaatcttcgttgataacaccagagactctgcatcaaccacataccagtcaaaatggttttccgcttcgtaagtcagcctgtcttctctctcggccagccggtccaattcgaacaaatcagtggtctaacattacgcagcctaaatccctcgacccgataaccctctttcactcccccagttccccggccagcaacacggcatacaa

SEQ ID NO: 12381 - DNA, 560 bp, Emericella nidulans
catcaagtctgtggatctctgcgcaaatagatcgtaccgcttatcttgaatgcgtatagtcaatcgacgaggacaacgccggctgagagagcaagaaatttaccagattgtaccttcggctactgtgacgctcttatacacattagtacgaagtgggcctcgtaacacagagtcgaaaagcactggtgaactcgcgtaatcgatacgcgatagtgcagacggggcgtggcgtggccggaaagtgaggacgctaggtgatggaaaaccgccacgtgctgcttgtggtaggaaaggtctgtgctaattagttgactaaggctacggaggcgtgggcccgagggaaagtatgcgtgaaataatcgagagcacggtagactgcgatccctacgtagggcgtcgcgccggggcgcactgcgagataagtgctgcgtcgtgaggatttgcgcgcgaggggtgcgtgagcccttactagaatagaggaggacatgtaggtaaactggtaagtgacggcggatagaacggcctacgcctggtatggaagcttggataaagaggcgtat

SEQ ID NO: 12382 - DNA, 560 bp, Emericella nidulans
ttaacacacgagcgcaaccttgcagattcacgatatacgctgccgatgaaaacgcataccactagcaggcaagggtggatagtaggtcgaagtcagatgaaagagacaccactgagagtttcaaactgaaggaaagcttgaaaatccagcctctacacaatagatcactgactctttttcactatcacctagttttattatacgaaaaccaaaacacagactcttggatgagatctaatcagaaatatgacaccagaagaaacatagatataatatgaactcgaagtatactaaagtaatgtaaagtaatgtataattcactctaatatgaataactacaaaggaaacagaataaattccatttaccaaatatataaaaaataaaactacagatgggtcttgctaataaacaagggatggactgtactgtgcgcactacccctctcggaaggtatctcctgtggggccgcacatgggctaaactaaactttgacgggaaaacaggtgcctccggcctcccggccgcgcctccaggttataatctctactgaaaggtcagg

SEQ ID NO: 12383 - DNA, 918 bp, Emericella nidulans
agcgacgtattgggtgttggcagcttcaagcaacaagcctcgccgccactgacagaggccgagcaagcgggggagattgagcgggcggacgacgtgaccacccaaagttcctgcctgccgactgactaaggaaggcactcactcactccctggggggagaccgaccattcataacgaaccaggcagacaggaaggctggaagtgcacgcacctgtgcggggagagatacaggaggaggacatgcacggcatcgaggggaacgagggaggcctgcccgcaagaacgacgctgacggaagagggcggcctatatgcacgagcgcgcacaacctggccgtcgaacctatcaatactttgaagggagcagaaagtgactagccagcatacaagcaaggtacgaacggaaggggtacctacccagatgcctgggaggactaaatatacgcccgccgggagggcagccagcgaaccattactggcgaccgaccatgaccggctgggcaaatgacatgccggcccgcgagcgcgggatgcccacaactatacaggagggaaccgaactatttgttcggaccaaccccccaccggctgtatgttgcgggagagacacagggtacagccaaccatacttccatagtaaagaaggcggcccaacaaaaggtcctgaggattcaggccggcagacagacgccaaaaattggttgggttctgtggaaaaaaaaggacagcagtccagctccccacgagggcccccccggggaggtgggggcctcttggaccggggaagcaggtgttcactgtgggggaaggggcccagaaaatgaacccgggataaccgagggacaccataagaaaaacccctctggtcaggaccgccagaagggttttaaaagcttggggctcccccgacataaaaaaa

SEQ ID NO: 12384 - DNA, 2537 bp, Emericella nidulans
ctcatgaacctcatgtcagttgataacctcctgcagacggatttgttcagcgttttcagttctcgagccaaaatatataatttaaggaacctagggtccatggaatatcttattatcagtacactaaggacgattagatggcaaaaacagatgtaaagccacaacaaccctgcaagccctattaactgccgcccagtgtcgacttagtatacaaacccaagcggttatgtgaggtcgtgatatatcttctctgtcgcgcatcttgctcttgcccttgcaatggctcttcatttcaggggtctggaactctacacagttctaagcgaagtagctcttccaaagaacacctgagagatcttctagttgatctgaggtaaatgcctgataggggattagttgctatgtgcatacaacagaacaagaaaatgctgacttaccttcgcatcgatatgccatgtgtcctgcctggtcttcttgaactcactgataattgacttgacacttgaccccacaatgccaggatcgctggccgcacgaacgctcagcgtggtcagtgcttcagggatccatgtcggcggtggactgctgtaggggaaagcttgaataagtgctccgagacctagaacggcaccgtgcctggagataacaagacgggtgtgttcaggatttggagtattggctcccgaggagcccggagacgataacccactggccatacgaggcatctttggtcgtttgggaagaggattctctaccaggatttgggtgaatcgcttcttgaaacgatccacgatctctttgcggaggaactctggagaacaacggaccatccctgacagcgtggctgatgcacccgctctgacttcatgctgtgggtcctctagcatgctcgccacgcactcaaagagcttatcacggtcagagggagagagaaggaagagacgcctgaagtagataatctgaatattgatcatgacacgtaaccgctggtgccaagagggcgacgtctgcccaatgcggataagtgtcttaataaagtctgagttctcctcagcgggatacggaacgttcggtaggtgacggaaaacgtggtatgctagtgattggagttctggatcttccttaacatccatcatatgcagcagttgtcctgtgaacacctcagcgaagaagggggcaagctgcgtgcactcatgagaagacagcgtagagtcaagccaaagaagaacggttttgcttcccgaagtgtaggaagaaggcgtctgttggccaggggtcctctcttgtcgccattcctcgatccgcgtaaagatatcatttatcatctgtctgaagtccgtatccggtgaatacggataagagccaaccgatgaagatgcttcttgatccgcaagcagactcttgacgtctgggtaagattcgtggtaccgcgtacggaatatagttgctagagtctgtcccatagcttcacgaacccctttataagggtggtcaaggtgggcaaggtaatcttgaacaatcggtttctcaagccggaagtgccagcctgcatcaataattgattgatgcagcaaattaatcttggagctttccttgaaagctgcattcgtcgtcatgtctaggcggaagctcgccagccagtcaactaacggccagactcgtcgcgggtcacggcactgaagaatcatatggagaaacgttgtccagtaaccagagttctccggcgtcaacccttcgatgaaaatcttttgcacaattgggaacgcatattcccagaccaacgttcgcttctccacactagtatccgtaacagagctgaccagcgcacccagaatttctgcagttgcccgatgttgatgtttatcacttccatcctcataaaccgcttcaatctcctctttaatatcttcgaaggtggctgctgtaagtccatcgcgcagcatcaactcaaaagcatacagaagcaacattgcacaggacatgcggaacttgtcggctgagggatcacgtggctcttgcttcaagtacatgaagaacttcttgaaccatgcccgatcgaacagcttacccatgcgagaacgtatctgccattcaatctgatcgtactcgatgtcccgttcaacatttggtttgtacccaggcatgtggtcagcccatacaagccagccggggaaatcgtgatcaatataatactccgtttccgggttagcaaagcttgccaaaaattcctcagtccagcccttctcatatcgcttggtggccactttgatttttgctggaaaattctggttacccaggatatagctcttgtagtcgtgattgcaaattgctcggacatcaatcatggtgaacagcgccgtgagcccctgtgagtacatacctcgcaagccagggtggtcgtcgatggagcccatagtaacgagctccacgaggcgctcgctcgcgatgtaatcaaaccgcaggcccattgagatgacaatggtcgctgctcgactagcaactttccagtgggcttcgcgggctagatccactagctc

SEQ ID NO: 12385 - DNA, 580 bp, Emericella nidulans
gtggatctctgcgcaaatatgattcactaggcccccggctatgaacgccgcatatgtttcaatctgctagctcaaccaaatgggaatgcccagcggtaacttctcagacgagttgggtgagtgctgctgggtgaagaccaggggtgctggtgcccgcgcagtaggaagtcgagcgttggtggactaaatatgcccgctgtgtttgcacacggtagaaattaataggtttggtgtgtaataatagcgctcccatcgctgattgacgcaccttcatagccacggacgacacagtctgtggtacatatgcgtgcgaatagatcgtcgacgctactcacgcgaggtagtggcacaggtcgctcggctcgatggactccggtgctctcgactgggttctcgctagactgacaggaaggctgattttacggctaaggttactccgagttggtagtagtaatagatttcatggtccttttacttcgcctcccagacgaacaatagtgttggaacgccgtagagaccgccttggtaacagaagttcgtttacgttgattccgagtgctataccgaatccgcgtatgac

SEQ ID NO: 12386 - DNA, 611 bp, Emericella nidulans
gctttagaatccttatcaaagataacaatttgctcgagttcctgagtctgataaacgccaatagcctccgcgccgctagtgctcgaataaattgaaccctgtcccactcgtactccccacagccgccacgatccattaattcagtctcgactcctcactcctccgcgctgtcataccacaagtcgtccctgacctttggtacaccagcggcacccttttcaccaaaaacccgtccggtcagcatgtccttgaacgtcttttgctggcaatcacaccaccacgcatgtcgtccacctgactcgaacggcgtacacgccacagggcggtatctgcgaccgtacatctgttcaaagaccttgttgcgccgcgcccgaagatcccgctgcaaaagccggattgataccgaatcctcctccaagatcgctcgaagatccggatccccgttgaagtctgagtccatggtgatgaagtaagggtcaatgacgcaagtgaaatcggaaaggaggaacaacgtcttcaggtccatctccttaacgcgcttgtcgcgggtgccgtttatcaagagacaacaacccgatgagctggtacatgccgcgggacgagccgtcttt

SEQ ID NO: 12387 - DNA, 896 bp, Emericella nidulans
ggctgaaggcgaatggcaaaagcagcagaccagcgagcggtcattttcgagaggagaccggcgtctgagtctgaggattgagtctggtgcggtctgggtctggccaacgcgggggtgaaaaatggaaaacgagcaacgcgaaatgggcaatgggcgaaaaaggcgaaaaagcgaaaaaggagtcgcaaaagaaggaaaaagaaacgagaggagcagggcgacggacggggttcgctagacagtgatagtaggtaccagaagagacaagaatagaccccattattacggacattaatccatcgattctgagtagataatctatcttactgcagacagcggactgtccatgatcttgagatcctcgccgccgtctctctctggatttttccctgatgatcactcggcaacgtggttgacagggcagtcccaccgttcacgggcctacggaagaatcgatagacctcgacggttgtgagaccagtgatgccagtgataacagcgaccgcgcgatcgcgcggtcgcactcactgcaatgactgcaagcactgcaagaactcgaacgacgagaataccgtgactacgtgactacgtgaccgctccgcattctggcatgctcgcattgaaaacccgacagctgaccgaacgcagggccagtctcgatcgatcagccaacgctcgtatccacggtcagactcagcgcgaaccaggcaggcccaaaagaatggcattcccgcacagcgagagaaacaaagcgagtggtgactggccggtcaggtgcctgcctgtggggtgaccgtcccgtgatccgccaatgagccagtagcgggctaagcgaaaccggttagccgcttggccttgctcttctgggcggagtgcatggttggtttatcggagaa

SEQ ID NO: 12388 - DNA, 129 bp, Emericella nidulans
acaccgccacgcgtgataggagactccagacgaagtcgacgacacgcggcgcgtacactatgtccaacacggagagtaacaaagatcaattccggtgcctccaagtcagcagagaccatatcgaatgac

SEQ ID NO: 12389 - DNA, 534 bp, Emericella nidulans
ggcgggactgacggaggagtggaagtcgagcttcaagaccagatgcttggaccccgtggaacacggcgatacttgagggtctgtttgggtgcatccacgcaagacagccagacagagctggactatatagagcgaatggtatgaccatccgtagacgggaccaggcaacacgcgcccagagacccagcatagccagccatacggggccagcgcgcacagacacatgcacatgcccagacgtgtcagtacagccggcccgagcccgcacagcacgcaagccatgataccgggcgcaccggaaccacaaagaatgacgtgagaagagagcccaccgcgcgctaatcgaccaatgagacgggcggggacaaaaaggacgggagaaatagccgcccgtgaccaatccacgccggcgtagccagggcgacagacgagacccagttagcgaccaccacatgtaccggacctctggctgactcgagatggacgtatgcacgggagtcatacaatccgactcttcaccggtgtagggcaccg

SEQ ID NO: 12390 - DNA, 110 bp, Emericella nidulans
gacctttatcggaatataagatggcatatgtagaggcgtagtgataacgtcgcgataactcggcgctacacactgttaaagaactaggacagtctcatgtcgaatgagct

SEQ ID NO: 12391 - DNA, 199 bp, Emericella nidulans
taaaataaaaaaccaacattacaactaaatacacacctagcacgaatcaattctccaacttaatctaacaacaataaacgggggtcctcctataccaggaccataaacccaacagactcgaccaacacctcagatgtcctgacaacggcagaccaacctacaagactaccgcacaacaacaatcctacagtcccctttc

SEQ ID NO: 12392 - DNA, 200 bp, Emericella nidulans
gctcacgacctccctctggccttgctgtcgactgtctggctaccactgaatctgacggttcacagacgcggctttgaagcactcaactgtccattatcggcgccaccgccgcccactttgcactgccagtcacagcaggcatcacgcctaagctccagtaactctataaatcctgtaccagtatagtacctagaagcccc

SEQ ID NO: 12393 - DNA, 1290 bp, Emericella nidulans
aagattgtgtttccacacgtcacgtatccttgtctttacgccaccacccttcccctcaagtgtaaaccgcccatcatgcgcctgatgtaattgctgctgctgcatctgcgcgcctctcgcaaaccccatctgagccgcatgctcgcgagccccgttcctccaccatcccccgcggctccgaatcccgcgacggacattccattcccaaccccggcaccagctaacgtaaacgggttcatatttgcgttcgcgttcgccgttgtgaaaccagggtgtacgccaagcgagggaggtggaagagctgtgttgctagactgggcgtgtgctgggtgatgctgcgcttgctgttgttgctggagatgagcctgctgctgtgctagatgtgaatagggcccggtgagaccggtaggcccgtatcggccgacgggagggggcatattagcggtatgtgaatcggtgtcgactgcgactcgaggggctggtcatgcatctgagattggtgggcttccataggatgaagacacagcagcagaataatgccgacttcgctggtcaaaagcggaaggcggaaaaggcttgtgctgctgatttgggattagcgcgccaagcctggggttcttccgcttccctttgcaactgacgacttcaaaaccaccccagggaagccctgacagctcgtacgtcgttctccgctttccttgggcttcgaaatccggcgggattcacttgctcaaataaaatactggccgcttcttatcaacaatatgaatggccaaccttctgtgggaacctttccccccccccaattcctgtctcccaaaccccccccgccttctgccattcaacaaggttcaaggcccgcggcccaacccccgggtcggtttttggctccacatggggaccccattgggctccccaagatccgggttaaaataaaaatattgtcccaaaacttataaatcacccttctcttcacataggccgcgggggttcacccgtctctatatccgtcttaacccttataggaacatttccctggctttcgttacctccctctagattccccgcatttttctccctcccttttttataaaaatatcccccctgctattctcttctcgtggctggggcaacatctttgatatctactccccttctttaagtgggctccctctcttttcgccacccctattaaaccattgcccactcccaccttgtgttcatctctaccctcttcccatctcttctcttcctttcatgctctccattcttttctcaaccacttatctc

SEQ ID NO: 12394 - DNA, 1105 bp, Emericella nidulans
  unsure (1)..(1105): unsure at all n locations
gcgggggaggaacaacctgtcggttggaaatttgcaaccgggagctcgaaacccacancnggcgagngncacgnntgtcaaccttaaaagcaagaggccgggaatacccccagacaccgataaaaaggaaaggtactgatacaggtaaggagatacaaacacagcgcacaaaacgaaagaacccaaaagaaccgaaaaaacaccagcaaggaaaaaaaaaacagcaccaagaacaacccaaaaataccgacagaaaggcaacgaaaaaaaaacacaaagaaaaagcaatcaagaaaccacccgaagagacaccgaaaaaagaaaccaaacaaagaaaccaggaacgcccaaaaaaacgaaaacccaaggcaaaaaaaaaggaaaaagagaacaacaaaaaaaaaacccaacaacagaagcacgaacaccagaaataaaaccaccaaagggcaacaaaaaaagaaaaaccgccccgaaccaaaaaaaaaaagcccggcaaaatcacaacacaaaaaaaaaaaataaaaaaccaagcataaaacggtgaccaaaacctagaaccggaaaacaacaaaaaaccctgagaaaaaaaaaaaacaagagaaaaagagaacaacaaaggaaaaaaccgaaaggacaaaaacagaaaacatggaccaatagagaaaacaaataaaacaaaaggaacacgagaaaaaaaaaaataagaaggaataaacaaaaaaaaaaaaagtgacaaataaaacaaaacaaaacactaagaaaaagaaactcaaacaaggggtacagaaaaaaacataaaaaaaataaaaaaaaaaataactaggcaaaaaacaaccaaaaacaacgaagaaacactaaccaaaaaaaaacaaaaaactataaagaaagaatcaaatagacgaatcaaaaaggaacacaaaagagacacaaacaaataaacaaaaggaatttatagaaacaacactaaaaacaagagtaaaacgaacaaaactnagccacaaaaaacaaaatacaatcaaacaataacaaaactataagagaaaaacaacaaaaccataaacatacacacaaataanacacacaatatagacacaaagaaaaa

SEQ ID NO: 12395 - DNA, 2033 bp, Emericella nidulans
tattccaaagcgcgattgggatagcgtccttgtcgattattttggtcatggcatcgacccagtctctctgcccgcgctcggggccgaggtgtccgccatacctgacctcctcgcggcatccatcgtccgtcacatggcgagtccggtacatattcgcgtcatattcataccggcaatgggccctcacgcacttggaatggtggtccagctcgtctggctccagaccggccgaggcagcaaggtagtaatgcccatcgataggcagctgtgtcagggtcgtcatcatatctgcaacgcaccatttcgtctcgagccgtcgcatcagaatccccgagcgagcggtcttgggccatggtgagaccccgtcgacgagtccgctgatctccttgctgcagacgttatatgctgtgcggcgaagagtacatgccattgcaatcaacgtcgtcgcgatctcatcccgcaccggccaaaggcgcggcctctcctgctgcagcagcgagttatcctcttcaggattgggtaacctgcagaatcggtcgaggatgcttcccgcgcgctcgaacatctcgttcagtgtatcccagtccttcatgagccggcccctcgctttaatccccttctcccaatctacgagcattccggggagcctactcgtgttcacgatccgtgctttggcgtgcgtttgcgtcgcgggtttcaggaaatcttccaccgaggccctgacaccaccaaatctgagaacatcgatggcgaggccaaagaagagccatgtctgaaagaactgttccaccttctggggactaccttttctgtggaacccgtcggggtcgaggtgtgcgtctttggttgtctcgtcgccgccgtgcagctgagcctcagtccagtgccgtgcggagggaaaagaaaggaaggattctcgggagatatcgaaccagtcggattcaggggcttcatagggggctacaataaagtgtttcttgccggcatggagagggagatgctccatgctgatggttgggagtcgctcctcggatacgagggtggatgacccctcagcttgtgctttgggtcggatttcccctcgtataagcaatcctcgataagctgaattgaccagtagctcccactggcccggataacttccttgtctagccgtcggttttgggggatgctaactccgcgtcgtggctagctgagcggggatatggctgttgtctacggccggggtagtcggggagggttgtacagcagcgctatggcttcgctgacaggtttagaactgcatacgggtgtattaccgttactctctgttataaatgttacttggcaggtaaatggcctggtacatatccaacgtacgtacccaacattttagccaaggattcttagtagagccagttctcgccggttgtgcgcatcttcagcattataccaaaacctcaacaaggctttaccttagaagagaaagatagtgtccttctattaatcgcggcagtttggatctctagacggggccgtcgaatgttatcgtcgctcaagcgtcattgatgagatgggcttagatgaataggcactctagagccaataaagaggaatcaaattgggtaaggtcgatggaaatctctgatattgaaataaaaacttccatccattcaatatctacgtatatgagccagttgtaggtctctagactgctgttttcatgaaattccatgcccaagatgctcaaacccctatagacctctatattgattcgtttaggacgccaaaaaaaactagcgcgtacttcttcctgaaagagactctggctgagaatagctccagtaagattcatttgccataattcatatattcatcgtcacttatgacggaacaggaagaaaaaatactacagcaggacaacacccagtccaaccaaccctccaatcgcaataatggccgtccaagcaactgcaaccgccgttgaagacggtcactgtaggtgggctcccgcccccaaagttacgccatcagtctctgtacactgccccatg

SEQ ID NO: 12396 - DNA, 569 bp, Emericella nidulans
gttgacaaactaaggtaacggcccttctctcgtcgtgctgcccagtcaatgcccttcagcggagtaccgcctcagggctgctctgagtccaagcgctgcacccacctccataactcctcccccttaactgtatcaggagtccagggagaccggtaggtatcactagacccagtaacaatataccacaaactaaaaagaccaagcagaaggattatgccttggagaaccctcctccgcctgagcctagggccagttcggcgcggcgcaaagtacggtttgtccttgtacatgggcagggtgcggtcaccggagaagaaattgttgaggttgttcgtgacaccggctgattgggagaaaccgtaaccccctagcccgttggctcccgggctgcgactggcctgccagtatttttctgaaggggaccgtgaggtagggtatgcgggactgccgcgagtatttggaaaagacatggccgttccgtcctctcaagcgctaagaaaaggtctcgcaaagaccgcgatatgatcgatgctccagctaggcggtagtcatagatgataaccgttcaa

SEQ ID NO: 12397 - DNA, 2606 bp, Emericella nidulans
ctcgcaccaccgatgcgcaaccagcaagaagggaaattatcatggtaggtctttgcatgggtcttagtattcaagaaagagaccctgaagtttgatattgacttgtaaaacgtaggaattgagaggctgccgtatgcgcaacgcgaagaaacaaataaagaagcaaatgctgcgccaactggcgttggaccctgacaacgaactgccggatgaggtagcagagcctacgaaggcccctcttgtctcttgatatgtaggaatacttatctgaggtctctttttatattagtgtcgtgagcccctcgctatcatcagcctataccttgaagcttcgccgaacgagctcgaccagatccgcgaccctcgtgatggagtggacgtggatacgctcctggcatcggattttgagaaattctacgcaaagctgcctttcatcatgccgcattttacacgatcccttgcgtccgccttgcatgaccttcgatccctcgcgaatgcgggcaacaaggcagccctttcaaatacgtcaacagaaggctcccggtcacggatgcaagtccgatgccgttcaaaggccgcgcgacaggaccctcttggtcctcagctgagtgaacgactgcaaaatttgcgccatttacagttatctgagctcgccgggggtcgaacgcgcatggccggaacggcggcagaggtacttgccatgcgagcggcgatactagagcggactgtaactctcctggaacgcacgaaacatggcgcaatggcgcgtgcgacgaaggctaaggcagagcaccttgcggctgtggcgcgtggacttgaaggcaagctgaggtagggttgcgttactactcacaggatggcagtaaccggactaacacttatatgttgatagggtgatgagactggatgctttggccgcgattcacacacccgaagttaatgctgcgctttcccattattttcagcacctgcgcaatgcgcgagagcggctggaggagagaagacgcctggttctggatgaattgaaagcgtacgaagacgcggattcgagcaccataaacggtcctgcaaagcctggacctattgttgggttcatccgccagtacggaaacctgattaaacagattgaagatatcaagtcggagattcggcgattacaaaggtagattgtggtaaacaagttcgatctgctggtaccccagtcctcgtatatacccactgaagcctcggtcccggattggtcaggtgaccaccccgccaaattttttttaccaaaagcatgcgactggtttactccatacattcgactcacaactggaaactggaaaacaggcagttcagacgggaaacaaaaatggctgacgaggcactctctatttacgatgaaatcgagattgaagatatgacctttgacgctaacctacaaatttatcactacccgtgcccatgtggcgaccgcttcgaaatcgcaattgacgaccttcgatatggcgaggacattgcagtttgtccgagctgcagcttgatgatcaaggttatattcgatcaggttggtctttagaaatactattatatgtttatgagatcagaactgacttctatagtctgatcttcccaaggaagaaaagaaggagacggaaggcgtttcggtcaaagcttaaggaaccgtacaactagggaagggaagcagtatagctcaggggatatgatcatccttctgcaacaggctgtgaaaatgctgcactggattgttcgttcccaggcgtcaatgagacgacaccacatcgaaaacgttatcgcaatgtttgagacctagcgaaaacatcccatccactgcacgcccaccataccacagcttatggcaactgcatgcatctagtgagacgatgctgggctccaagtcgtcccaccaccctgggaaagatactggtccctcggatcgaaacgaaatctggcaccgccggctcctaattcacgatggcattttgataggtcgaattggtcaataactcgaagccatctcaattgtctttatgtcatcgaagaatttgccttctgacagaaaaacatggtatagactctctcgtgtaggaggaactgactgaacgtcgttgtatctacccttatcgggcagcagatcatggattcatggtaattgagaccgcgtcttcatatcacagttagttactactgcttgcagtcaagccaagaaatctgtttagagtctgcctaatataccttatcctacatctaccccgacataattggttcctatcttgaaaagtagtataatatcaccatatccatcacgatacaaatggacagacactcaaaatggtctactcgtcaacctcgctgtaaacatctctcggcaaattcaatcccaactccttgttcagcagttccgtcaggttcgaattatccctcaaacacacccactgcccgtttgtgaatggtcttgtttcctgcttctcgtgcatctgatctccctccacaacccagtcgtactgccttggtccggagccggagaacttagcacaattgcttgatggggggttgtttgtttaagacgtatgtccaacgttggcgacattgatatggaggat

SEQ ID NO: 12398 - DNA, 2653 bp, Emericella nidulans
ctgtccgtcataaggatatcctaaaaacgccaaggaagcaggtgaagggataacacttacagcaattgagcttctgggtctgcaccttgttccccttacgaaagaggggtcgaaatggttcgtactctcgtactcggcctttaggtttgaggatgtacccaggctatctagcttctgggaaattgttggtcgtatgtctcttgaggcgccgggtggacggaccgcgtccggagctctggcaccggcggtttatcattgggtttatacactgcggcgaaggtagactgcgccgtagccagcagttatgttgccagggatctgagttaccgttggcggagttaaaggcagagggattcaaccccacgctcctcgaggagcattttccacgacttacggagtactagcctctaattcaatgatagagcaaatacgcagcggtatcacttcgccgctacagcttattgtcgcaacgacgaatgaaccttctcgaatcgatgtcgcgtaattcctaacgtggccaacttaacctaaagcgtgaacaatgccagcgtcgtctcattatttaggtcttacattcataccaagggctctacgatggaccgctcgtccagttaaccaagtggtatacaagctgccaggtgtccgaagcgaccgtgtaccatagttgccaaatctcaatcagggaacgactaaagtggcacgatgccagtctgctgtgttgaaggaaatcatggatcctgttttggctcggagctggactccttggtacagcggctctataatgggaaccgccaacatctagtaaccgtccgccgatctacatattcttcattgtatttagcgaatccccttcacagatcgtaatgaaactctacacctctaacaagcacctccgacaaagcttccaaccccgcaacagactcccgccttgaatgttcagtcttttggttagaaatccaaggttggcagaaaccagtgcgagtggggccagaatcttgaggataagaagagccgcctggctgaaggaatcgattatagaaagtagccggtagacagcgtctagcgagaatggggagaccgaggcgatgttttcggtgctgaagaaggcgaagtgcagcaggaaaaggaagaacagacagactctaacttccgacaggatgagatttctatatgtttctctctaaggcagcctttcctctctgtttcgctgccttggcggatgttgcaagcggtgctggatctcctctttccgggcctcttcggtgtttggggcgcaatcattagctacggcattcctagcgttgcccggttgacaaggttcgttagaaatgatattgcggatactgtggttcttagaatgttgatggatcctagaatgttgatggatcctctgttcgagttggacccagctgaagagggtaaaagcaatggcgaagtagaagagcccttcgtaggagattgtgagaatgatgaaaaggggaacgagagcgaggaatatgatcatatggcggtggagataatgttttcgtgggcgcaagacatgggcaaaaggcaggacaagggatgcaactgtttatcttgttgttagcatggcacagactccatgcacatatgcaagcaagctgaacgtggtgaccataactctgcaatggagatacattgttgaactaaagactgagcataactcatgaggtttctgtgggtttatgtagcgtgcctgttgggctgggggagggggtgattctgctgtcctgattgctgctataacacgacgtgactgatgtgctgaggactaatccttgatagcatggccagcggcggcatatagatcatcttggtccagacccatgttcgcaaaatctaagctgatatcatgagctctttacacatttcatatcgacttgtggtctaccgggctcaacggcggaaaactcatcttgtaggtaacgatgagttggacggggccaggcctctgtatgatcgtaccaatatacttcgtctctcaagccaccacttacgagtatgaagaatagcctgagcagcactaagaagcatatctcaaagccgatgccgtagacaatgctagtgagagacaaatcctaagaacccccacccagccaaaccatttacaaagacttgtgccctcaacaagttcatgagtgctccatgaccgctatggaatcatccagctattgcacagcattgacaaatatgctcacaggtagttgttgacgcggattctttgcatagaaccttggataataacatgaacggatgtcacatatcgcataaatcaccggttggtgtttccagggtctcgcaacaattgcaggagagaaaataataaaaacagtacttacccagcgtagcccacccagcaaatggtgtcccgagcggaagtccctgctttgtctgtaaagaagtcacactcaactatgtgacaagcaaccccaagggcagcaagtctgacctgcaaaccaagaattgtcctcgatgaaccatcgacatctgctgcgtgcaggctgtcttttgagggcacagtctgtaccaatagtctcttctcaaacgcaatatacaagaaactgacagaaggattggcgccatagcgagagaagaaagctctcttgctagtgcaaagcagagagagcaaaag

SEQ ID NO: 12399 - DNA, 126 bp, Emericella nidulans
gagttgagcattcaagatacaactgatagagaactgtaaatcaccgagcagtagggaaacgacagccgatcgctatccacgtcggccatagagctaagcaggacgactcaattcaagcaagagcta

SEQ ID NO: 12400 - DNA, 963 bp, Emericella nidulans
ataagacacgcacctaaccgaacggtagacccctaagaccattttttatttccgccaaatatttggagtcctgggcggacgtataagggaactgtagagctttcactgcgacactgaatcccgtcagccttcaagtcactgaaaccagcacatgggcttgcaagtgccaccgacaccgacatgacacctactgtcatcaaagctatgatggtagaactaacgagcttcaatgccttcactcttaaaccaaacgccctgcattcaatggtctagaacgcccttcctgagaaacctagtgaaattatcactcctatacagcgacgccgtcaaatcatgacgcggtgtcgaagatacagtagcaaagcaatgcatgaccgggctcgaccatgaacctcagtggatgctcgatgatgaaaaaacccaaacctttcttacgaaccggctgaatcctagatgactgtgatgacacaagcatacgccagagatccagacaatgagtttttcgtcaagcctgccaatttgaggagagcgagacaattttcatccctggccatccctcccagacctgcctccagaaaataccacccttttaaacggacataagaactgggacacgatttcggccgattggtttacgggaatccggcggataaaaagtattttcaaggtcttaaccgcccgaggcctgatacaggttccccccctcttctcaggaaaccttcccaagtctaggcggacacaaacaatttccgttttttcttctctgactcatctcttgttactatggccctttgtgttggctctcttcgaagtcctcctcattactatgtgcataaacctctgttctttctatttttctttaatcccttattttttatccttttatcttattacaacttcctccctcctagtctaggtatcaatataatcctctcactctttctcctctctttctcttttctc

SEQ ID NO: 12401 - DNA, 121 bp, Emericella nidulans
  unsure (1)..(121): unsure at all n locations
cttatgtagtattcgacatcggtcggcggaccacaatcgaatgctnaggcttgacngccaatcggtngccgctgtccgagaacatgctcatcgccaagntatcctcgcacttctgggtttc

SEQ ID NO: 12402 - DNA, 149 bp, Emericella nidulans
tcggcgctgatatacacagctacctatgccatacttttcaagaggcctgttctaaaggggttgccaatgggcagtccgatctgttacacgcggtcatattctcgcatgtccacctacgatacatgtcgcgtttggctgtttcaagactg

SEQ ID NO: 12403 - DNA, 99 bp, Emericella nidulans
tgttagtcaatcaaacaattttagcgacataactacactcactgagtacaagagggagcataataaagttaaaactacctgcatcacataagaagtggt

SEQ ID NO: 12404 - DNA, 129 bp, Emericella nidulans
  unsure (1)..(129): unsure at all n locations
anaggtcagttggggtaatctcttatggcggtctctagtactctcatcaggggtcgtcgactgctaccggtactgctgaccagcctcttatacgccgtcgaagttccacctcggaccttcatgtcccga

SEQ ID NO: 12405 - DNA, 240 bp, Emericella nidulans
  unsure (1)..(240): unsure at all n locations
cgcgttgagatagacatagatcttggtgctctcccgcgttacccttgcgcgctccaggttcttcccgccgatggncagcgtcgaccggttcngctgaacagtgcctctgttctgctcggcacgtgttgccgtacaagcgtcctcagggttgtgcatgaacatgtgtagggtcgagggtccggatagggccgccggaagcgccaggcnggagtgccacggggttgtatcgcgcatggcgcc

SEQ ID NO: 12406 - DNA, 1171 bp, Emericella nidulans
  unsure (1)..(1171): unsure at all n locations
atccccataccctttgaatgaacctgataagcagctccatctgttaagaccaactgtccgacgttctatcccgaaaatagccgtcgataatcccactgaagacgtaaaggagcagcgcagtacaaactttgcagcgacttccgtctcatcagtgactgtaaacaatcataaaggaatgcacatcatgcttccagcctcaggatcaacagcgtcggtaccagcgtccatcacctcaatcaagcgctgcgtcatcgacatgtctattcccacagcaaacggcaaaccatacgcgagtctgacggtgaaagacgcatctgacagtctccttctttgtggtgcaattaatggacccgcacacgtcacgggtgttcggaatagcattatcgtcgtaaattgtcgccagttccgcatgcacgattgcagagatgtagacgtttatctgagttcgtccagcaacccgatcattgaggattgtgaaggcatacggtttggccgtatcccgcgggcatatgtaagtctctccatatatccccgtattttgtcttcaaaccacaagcaattcttctgataatcaaacagcatacgcttgaacacgaccgcctggacagtgatgacagatggagcctcgtcgaggacttcaaatggattaagccagagccgagccctaactggagtttactcggtcaggatgccggggttccagaggaggtttggactgaaattgttcctggcggtcccggttggtcctctgatcagattctgcgtgcggtcaatatccttcagtcttaaatccgtcaagcttttcgcccactggatatgcgcgaataacctaataatggaagaattctcaaattgcgagaaagctctgcattagtgcatacgaatgcgacatagtctttatcggcccatctcttcgatgttcttgatgacctgggactggagtggatattcttggtgatattgccggcgcgtttatagtgttcaattatcctaggataaaatgtgtattactattctgtagtcatatgtgggaatcaaaacacaatgtacatggcaatgataacgggaaatcgttaaatcgatctaagtcaacactgagctaaaaggggttttaaagttaaaactttcccttaacacccgnggttggtggtaagatggacccaatttatat

SEQ ID NO: 12407 - DNA, 103 bp, Emericella nidulans
  unsure (1)..(103): unsure at all n locations
ttctcgaaggacngcagcaagtggctctgagtagaggaacgtcttatgagagcaatcatggtggtagttgttgtggagatcgagacgtgngaatttcgacggt

SEQ ID NO: 12408 - DNA, 444 bp, Emericella nidulans
agggacgtagactctgtaattaatcaacttgcttcacgcaccttttttatcaaccccactggcgacatactgcgggggggcgtttttacagtcatccgcgggttcagacccaaggggaccacactttagggccgaatcgaacgtgacaagacatgcgaaacatacacactaccaagagcgcaaccgagacaagggcagcactatcagggaacctcaatccacaaagcctaaccgttgcagacaagatccaggctagtgaactgacggtcaaggcatagccagatctccgccgtcaccggtcagagtacccctttacaggacgaatagcggttcttcctaagactcacatacttggatccgaccgatccagagcagcgcagaacacccgagtcccattccacgtggccctatagccaactcactgcttgcataccttgaacaaag

SEQ ID NO: 12409 - DNA, 399 bp, Emericella nidulans
ctggcatacagatcgctttccgcaagtgtgattatgtggtagcgcgcgacaggaaagggtgatttctggcgattgacaacgccgaccagagacggagcacattgtcaagtgccatcacgagacaaggtgtggcctataagctgttgaagggcggaatggagcgagcgcccagtggctaaatatgagcgcgccacagcggcatgtgtaggggacatcctcaaaacatatgactggccccgtacgcgcaaccaggctgcacagctgacgagcactcctgaagggaaaatgtggcaccacagtgagatgtataagcgctcagggatctggcgagaggtgccagcattgtgaccacacaggagcgacccaaacgaaagaccctaccaaggccgacctgaagaa

SEQ ID NO: 12410 - DNA, 782 bp, Emericella nidulans
  unsure (1)..(782): unsure at all n locations
acccccaggcagatgaacacagactgggctgtggactacggctgcgacggctcttgctactaccagcgtgaacaccggctgggtagtgttatcggggacgcggcgaggttggacaccactacacgaaggataggaatcttataacatggaaatagcggaccagacgccagtagaaacctttgagctggccagagttgggctctactaataggtgacccgggagctgaacccgcctgatcactatgtggggagttcggggctatatccgtgagataagctcactcattatacacactataacagcgattacagttgatcagcgtgtctagaccttcggagctgatgaaggggaactgatgactgatgttgccacccatgttgaccgaatccgcaaaggctgataagtacgggatcttacatgcatgaacagcctatgtgtggaactcgcactgctcaagngtcgacacggttttcacgtaacaagaagcgtaagatcgtaggaacaagctgatcagctgaggtttgcgggtagtggaagtcatttgctagatcagaaagccagagtacaactctacacactacagacgatcgaccatgcaggtggccaacgtctgtcgaccgagggatttttttttgaggcagaaacagctttcctgggatccaaggttgccgagacacgcatatcgccgtattcgaggtaagtcaaactccagttgaggctacatacatagccgaaaagcctccaagtaatggcctatttgcgaatggccttttcaccaaaa

SEQ ID NO: 12411 - DNA, 529 bp, Emericella nidulans
ggagaagatcatggaccaggatagctctatcctctgagctgactgtgtatgactcggtgagatacgatgaaatggagggcgaagacaacacctgataggcacgagcaggtttttatgcctgcatggggacacaacgttgaggtaagaacctacaccatacagggaatgatcatagtctgagacattggggagcgatctggcgagccgacttaggataggaggtacgaactttatatgctcatgcaggcacatttatgagatggatggcaggcacagatttatcgacagtgtacacgctttagctggagtgagggatcggttctggaccggaaagagaggtgcatgagctgtatataaagcgcatagcaaagccggtgctacgattgatgtgagcaagcccggtggaccgggatgctattatcatagggagaattttctatgaccggatttaagtgacagaacgttcgtatttagcatggccgactatggtgacagtcgctagggggatccctatcattgacagctggcg

SEQ ID NO: 12412 - DNA, 1825 bp, Emericella nidulans
cccccacacgatcctgaagttcatctatcccatggcagttcccagaaaagggctaacgagctgtcattcatagggcttggagcgtcaccggtctcaaacacttgagcgaagcagtgtactcggcggatccacacgtcatccacgtctagatcgtgactatgatcgtgaccgtgatgccaatgcgaggtccatctcattgtgtccgcataacaccaacgcggtatcctatacggtgtcaccttcggcgtcgacatcgactaccttctcgagcccgagccgtcgtcagtcgacccggtatcgaccctgggagaagctgtggtccgttgatctggattatcggctggaaagcgggaattgatggttctgattttctatcctgccgatatctatgttcagctgttcggcttgcaccatacttccatgcatctgtttcagtgtggtcgcgagtatgttgattgccaggttggtgctggagtgaaatgactgtgaacggtttgctgtatactgggaatttagcatgggccgcaattttcggctggtcctatcttgttctgtcatctctctacatgatacccatcgtccttagtatgatgttcgaatagccatgttttatgcttcgtgtcttatatgtcctttacctagatcgtatgttccgtcgcgcatgtttgatgtattgtcatgagtttagattgagaataaccaagtattgctagcgaaccttaatctatagtggccgtgtattctccaacgcccggacatagaagcctgcacacagaacgccggcatgtaaccaactccaccctcaagctccttagataaaagaaaacgccgcttatccgacaaacgaacaaaaatagattaatccaattgatcctcagactcctccccatccgcgtccccaaagccctccatccctccaacctcctgccaaaaccgcgtaaaatccaccccagcatcttcaaacagctgcttagcctgcagcattgctcttgcctgtctttccggggtgaatccgcccggctgcgtactctcatactgaatcagctcgacccaccggaagaagagctcctcgtgacccatttctgttagtttatccttgaaggcaaggatctggtcacgctgttttgagcgcgtgcgaccttcttctgtgttttcgtcaccaacgtgccagattatccacccatcattgtctgtgttaacgaggacagctgttcggaattcgtccatgggtacttggttagggttgttggtgctgctggtaagctcgtgagctttgatcatggcctcatagtcgaggtcccagtctgcgtcgatgagaaggtagcctgtcttagcgaggcggtcaggcgtcacggctgcgacaatcttgtcgcgcatttcttcgtcttcgccgatccagcggttccgctccagggttgcgctgagcgcagactggctgcggcggacgatgatttctgcgttgcggaagccaacgcggcgccgccattggaaagggcctttgcagaattggagtggccacgggaggaacgtcacgacgaggaagtagtcgaataggactgggagagcgcggcggagaataagcgtggctagctcggtgaaggagagtgaggaggtgtcgagatttgcggaatcggtaaggccaagaacggtcgcgagaagttcgggatacatagttcgaccgacgtaaacacggtaggcaatgagggctacaatcagggcgttggtcacggctgggatgatgaacgcctgcttcttaaggtcgagggccgaagagtcgatgtggaggaggtaaacctcctttggagagaggagtttgaggaatggc

SEQ ID NO: 12413 - DNA, 554 bp, Emericella nidulans
  unsure (1)..(554): unsure at all n locations
acaggaaaagcggcccaacccgcaaaccccgagcattttaaaacccccacgagaaaaagcccaaaggggggcccgcaagccacacaaaggggcaacacccccggaacccgcaaaacggccaagacccccccagaccaccgagggaagcaggcaaccgcgccccaccaagggcaggacacgggacaaaggcacccaatgcacggtaaacgccaccctaccaccaacagaaaaaaaaaagcccccgcacccaacaaaaaacaaaaaaccccccggggggactaaccctagaaaacacctcccgaaacaaacaaacacaaaaacgagagagcgcaccaaccacacagcaaaaaaaaaagcaccccaaaacaaaaaaagtaacaacacaagactaaggcccccaacccccccaaaaaaaaaaagggccgaagacaaaaacggccacaacgggaaagaaaaaaaaaaaaaaacccccccgggcccctataggcgggccggccagaggaagaaaccgggggaggcccccaaccaaacaagngggtgttttaaacccaaac

SEQ ID NO: 12414 - DNA, 1134 bp, Emericella nidulans
gtcttcatgatgcatcaagagtcaaacagcgttgttgtcgttgccgatattaagacacttatcgattatgtctccgttggtccccgattcagcaacagcgtcctacagacattgaaggtcttgttcaaaaaacgccccccaaagaaccgaagacttcttatcttggctaccacaagtgagcgagcactcatgaaagagctgaacatttataactcgttcaactccgatatcgatattccaaatgtcaccagccatgaagaactgagacatgtcatggaaaaatctgaggtgtttgcgagcgagcaggtagcggaggctttggaacgcatcgatcctctcaagggagagacaccatacagcatgacttttggtgttgggatcaagaaggtcttcgatgggatcgagcttgcgaagaagacgccggaccagctggtgaatcagttcgtgcgcttcatcaacagtgcagtacaagaaggaggattgactactagaagggcagtttagtcggcgcttagaggtctctaagggtcattatgagctccatatgctttgtctatgctagttttttcctattagaagattattctttagacgtgcctaacaagatcttgctatagagtactattggcaaaggttctctattgaacctgaaattcgcccacttagctcatatgtgtcaacatatgtataaagtgccagtttaaaaggcatgcgtgattttccagcttttttgcggaagtgttactgcctaggtagtccgaacgggtccggtgtagcaagctttcagggctctctattctactttctaacacgtctcctgcctgtcttaacgttctggcatccagtttgactcctattattacatcgcccctcccctcataatatgtattaatgtgttgcccactacgaccagttgcattaggcccgaaaaggccccacacagactgacccatgccgacagaatgtcacctatttagggaacagccccaccgaatgccctggaaatgcctcaatcgagaatacgagaccaaggctgtaactctggcaaacggacttaggcgaacgaaggttacctcttaagttcatttataaataccccgggggtgcggaccccccttttttgggggggggtcc

SEQ ID NO: 12415 - DNA, 522 bp, Emericella nidulans
tgttagctagataatccatccttgaaaattccgaacaccgccgtgaggcctgggaagaactggttaccgccatccttcttgagtagttccagcaacttgctgaataaaggtttcactccagtaaggtacctgggaaaatcagtcaaatttaggagcttttaagcggttggtaacgtacgattgccagtttttccccgggctcatcaaatatcttgtaaagggtaagaattgtagaagctgctagcaagttttcggctgttttccaggctacatcactggtgtgtgaggtttgttcgctttgctttaattggaaattgagccagcggttaacgacggagatcggtggttcgagaacatctgacgtggacacgggccggtagtctggccagggattggttatatgggagacaggcaggatagtataattggcgggtttaagggccaggccacttgggaggggttggattagaattcatgtgtaccggtgacgtaattaaacggcgcccgttgccatttggcact

SEQ ID NO: 12416 - DNA, 601 bp, Emericella nidulans
tgtaaggagttaagagtccgttaacgggccagacgccgctagttgttgcggccggaggtgttaatgatgggcggagcttggcggcggcgttgacattaggtgcgtctggtgtgtgggtgggtacgaggttcctggcgacggaagagagcggcgcgagtaagttgcataagcaggctgttatcaatgcgcagtatggtgagacgaagagaacgcttgtggtgtctggaaggccactgcggttgctgccgaatgattatatcaaggagtgggagaagaagcctgaggagatcgcgaggttgacgtctcagggaattgtgccgatggaacatgatttcaacaatgacataggaagtcgatctgccgttcctgatgggtgatgtctcgggcatcattaaggatattaagcctgctggagtggtcttgaaggaatgggttgagcaggcggcggatgtgctgaagcggactgctgctcttgttcaggtcctgcgacaagctgtgatgaactgtcagtttggtcggaacgtgtctttcatcttgggttcaggtcttctattcatatggatactgatatataagcaagctatggtcacataaatagagc

SEQ ID NO: 12417 - DNA, 165 bp, Emericella nidulans
aacatccttctctcctactttcattcacctctcgctgcgttcgtcatctgtcccctttccccaaattcctcctgagagctttcgtccttatcgtcctagtcccgcttgctctccttctcgcgccccccccgttctggtgttcatgccgtgtcgccgcgtcatgaa

SEQ ID NO: 12418 - DNA, 666 bp, Emericella nidulans
aagtcactttcgcaccgtccgtaacgacccaccgccaactgtgaggatgagatctgccgaacagactcgtgcgtcttccgtgatctcaaggacttcagaccaaagcgtatggctcttcatgccaatccgtcggccaacaatcgcgacatcgactctcccaagcgcctgggcaagcctgtcgagcgagtcggttgtcttggccagcgatccggagcaaatgacatagacgcgcttggcgttgaaagtgtcgacaacatggcgggagacggcttcaggaaatgggaggccgtaggaaaggagcgggcgaggccggtcagcaaaggcagggcggaaggtctccattgtatggttgtagttgctgagatgcgcgtttcgagcctatggtggccgagatgacctcaccttaagtaaactacagtaatactgccagtaatgtggggatgtggggctcatggagaattgaaccgtgtatgaggtaggagcagatccgatatactactggcacatacggcgggcaacatacgacgaaagttgctagaagagataaagccttgtatcttgtgtaactcagattctacaaatgtcaagcaatgagcctaaacctgagacgccggtttattgccctacttataacgcatgcattctgctgttcatcgttctgagcgg

SEQ ID NO: 12419 - DNA, 3130 bp, Emericella nidulans
gacccataattatacaagtggcttactctggaatcgttgggacaaaagctcgatctttttatcgatgtgatcgtcgttgtggccagtctaaacagatcagcatcgtagtgttagcatgctaggatctgactcacctgctcatcccacgcggcctgccatctctttctctcctgctccatgcgctcgtccatctcggcccaacattcttctcgcacctcctgctcaatgaggaggcatctttcttcactaacgatgagtgcggtctctgtctcggcccgcaatacctcctcttctgtcagccgtaagctaagcctctcgttctctgccgtaagtcgctcgatgtcggccaaagccttttcaaggtcttcggccaaatcaagctgtggagtatggcggccaccagatccctttcgggatccaagtgtgcttgccaatattgactcagcagatgtagctcgagggacggtgacctcgcgagcgagtgctgaatatcgcagaatttgtgacgtggccccgctagtcacccaacggatcagcagtcacaatcataatagccttttgtgggttcctatgcatgcttgatgtttgatgtgatgggaaagagttcgttaataggagttcagtaagcttgcattgtctgtaaggaaccatagcagtcttatccgtgttagttatgtcccagaataaggcccggaaaaacgtaccttatttccgtcctggataccactctgcatttgcagacattgtcccaagtacatcagactctcgttaatcttgcccgcctctaccagagtggagcctgcggtctttgcagtccttgctcgctccgatcctgctggagttagcttaggctaaaagttaagcagctgtacactaaccggcaagatccgcaattgtgagagtgtttcctatccaagtctcctcacccgtccgcttgtttcgcattcttcgtttgacttcgaggcagaagaagccatggctacgggaactgacactattagcgccagttccagtgacctttcgctcagtaaggccgatctcaaggactgccaacgcttcttcataagtgctacaggcgatttttcgaaggcctgccacaacctttcggtcaggggatccctcggttgacttgaagtacaaaggctttctcctgtctttctgagatgatgtcccttggcgagacatagcacttccttggccgggcacgattgctggtgatagaagatcaaatatccggtcattgtacacctcatacattgacacaagaacaatgtactcggagtgggggttcaattcgagtgtgagatggccgacatctggtgatcggggcagcgtgctagttcttatgggtgcgtggcggcgagggaatatgagagcaggcatggggtccttcagtgagccgaaattagcttcctgcaaatcgaaggtgttatactggttaatgatgggaggtgatggggatttagggctgtccaaagcttttgcttgaggcataaagacgtttgggaattgaacgccggtccatgctagcgatgccggtttgtagatatatggggacaaattccaagaactggggtataacccgggggcggcccggagtgggtttgggaggggtgaattgcataccgccattggggtgtgagctctggtgttgctcataggcgtctgggccctggaattcctgccgcggtcggactcgccatatactgcctcgaggaacgtctgagctgtgaacatctgagattccgaggcgtcggaagctgatacggatgctaaaagatatggagggatcgaattgtcgggcggcttaatagtagaggctaaagacttgaatatcacatccaagctcatctgagtgattcccctctgtgtctttgagcctagaatcgtatggctctacgaacatcagcactgtcagcatttgaggtgtgtttttctttcgcaccttgccgcttcctgtcacccctagtgttgcaaccaatccatctctctgctctagtaaaacacctctgatcagagactggaggccggtatcttcgaagacattgagctgcgatgcccactcgtcaaacacctgcgtgaagccgaatctctccaccccacgctttcgagcgtcactgggcggctgtaaagtgatatgggtcggaactgagactgagctggatacatcgttgttcgaatgtgaggtattcgatttctcaacggtcaggcagcgttcgggctgatcgtcttgctgtgagattggtggtcgaagccgcaggtacacctggaacagggacgacggcgaattcgatgccattgctgcaggaccctcgtgttggccgcggcgtcagtacaggagccgatgcaggagggtggtggattcgatgaactggctatgcaaggatggtggatgtcgattgaataatggtcaataaatgcagctggccatcaactctgggacgggcggagctttggtttgtcttcatttgggttagcgcagtgttggcccgacaacgagccgtgaggctaggaagcttgtttctgcctgaaatctgtggcgatgcattaaggccacatgatcgtctgtactctctgtcctcgcctgcgcctcgctcgtatccgccatgttggggcagaccatactcaattgagaaatacgagtgcttcaaccatggacaagcatcatttgacaatcgtggagccatggatgctgtggcgtccaaccttagccctccaggcgctcagctgcctctgccagccagctagtgcccgggcgtgctatacgagcttgccaattcgggtatctcgttctcgctaccatgagactgactcatgtcgttgattacggcttcagcagctgggaactaatttatatagggttgagaggatctcagaatgaacttcatgaaattagcttgcaagcttcgtgtcttgttgcacagagtatcaccaacgagcgtttgccttatacttccaacataatcttgaaaaatcataacctcgaggaaatgtttgacaagagggatccatacagtatgtcgtgtgtctctgcttccttgtctctactgacatttatcagaggaggggagcatttggttttatgctccaacaaaggcgcgcctatagcattcgcaatcctctttgcgat

SEQ ID NO: 12420 - DNA, 502 bp, Emericella nidulans
gtggtaaggtgtccttgctaacgacatccgacggtcacccccttctcagccagctctgtggacggagatacttaatgcatgaagtggggacacagctacctatgcttatcacactgataacgaggcctatgagctgctatgactatacacacgtacatatgactacaatctgtcatactcacatggacagcaccgcatgtatatacgatctctatcgcaagatacccaaactgcaccgcctgagtttccactcccgcagatgcggcgggcagctccaagaccagactcctaagaaacatggcgactcaatggaaagaataaacatagctcgcgagatctcatgatactgttatacaaaggccataaactttatattgcttatctacttacagatcatgagaatgccaaccaaagcggcctacagctgtatctacggaataacgggaacttcatacgctgtctcccacgaaagaggaatctgaacttgcctctcactatttat

SEQ ID NO: 12421 - DNA, 486 bp, Emericella nidulans
gccatttaagctagtcaccctctgatccgagaaccatctgtgcctgaatcgctagtggctcgtgtattattcagagatgtctacaatgatcttacaggaagatatatatgccttgcggggcgggaaaaggaaccacatctagatgcttaactagactgaacacaagctcggcgtgggtagcaataaggcgtcccatcctgaggagggacccatggcttgcatgatactgtgctctcttacactgtgagatttgagcatattgaacatcacgtctctaaggtaatcactttcttatacaagtagatccatgatgcactgtacatcgcgattccaagagcaaacaacgatctccacctgaatattcttagctcttcgagatattaaaaccacgtgagccgatactatacttctccatggcacttgttaagcttgacctgccagacgcatagcttggggaacttatgcatgacaaagacggctgcgatg

SEQ ID NO: 12422 - DNA, 4422 bp, Emericella nidulans
cctgtatatccaagcgacgagtgatgatatgcatctctatctggctgcccctcagtagcagaggtaccggtttccatatactctagcgctttttttatgattctgcgtacagcagagcctcataggtaatttctcacaatggcaactacgccaaactacaggtgtctgtaaatataaacgttgagcagataaaagaagctcgcttattcttgtaagaacttcgtgttcgtgccacctcctgccccatctcgtctacgaaaaaggcatcccatcgtcgccaatgcccaagatatatgtgaggcgcagtttgcgcaaccatttcatctcaatcacatggcaagactcaccctgtgcggagcctcatatacaagaatgcaaattgcggcgacaacttaaaattcgtaagtaggaatgatgaaatgaagagactgcctaggatggaattagctagtcttaaagaccaactcgcgatatcaattggttcgttcagcttcgctcctctggtaacattaagggtatgtgtcatcgtcgatttaatgataagaaataggctgtcgtcgacaagtcagggctcgtacactgacgcagataaacaaagagattgtaagtgtgttccgaagactcatatgttgatcctacaactgtcgtagttatcgtctgagactgtcaagccttgcttggaggtcgtcatcgtcacttgcgccgccggcaccaccagcaccaatcgcttgagccacccggccctcactgaccgactctttctgtatccccgatggagtctctcccagctgtttcaacgatgcattagtacgatccatgtctacgtaaaccagcaggagaatacgaaccgcctggctgagatccaccccaatttcatccaaaacttccttgacaatgtcttcgccttcttcttcctctccctctatcccagttgcttcgtcaattgcgtcatccatcatctcctgtcgttggtccattatgtcgttctctcgctcgaactccatcgcaatccgctgtagcgctgggaggttcatctgccgattcatgctccccagtaacatggtcgcacctttcatcgactgcatcatctgttcgttgcttctaacggtctatatcacgctcacataagcttctgccaggcgtcaggggtggaaaacatcatacttgaatgcgcagggagatagcctgtagttgtgttcgcatttgatagaacttttggatatatctgtgtaccgaattgaaaataacatcagcaatttggcggccaaactacgagcaagaaatcagggtgagataccttcgcgtgcgtaccaggtctttggcctgaattttgcaggccccaatctgtccattctttgcgctcttcttaatatcctgtatgagtttcttttcctggttttccagctttgttcgttctctatcaagttcgcgttgtgtcctgtcaagcgcccgctggtgcttgcggagacgctctgcaggcgtcatccgctttccaaaagcccattcgacgatctgaggtatagttttagctataattttcagcagacagaagcatgcagaactcacattcatattggcaccaaggagaaactgataaggtggaccggaagcgtggggtatgcaatgcggcagaaacatagacccggcgactgcggtgacatcaggctccagacatgtatgtaacggcgatacggccggctttacggggggtcacatggcagccaccataccattttgagacatgatttttcccgcgccgagagaaatcacatcaccttatcctcatcccagattcatttcaactcgagctttatgcgattcgcgcttttaccgtcatgagtcaggagtattttcccggcaagggcggctcctctgccggtgagggatcgtccaggaatccactggatgagaaacctgaagaaagtccatttgccccccgactcccaccttcttatatgacagttggaaatggctcgacttccgagagcgcaacggccttaatgaactcgttgcacgcagactcggggtatggtggcagtgttgcagatggtgaatctggtgcatcttggagatccgacctgatggtggataggccgacacctgcgcatactcctacgcatcctggacagtggaatcccgctgctgagcacgagaagcaaattgttgctagccatgtccaccagctattatagtgcgttatccctgtgagatcgcagcttgtagcctctttcagcatgctaattacagaatagtaattccaatcggaccaagcttgcgcgtgcgatttcccggaccatcgagacattgaaggagcttcaggatatgaaccgccaatggcccgcccactacccctctgtacagaaccttccggactcgccttcggaccgtccgtcgttacagcagagccagtcgttttttggagacgccgctgcacacaatgatggtttggcccggcctgggagcttgagacgtgctgccactatgcctacaaacgaggaacttgcagaatcgagcgccaccgccgaacgccgagccccgccagaaccaagattgatgagcccgcagattgcgcaagaattctcgattttgaagctggacttgaagttgggagctttgtcgcaagctgaactggtacattctcttgaaaagtcgtcgattgcgtcgctactggatgggaagatcgggcaaagtatcaagcatcttctttcactgcgagacaggattgaagatacctccagcaaggtgctcatcactggagacttgaacgcaggaaagtcaacgttctgtaatgctttgcttcgtcgcaaggtactacccgaagaccagcagccctgtacgagcattttctgcgaagtcctcgatgctcgggaaaatggtgggctcgaggaagtgcatgccgtgcacaaggaccgacaatacaaccgcaatgatgagactacctatgacgtctatgcgctaagtgaactcgagaatatcgttatcgataacacaaagtatatgcagtgcaaggtttacgtgaaggatgtacggaccatcgatgaatccttgttaaacaacggcgtggtcgacattgctctgattgacgcaccgggtcttaactcggattctctgaagaccacggccgtctttgctcgccaagaggaaattgatgtggtggtctttgtcgtttcggctgccaaccactttactctctcggcccaggacttcatttggaacgctgcgcacgaaaaggcttacatgtttatggttgtcaacgggttcgatcagatccgcgacaagcagaggtgtcagcgcatgatcttggatcagattaagaagttgagtccgcgtacatataaggaagctgctgaactcgtgcatttcgtatcgagcaatgctgtccctgttgcgccgcagattcctgttgcaggtcccggtggaggtggcggtggcggtggcgggggatccgatcccaatgggaatgattggccgagcggtgacgacgatgaggacaaacctgaggataagaagggtaaaggtaaagagaaagaaaaagagaagatacaagattttgagaaccttgagagttcattgcgccggtttgtgctcgagaaacggtcacgctcaaaactagctcctgcccggacctatcttcttaacttgctcgcagatattaatgctttggctgctgtcaatcgcgacgtcgcagacaaggaacttcagaatgtgatgaaagagttggcagatcttgagcctgcgtacgagaatggcaaaaagaagaagattcagctacaggaagaagtcgacaagtgcatcgacgactcgtgtgaagacgtttacaagcatacacgaacgactttgacttccgcaattgcgaatgtctccgaggccaacctaggtgttgagtaccctggtatcttctctgcattccaatacgctgaagacttgaaattcgccatgttagaacacatctccgcctcagtggctggatgtgaggattatgcacgtacgaagacggcacagggcgttggtttcatccagaaccttggcctgttacatattggagaagacaagtttactgcgccgactttccgcgccgatctaatgttccgtcgcggacgtcgccatgcacttgcgcgacaggtcgacacagaggtggagctcttggattttttcgatatcacaggcctctgggagcggcaagaaaagctcgcgggaacaggcatggctatgacagccgtgactgtccttggtggcagggcatttggtggtatcagctggctggacagcgccttcagtgccgcaaaattcctgggcccaaaccacatgcggcgtctcctcctccctggtattgtcgctgctggtaagtttactttttgtctgttcgttatcattgttagctaacttgcccagctgccattaccgtggcctatgtgctctctt

SEQ ID NO: 12423 - DNA, 1425 bp, Emericella nidulans
atgtctcattcctggaaaccatacacagttgcatgttctattataactactcgaccggaccgtgtacggctcacgaatctaggacgccactctcttttaagcccttccaaagttccggctccaaaaacttgcttacggtcacgtcctcagccagacctttccgcctccttgtcttcaaaacaaagtcgcgtgccgtcgccattgcgggtgccatctccagcggttttagcttgacatcacggtccagtgggtctccgggcacaacgctccacttatcaaagacaaggctgactgcagcttgtccttgtgtatggattcgaagatctgtctcaaagccaaaagaatctatgactggaattagaccgcgaaccgagtacaggggagttcccgcaatgggtccatctgaaaggacatggcctctcctccgtgacagcacggtatagacggatgcaacagcatctgcaggtcctgtcatcgagcaagaatagagcggctccattaggcgaggggaggccatcaagaacgatgagtagacagcacgtctggctgtgggaattatctgaccaccgcccctgtaaatggcttgatcagccagggaaacatccgtgagcctgaatttcgcattccgaatcgctgtgtaatgaacaagttagctaggatgagataacagtattagaatacgtacgctcttcacacaaaggaccttcccgggtaccccaactgaagccctgtgttatagaatctctgacgcttccaagtagcttcttatcgacttgagaaggtaatgtatcatcttgtaagatgttcggtcccagttcatctggaccaaatgcccatatacttctcgcagcaagtttatcacagtcatatttttcttcgaagaaccgggccacatttccggattgggtctttgatgctaactttaccagtctcgatatcctcagctatcccatcgtctagcggctcggcgatcatcgtgatcttattcaacttgtttggagttattgaatagcacatgattgcagacgtctccacaactgtttcgcagaaacgagtaacagggtcggacaccttgatctccatctcggagaacaatctccggaggtcgtgaagcacgcagtccatatagagctctcctgtccctaggactatatgctccccggattcctccacttttgtcgagattagaggataacttttattcactttgcggagaccctcaagcattttgggaagttcggacgggttgacgggttcaactgcgactttgaagacagattcggtcatgtggcgtataggtctaaaaatatgcgcctcctcattgtcttcaaacttcgtggctaccaccgtcgctgtcttgacgatagaattatccacgcctccgagaagaactaagttccctgcggtgacgcaactagtcggggg

SEQ ID NO: 12424 - DNA, 532 bp, Emericella nidulans
ctcgggagagatgatcgtgcatcgggatcgttagggagcttgcagggggtacagacttattactgggtgaagattgggtccgatgaacacgcgtgcttgctgcgtgggtggcgaacttcaatgtgttgataacgcatggctagggctggaggcttgcacgaccatatcgcagctttggacgacagcccgtttgtcattgcgacattgagttcagcggtgcccacagcgcgatctactggtcggtgatgcacacctatgggttgaagttcgcatggacgcgagtactactaacttcgatcctgtatgtgagcgcaattcatgcagatgtcttaaatcgcctggcgactccaccacatggagaaaacctccaaccctatgctgggctatttggaccagattctgatgtatcgtgcgactatcgtgcattgtactttgatcgaaagccactatagctgtaaacgcaatgctccgcaagacatgccattgccgacgcttgaacaggcgcatgtatatgcaaacgaaggcccactgg

SEQ ID NO: 12425 - DNA, 103 bp, Emericella nidulans
gcatgggatgaagcgattactcagagagagtagatagtgtttcttatcactatgatttcaaaatacatgttagactctgttcaagcccggagagtaccagttg

SEQ ID NO: 12426 - DNA, 201 bp, Emericella nidulans
ggacaaaccacaaagcaaacgaagagatgacaaaaccagacaaagaagaaacaaacccaaaaaaaaaacaaaaaaagcacgaaacgaaaaaaaccaagcgaaaaaagcacaccaaaacagacaaagcagaaccaaaaagagaaaccaccaaaagaaatgccaagaacacaaccccaaaaagacaaaggacccccaaacaaa

SEQ ID NO: 12427 - DNA, 145 bp, Emericella nidulans
gctataagggatataaacaagctaaatagcagctctggttaaggatgccactgtcaaacacggcacacggccacacatacgcatcaaatccgcacgtaaactttcgcgacaatgcgcataaatcgacactccgcatctactgaaa

SEQ ID NO: 12428 - DNA, 109 bp, Emericella nidulans
  unsure (1)..(109): unsure at all n locations
ccagtgtgaactaaagccacacacagttcagaagataaatgcagccttntcagcaacggcacgcgtactctcatacgctcacatcacacgctattaatacagcgagcgc

SEQ ID NO: 12429 - DNA, 133 bp, Emericella nidulans
accgccgcacaccgctcttgtgatccgttgcactcctactcatcacttagcagaccagtaatctaacctcttgcactgcccgttctcccttagggcttgggctttctccatggactccagcacactggcggcc

SEQ ID NO: 12430 - DNA, 485 bp, Emericella nidulans
  unsure (1)..(485): unsure at all n locations
ctagtagaacgataccagagagaactcttatagtacatgcacctgataccatttccaatgcaaagctaactgactgctggctgctgacagaagagatggaacaaagaggactccgaacagacacaaaacagttgttaccactaactagcgcttgacaacactggtccgactgtgaatgacctaggatgatcaacattaatgtacacttacgaccgcattaaccgcatcatacatcaatacgacatggctgaaactgctttacaccacatagcatagtcatcgcttgactgtataacactgatcaccatgccattccttttgataaaacgaactaacatggagctttacggataggcatcagaaagaccctgtcgctgntgcactacaccgatcaggaacacacagctccaactcatacagctcaacacaaaaaccgtggctcactccatagtgcatttgctcaggactatcatattcacctgtgt

SEQ ID NO: 12431 - DNA, 1884 bp, Emericella nidulans
  unsure (1)..(1884): unsure at all n locations
tgaaaaagataacggtgctattccaggcagccagactgagctcgagtctgctcttcctcccgtcgaagctgataccaaagcaatagaggagtatgagttctcacagaaatccggggacgacgaggaaaaggagttgtctttacaagtgagaatgcgggacggcaaatggcggaagggaaagagttcgatatatgtcgatgcgttcaatcttgctctggacacagttttagctgaggaagcgcatcttttcagtaaagctgagaaagaggtctttcagcattggcgggagttgtcgtatgagtcgcagtatctgtacgtccctgagatcctcgctatgttgctcttggagactaagggtaaaagtgtgactgactggtcagatatgtccgcctctttttgcgcaagacctctgcgtggcatcgagtcaataaattggcctactactcagatattgttgatgtgccgcaagttgtagccgatttgcagaagactagagaattgtctagctctggggcttcaaacgaacagaatacgtcagacacatactcctcatctgatataggtctgactggcgatttccgctttgccaatacagtagatgagattactactgtggaggaagcggcgtcactactacttcttgatgaactcaagattctcgcgaaggaggctaaggtgcagggaaagtctaagcaagagctgataactgctttgcacaagtcaagccagaaacagacagggcttgagtggaatcctctaaataactcaaaccggaaagagcattttgtcaagaagattttaaactacacgggagattgtatacggctggcccccggccctcatgcactctttgagcgagtacatctcgtcttctaccgatccacggagtgacggagaaatccctcaccaccattatccttgcgaagatttcacgcaggaattttcccgaatacgtcgtctgccgctcaggctcaatctttccatcaagagagattctcttagagtttgaatcggctttgcggactcagtacaagatagacaacttcctcgaattcagcggaacaccgacgaaaagccggctacaggagatcaaagacctggcatatgaaatctatccccgatggaagatgcttctcgagcaggagcaacaaaaggaagatactagctacgagtgtggagagggcgcataccttcgccgcttttcgccggcttgggtgtacactaggatcttgcacaagggactcctccctcttggtcgtttcaaagagcataaagaggagcataaaatgttgtctgagctacttgcccagcggctattccatcccgccagacgcggcgcttggtaccaacgcagagctctcttggaagagcactacatgtggagcctgacaccgtttgaagggcgcaacgaagaagcccagaagaaacactggaagcgcatcgccctgcgcacatgcgaggaaggccttgaggatccattatgccaattaatttaccatcacgacttgcagaagcggatccagaagctagaaaaggcgctcaaaatcgtcaaacgggagcagcacgattttgggcacgttgcgcttagcaagccagaagagcgtatagttgagggtatccaaatcgaacgagaaaattccccagttcggaccccaacattcatcatggaccacaacgaggacgctctcactccaccacccaaacgcagcggacctaccatctggatcgacgaacatggagatggagcagaatgcgcgtcgaagccatgtgcctcagttggtaccgagaccatggctggaagggatatcactctgagggtggtattttcngcacctagtaagcgtctttttctacataacgtaccatatatcacctatcaagact

SEQ ID NO: 12432 - DNA, 984 bp, Emericella nidulans
  unsure (1)..(984): unsure at all n locations
taataccgagcgttcaaaacggttggggattttttgcagcgaaccttccattgtatcttcgaccacggctaccggtgcggcgtcataatccggcaacaaaatatcctgtggacgcagctcataaccgtacagctgtgtcagtgcgcgatagatagcgttctttaactgccgcacatttcccggccacgcataacgcgtaagtacagtattcaggtcagcggccagtttcggacgcggcacgccctgctcgtcggcaaagcgggcgacgaacagctcagttaacggcatgatgtcctgcggacagtcacgtagcggcggcagattgagcgtcaacacgttcagacgataatagagatcttcacggaacatgcctttttgcaccagttcgaccagattcttatgcgtagcgcaaatcacccgcacatcgacatgcacctcatggtcttcgccaacccgacggaaagtgccatcattaaggaaacgcagtaatttcgcctgcatccgtggtgacatttcccctatttcatccaacagcaccgaaccaccgttcggctgctgaaagaatccttcttcctttcggagatgaccaacagtcactttgaacgattttccgtttagacccagttcaacgccggtaggttgccgctttgggcttgctgtggaagcttggccaagaactacctgacctgggaccgaatagagcgggccttaaatgcagtttggctgtgcaacatcttatttgctgcggaaatgatgagctgcgctggcggaattgaatggggcaccatggttgaataccccccgggggggggttttttaaaaaaaggttcctacggatatccttaacagcttgtgggaagggggttttccaaaaaaaaaagataaaatgggtggggggggggatttgaaagaagtggttcttttttttaaattannnnnatgggggtggtattttgttttttaaataatccccccccccccccc

SEQ ID NO: 12433 - DNA, 118 bp, Emericella nidulans
gttcaccgtctaagcatattcatttatcaacatgcttgactcgaaacctagtccctgcatggatgacgagacaagatatctagataggatttgaagtcgcaggcctagttcaacagaa

SEQ ID NO: 12434 - DNA, 481 bp, Emericella nidulans
atccgtgctggacaaatgcaaatgcgacctgagggtcttgatcattctacggataccctgcaactccaggacggggataggggacccaacgaccagctcctgccggcaggtgttcgagacgatgagaccaccaaacggaagcgggcggggcaccgggggacgaaagcccccagcagacctgcagaccaccacaagcccgcccccactcgctgactgcagaacctcaccgacggcatacatagcacgaccttagacgccccacagctagcacacgcgatcatacaggtcgagcggggcccgccacgcccgcccgaagcaccacccttgctatgcaggcaaagaccaagcgaccctgacacacgaacagcgagcgaaactctgcaccaatcgcggggcataggccaacgcactgagcaggaccacccactgaccaggacaagcgcatgcatctcgccccagaaagatcgcaacactggcgacg

SEQ ID NO: 12435 - DNA, 3587 bp, Emericella nidulans
cgagggttacgtaaatggagttgataccttcgtttcctctaatgatgactctctccaagagtgcagaggcttaaatacccccttgggcctgagaaagtagcatcagtaggcgccgatctcaacaaggattcttagccattatacaagatgagatccttcactttctctctgagcctaagcctatgcctagctctatcccaaagcgctgtctccctcaccattgactcccaaccttcgctcctccaatttcgcactcctaaaatcaccgccgattcgttgcacaatgtgtacctcgacttcgccgactcctccttcgagggagacctgcatattgtctacgggaactgcgaaaaggcctcagtagacagtcatcaccattctctcggcactctctccatcaaacgagacgccctccctgagcgcatcgtctggatcacacccccggacgctcctcaccttcactgcctgcacgcctttcataacgagctcggtttgattgcccgctccgagcccatccccgttacctcgcccattgtccgccgcgagccactcgcaattgccgactacgccgacgcaatgggtccctggttcgatggcgtcgcatacctctccgcgcaagaaccgggcaagaccgccgtcgccagtgcaaagaactcttccattgccatcatcggcggtgggatgtctggtcttatgacctcactgctgctgtcttcagtgggcatgcacaactggcatatccacgaatcttcgcaccgcatcggcggcaggatccgcacgcagtacctgaacaacacgcgcccggatcagtaccagtaccaggaaatgggccctatgcggttcccagtgagtattacgtaccctgagcagaatgagaccctcgagatccaggaccataagatggtcttccagctgggcagggtcctcacggagatgaacgagaagacgcaccccgagctccgggtagactttatccccttcatccagaacagcgataacgtccccgcagctgctggggggaaccgcctctccaacggccggatcccgaccgctggcgaagtggcagcggacccggacctcgtctatacagccgccgggccgaacgaaacggtcgtggaagaggccgaggccgcatacagtgcatacatcgaccacgacggcctatccgcaaagaaagtggcagacaacattttccgcgcgcacaagacggccgtcgagcacgggctcttccactggtctgaggccggctacctccgctacgcactcgggtactccgacaatgtgaccgactacgtcgccggctcagggccggagagtcccatgtggggagatatttatgacaatgtctacttctctgcgaccgagttccgcacgattgacaagggccttgagtctttcccgcgcgcattctatccgcacgttgcgaacaagacgacctttggacgcaagatcacaggcctaaagtacaaccagacaacgtccaagatcgcggtcacctggcgcgacgatccactagctcaggttccaagcagtgaagattatgactacgcggtcgttgcggcgccatttagcaaggttcgattgtgggatctcccgcgttactcgagcctgctttcccgcgcaatcaatgagatgaactacagtccgagctgcaaactgtctctgctatatgagacgcgtttctgggagcaccagtcacagaatcctatcttcgggggttgcgggagtgtcgacgttccgggtgtcgggtcggtctgctatccgagtttcaacatgaacggcactgggcctggtgttgttctggcctcttacatctccggcacacaggcgaggtctgttggagctctgagcgatgaggattacgtgggaatcgtacagcgagcgatggtggaattccatggcccggttgccgcagaacagtttaccggtatgactggcgcccattagttttaccccctcgttcgaacaccgtccaagtattaacaggcttcgcaggtatatacaaccgtcaatgctgggagatggatgagcatcaggccggtgcatgggcgagtccgctcgtagggcaacaagatctgtttctgccggcttactacaacaccgagtttaagacaatcttcatcggcgagcatacgagctacacgcatgcctggatcttttctgcactggactctgccgttagaggaacgacgcagttacttttagatcttgggcttgtggacgaggcgaagcaaatcgtggaagagtggatgggccgttggattaagctgtagcacgtcattttgggctgagtgaagtgattaggtgaagcggggaggggattacgagagacgagctcatgtatatatggattagatgataatatgtaaatattctgggttggttgatatattaataatgggcgtgtaacatggttcaatagcctattgctaccggttatccaatcttgccctaaccaataggtgcccgaccgtcactatatattcgtagcttttttctaccatcccattctcctccctcatattggtctccacgtatgctagcaaccatgaaagcaatcagactacaccccaactcagacgagaaacacccctacagctccagcaacccggcgccagcatttgcgctccacctggacacgatcccgatccccaaacccggcgcttccggcgatctcttagtgcaaatcaaggcatcgaccataatccgcgacacactcacttggcctgagacatatgagcgagaatacatcacgccggggcacgacttttctgggatcgtcgccgaagtctacaacaaggaatccaaattccaagtcggcgatgaggtctttgggatgcttgccacggaccgtccggggagttgggcggagtatgccatcgtgctcgaaggagaggtcgcgctcaaaccatcaatcctgacgtgggaggtagccgctgctttgccactcagtgggatgacggcgtatgaagcgctatttgttcatgccggagtcgccgtacccggtgacgagcaagccctgcgcaactttagagaaagagctgatctccgtaatgaagagggcaaaaatgagcatggaaagagagtattgattaccggcgccgccggtgctgttggtatgtacgtggtacaacttgccagactcgcaggcctacatgttgtggcggcaaccagctcgaaccagcgaaatgccgagttcctgcgtggtcttggggcagacgagacgtgggagtacacagccctccagggtgatgctcaccggaatgcttacgacattgtcatagataccgttggcggacaacctctggtcaatgcctggggctgggtcagagatggcggaaacctggtctctgtcgactcgagcagcttcaattttgtcgaggagcatacgggccggggcattgcaagagatagggtcaaggctttattctttattgtcgaaggtagtcatcaagccctgaatgctctttcgcggtttgcggagctggagctcctgaaggtcttcgtgcttgatgattacccattggagaagacgagggaggcgtatgaaatagcgaatgggaggctgagcggaaaagggaagataa

SEQ ID NO: 12436 - DNA, 233 bp, Emericella nidulans
tgtggtcatgtgttggagatcagggtcagtcggcactctatatggttattctgacatcacaatgcgagcaattacgtcgcgagatgtgcgcatcacgactagtagacagcgatgtgttctagcgtcaagctgcggtggactgcatgggggtcaaacgacgctcggatggctttgagccgagtaatgtgctagcttggtccgctcagaggttgcagaggggcaatgacttacat

SEQ ID NO: 12437 - DNA, 118 bp, Emericella nidulans
aggaagatcgtatacaccaaataggcagttgtatatctcaatcacaaccacccgcaaagcagcatacaatgaagagcatcttcgacttgcatgagccggtttcaacaaagcaatcttt

SEQ ID NO: 12438 - DNA, 526 bp, Emericella nidulans
cgagacgtttgttgggggtggctctttggacgggacgcccacgtgtagatcagactgagatgatgggttttgacccaagcatataacgcttgatgaactgactgaccgggtggatgaacacaccggccgctaatggtctaatacacgaggctaaaccttgccggcagaattgatagcaatcactatcacttgggctggcagagccactgtcatcggtagacatgcggagggctacacggctgaccacagccagcgatgctcgccattgtactatgggtcgtggaatgggaggagacatctgtcgttgtgtgagcaatgtcggcgtgggcaggaccagatccgaacgggtggggtcggctggtgctgatgctgatggatctgactctgggaaccatgggtgaccagaggtaccaggttctgatgcacgtccgcaggcgatcaggggcgcctaacatatgcatctgcaacatgagcagtactgagggtcgacaccgtcacaagagacgtatagcatggactgtactat

SEQ ID NO: 12439 - DNA, 138 bp, Emericella nidulans
tattacttaatctcagtcaacctttcttgtacggtatggcacaggttatattttacattcatcgactcaagtctacctggaaaccgtccgattgtccgtctagcagtctgactcaccaatggctgtattcctacccac

SEQ ID NO: 12440 - DNA, 452 bp, Emericella nidulans
gcgcgtatcttgccatcccctcggggttcgtgccggagtctgaaaactgcccaggctgtgggcaacatatgctcgggatacaactcatcgcgggtaggcgccggcgccaatgaccttgatggaattgggggggcatccaaagcaccatcatgcccgacaacgctaggtttccgcacaacacacatattggttaactgttagaatgaaccaataaccaggctgagagcgtcgcacattgatgcagaacactttgcgggcatcaggccggatgcacaattttggccgaacaacggcggagccccctcaatactgtctctcacagactggaacgtctactaggagaaggacctggaggaaggccggcattctatagtcgacgtactgcaggcctgaggtcacagtgatagtatcgccatgtagaacagtggatgaatgtaccgactcctcatata

SEQ ID NO: 12441 - DNA, 139 bp, Emericella nidulans
tcaaggctggtcgcaccacgtagtaagccctgatcaatctccatcgactccgggcactgtctgtatgcacgtcagctgtcaggacggctggcatggtgacaaaatccaatcaacgagtaaggcacagtaggatcacaat

SEQ ID NO: 12442 - DNA, 897 bp, Emericella nidulans
ttaacgcatccaaccttttagatcgatgcattagaaaatacctcgataacaacgtcagtcactctcccgacttggacgggaatgacgggaatgaattctataatatcacgtcaacaggaaaacatccgcctcggaagagttttgtgggaaaaaaggttgaccgttttatattagatcgtggaggatcaacctattaagatgcattgtatatgacaggaatcttgcagctgcgagcactccgatgctcaggtggtgtgattatcgtgaagcctatcatctctacatttgcatatacgactatacacgtgctgctcaggatccgtatatatgaccagcccgattatgtactaatgttcgggatagagctctaggggctggcatctgtgccgatacctgtacaatcttttgaggaagctctgttctggctatagatggcaacgggacatggaattttttccccgagggcatgatccatttgccagggttgagtgttgcgttacctggctgatactgaacttcctcagagggattgttgaggattaaggtttgagaaataaatgagccggatttatccctatatgatcccgtagtatcccccttgatttatagagcaggccgtttctacagaaatcttatttgcgtacctttttaagaagcttataaggtgacgtctgtgttgtaaggttgcttgcatgtgtttagactaggctcgcttggttataatttttttaagctattgtctgcctaggtgagccttgggttaaccggtaggtatatttccctcacattcatcttggtcttattacgtaattcttttttaatatgggcatcttttcttaaccctttataacatttttatttacccttgtatacaataacctcctcgtgttttattca

SEQ ID NO: 12443 - DNA, 2351 bp, Emericella nidulans
tcatgaacgactttcctcgcttggccacaaagagcgctgtgagccgtacgacctctagatcttgcgcgtttattatcggcattcgtgctgaaaagtgaaagtctggaggtggtgcaggtcctttgggtgcttcaggtgctggagttggggtcggctcgcctgggcggccagcagacacatcagtccctctcccctgcttgatttcattaagacgccattgatagaacggtgcatacgggtcattcgagttcaagaaggagaatttggggttactccgctccttctcgcgtacacggtctaatagatcaagaagtcagtcacggctcctgagatatgcgttaacagcggaaaaaaagtaaataccttcaaaaacggcgccattgcgagccacatatccagctgttttctcaacaatcgctaccaaactctattagcacgcgcatcgaactgcgaatagttgcgcagaactaacctcgaatgtccttcggtggcaagaccactcccgcggggggtttggtagcgtcgtcgaggaccgtaggtgtattcccgttactcatggatgccatattaatgacaccttccggagcgtgcgattgaggggagtgtgtaggcgttgtgagatctttgggttggtccaagatgtcgagattcagccttctcgacaaaaacggctagctcagccgcgcggctagcttgctgcgatctgacccctgattggtctagcttgccgcttgtactagagagctgtaggctgcggcttcagccgctttacataagccgtagaatagaaatgaaacagtagcatctagcggacagttttcgatactcaaggctccagtgatggacagaatcacattaattgcgtcttataattagttgccgagttaccgaagtagatacagcaagccgtctgttttcgtcgaggcactcgtgcggatccccccccgggcttgtacctccgtatgcgacagactccactgttcatgttctgacttcagtctactaaggcgctaccacacgtgttaagttcatccgtaccgctgtccttcaaccacttcaacccacccccgtattgagtccagctcagcctcgctcctcctctcttttcttcctttcggtcatggcgctgtgtgactagttacgactgcgcattcagttctcctgtccctcgtattgctccattgaccgatttcttattctcttaagcgctgcgtggatctacagtgggagtactgtccggtctgcagcttgaagtcgctcgaatcgacctttaaatgattttttaattcccgatctcttgtttatattattggaatacccgacgctctcttttccctatctatcagattgattcgtttctccttgggagtcctgaaaccaaaatggcgaaggacaccctggacgtccgcccgccgcggacctcttctcgctcccccagtcgctctccccggccaaagaaccggaagaaagctacggcagtggcttcgagctaccaatcagatggcgttacagataacaatatattcgatctcccaatgtccgactacaaggttatggttctggtgactatagtagccgccgtggtgcggctgtttaggatctaccagccgactagcgttgtctttgatgaagtgcagtacgtattgatcaattccagtatacgtaccccgtcaggcatttctaattggcgatgaacagtttcggtggtttcgcaacgaagtacattaagggtcgtttcttcatggacgttcacccccctctcgccaaactccttattaccctcgctggatggcttgctggattcaagggcgacttcgactttaaggagattggaaaggactatcttgagcctggagtgccgtatgtggcaatgcgcatgcttcccgcaatcttaggagtcctcacggtgcccattatgttcttgactctgaaggctaccggatgtcgtactaacactgctgtgctgggagccggtgccatcctctttggtatgccctctttatggtgggaacagaaggtgcacttactgacttctgccagaaaacggattggttacgcaatctcggttcatcctcttggattctcccctggtgtttttcacagccctcactgcactgtctttcacttgctttaccaatcagcaggaattggggccatcacacgccttccgcgggccctggtggttttggctggttgccactggattcagtttgggtgccactttgagtgtcaagtgggttggtctgtttacagtcgcctgggtgggttctttgactattcttcaattgtgggtggtgcttggtgatacaaataatgttactcccgtatgtcagcctttatccctgggactt

SEQ ID NO: 12444 - DNA, 918 bp, Emericella nidulans
  unsure (1)..(918): unsure at all n locations
gtaggtcattattgctgctcctctgagccggtacgggcggcagtttcggcagaaaataaaagaattttccttttcgaaacttctccggctgcttcccaccctccccgaccgagtgaaacagagtgttggcagacaacgtgggcaagacttctatattccagatttttccgaggcgggtccactaccgtgagtcctcacctcacggaactgatagcaaatcaaccctttcagcgcgactgctctccgttcattcgagccgtctggggttgagtagcagccaccactcgggtgttaacattcccatcttcaacgcaccagtcaaatcgaacatatcacccgagcactcgcacttcgacaagaataccgttgccccggttgagattctcttaaggttccccggagacgggcccgaacagactcatagngcagtggccttgattgacactagnctcgtaaaggtcaacttgatgagacgggaggtatgggacgaaaaggttgaacgagggatcgttgtggacatctggaggttgaccacaatccctatgtcaccacaatagactcagatagaataccaataatggcccggtccgcggagtggaattggtccccgaagtatggttcacgcaccctcgtattaaattccatgtcattgaaatgcccacctttgacgtcctgatcgtagggcaccctaccttttccggtttgtgtttggggccccgactttttaccatttaacaatggcccgtgcggcaaacggtactagaagtaaaccgacgccccccaacggtttttgggatattaaagcgccacaatttttggctctggtattaatatcggtgtggggtctctcttaataagagcttttggcccctccttctccggggggggttttattgggtgaaattattgtatcttttt

SEQ ID NO: 12445 - DNA, 175 bp, Emericella nidulans
tggttgacagtcgtggaatacatttcaggaatcgtaatatctctaaactaaatgtaaagtgttggaagttatgctattgaatgattggtgcaatttatagatgttgctcctaaagttgtggatgatgccactatgacatgctggaaggttttaggaagggagcactgcgccggtg

SEQ ID NO: 12446 - DNA, 956 bp, Emericella nidulans
agtcaaggcacacctccaatgctccctttcgacgatattcccaaaggtggcacgtcgttctatccatccctctgccctaaaccaagaaattcaccttccagctctccgacataatacgcgcggaatcctctccatggcatctcgacccgtcaagaaccagacaggaccccggttctcagggtgctacaggccctacgatcaatggaagccagttttttatcacatttgctgcagcaccgcatttggatgggtcgagcactgtgtctgtgaaagtgttgaatatgacggcagaagatgagggcgataatgttttgagtaagctggagaaggccaacgttacaaaacacaagaagggaaaagttgttgacccccttgagaatgaggaaacccgagttgaaactcttggcatgaacggggaagccaattaatgccaatcccgagtgccacttgaagtggttaaccttgaaggtcctatggatgaaacaactttggcgttctttagccatacatgagtcaggaatggcggtgaccccccagtgacaaaagggggctcttcctgcagggtgaggctgaatataaacggtatcccgttttcaatctgatttgcggggcatatttaagggtccccgtaaccgggccattttattgggaatggccgaagcttttggtggcctcgtatcctcgtattaatggatctggagtgccaaggctccaattttccggtctcatggtctgaatttggctttttctttatccatatgtctctaggtaactacgtcaccgtgcgataggcttctatactctctttaaataccgtctttatacttttctctcctatcgagccatccctccgtttctctcgtatatatattccttgtatttcgcccttattttcaataatattttctttcttcgcggccctctctctcgtgtatcatctacatctcttgtctcac

SEQ ID NO: 12447 - DNA, 234 bp, Emericella nidulans
gaagtgcgcgagaatcacaccagataccgcaacaagagatgcgcaacggctgctacgacacaatgacactggcgactcaagaacacaagaaggtctcctgcacaagcgacagaagtccggtgcagagaacaggcggattcacccgtttactgcatctggcgacatctcagctcgggagacggatgcataatacacgctgaatcctgataaagtgggcatggatcccgcacaacc

SEQ ID NO: 12448 - DNA, 4181 bp, Emericella nidulans
ttgtgatggtggaggcatcgtcggggtggttgcaagtgcatggtaccaggaaatgcggtggcacatttttgtagtcctctatgccttcgaatgatggatctgtcgttcggatggtttgggttcggtatttcagcaggagaccaacaatggccttggaaaagaaatggacaagatgaggtggacgggtactgtttaaatataccgctctctagaccttttcacaggataaacaataaacagctgtggggatgtttgctggaaatgtgtggttgctatccatgcccaaaggttcactgggcgcggcattggaatgtatgatctacttctgagtccgggtttctttgttcagagcttctgactagatcaaagctgagatggtctgccataacaccaataaagggatgctccagggcagtgcgcaatgaatgtcatgaagattatgtcttaaatagcaaaacgctagtaatgacacatcatgagatggatagtaagatatatactttcacgtgactttttatgtggtgacagttgatagtccagtgcatgaagttttcgcctcaggctgcgattctaaggttgctcagctcacttaaccatcatcacttctatctatcatagcttcgtttgcagataataacgttgggagcatcttgtctatactgtctctaatcttgaccaatacttaccttccaacttctccgcatcttcaaaaccatcatctccaaaccatcatctccatctatcaacagttcggctcttcaacaccaccgaatcacttcagaaaccatttcgctacctacgcccccgcgcttcgtcttttctgcaacgttcagcgtctgtcctcttccgcgttgtcatatcacaccatccggatatagcatcgccttcgtcctaccttttttttgaggtgtccatatttgcgcgcatcgccgctcgcaattcgtcgactagcctactaccctcatcgcattgcaaccatgtcgctctgtttgaatcgtctgactgaggaaaggtaggctgattgactccttttaccagcaactatatactctgttcagttctcgcagtaagtcgagttgagctgacaggcacactcgcgcacaggaagcaatggcgaaaagatcatcctttcgccttttatgccaagcctcatcgtacggcccagggtgttttggatatgaaacgatgggaatgtggcattcccgggaaaaaagggacaatctgggaaggtggacttttcaaattggacgtcacttttcctgatggtgcgtggcaactctataaaagctcaaagcgaagttgttgactgactgttctctttcagagtaccctaccaagccacccaaatgtatgttcctttcgtcccgctcatactcacaaatatctttcacgagaatgtcgcaagactcttaaattgaataccgcttgcttagaagctaatgctgctgtgctgttctgggctaactttatgtcattatgaacaggcaagttcgtgccagctctgtttcatcctaacgtctacccgtctgggactgtttgtctgtcaatcttgaatgaagacgaagcgtggaagccggcaatcacgattaaacaaatccttcttggtatccaagacttgctcgacgacccaaatcccgagtctccagcgcaggcggaagcatataatatgtacaagaaagacagagctgcttatgagaagcgagtgaagcaggttgtcaaggaaaaccccgctttataagttgagccactcaatgacgattaacctttctctccaaatcgtcatttttctatcctggcccttcttgcatttcgactcaccgaagtctcggcggatatggcgccaaagtgacttattctacgtggggtgtgcactgtgattgagagacgaaagtcatgcgttttgcgccgaatactttctgtcctgaacggaatgggagtggctggagttggaatttgctctctgtacatccagaccgattggacattaaactttggtatgaagaggcggcctcctattagttttcttttccctttctttcacgcgagcatggcgtctcgacgacacgaacacagcagagcaacgagataatgggcggcgttattcattttttaattttttttatttatttttcgccttttcgtgaggtgcataggtgaggaattttctttaacgcataaatcgagatatccgcatataccgcgtacatccgtttcaatcgcatcttctatggtcattcgcatactagtaggacatccttttccctagggatgattcggtgaagatggaacgcggcgaagagaggcaaagtatggggtcagaacttactttctggtcatgagtacctccgtttccgtctattgagggtctttagtagatgccggggtgtccccgttgtcgcattgaccagtagtagacgggacttaaattgagtgcaaggcggaggatcgccttacctggttcaccggcctggattcgtagggtaacataagcaaatataactcagtaagcgccatgtcccagagtcggctaaatatgtagtaaacctacatcgaaagtgtctagcaaccattttgaatttctgaaggataagataagtccgagtttccttagctggtccttagcgcggccgattgccggccaatgacgccgctgggaatgtagctgttatcttatcgagatgagtcagttctgtcagtgtccctctttcacccagatttttttggaggccgaaatcgcccctcgattccgccccgccgacgggaccgggaccctaccttgacattttaaaatttcccccgtctcccccgatctgggcctggtcaccaattcgcacttttctcaccctctaatcgattgggcgtcctagcagtctttgcttctaatttctatctgcgttgctcaatcgaaccgccagcatgtgtggtatcttcgcctgtcaccagtaggttactctacttgctcttttctcccacggccattccgcggggatctgtgcgccgcgcgttcagggctgacagacattgcgacagtcatccggatgtacaggcattcaagcctacagctttgcgcatggcaaaggcgtaagtcactccttttcttccgcaagtttcaactcgttatttggaatttgtacctgactgtagcagtgtgcgccatcgtggaccggactggagtgagtcatgcggtcgcggatcttctttgacaagaattcattcctaacacagcacaataggtggaagcttcatcgctgataagacgagttagtgactttgggccatgtatagaccgaagtcatagggtgctgaccggattttccagttctttgccacgagcgtctgtgtatcgtcggtgtcggtatgtgccttactcatcactaagactcctttgctcttttaattactccgttttacgacctgaactttttctgagactgtatttgcttctagactccggcgctcagcccctcgttaacgacgatgaatccctcgccttggccgtcaacggtgaaatttacaaccaccgcatcgtgaggaagaccttggacgtggaatacaactataagacacactcggactgcgaagtcatcatccctctggtatgtgcgattagagcagcgcggaagaggtttgtggtaaaggatactgactcgtgtagtacatgaaatatggtctcgatgctcccaaacatcttgatggcatgttcgcctgggttctttatgacaagaaggaggatagggttattgcggcacgtgaccctattggtatctgcagtttctacatcggctggtcctctcagactcctggagccgtatactttgcctccgagttgaagagtttgcaccccgtctgcgacaaggtcgaggcttttcctcctggccatgttttcgactccaagagcggtgaattttcccgctacttccaaccctcatggtgggacccgaccaacgttcccagtacgcccgttgattacaaggcgattcgtgagtctctcccgaggtctgtgcgcaagcgcctaatggcagaagttccgtatggtgttctgttgtctggtggtcttgattctagcttggttgcttcgattgcccagcggccaactctgcgcatgcagaaggctagatccggtgtcaagagcgaggccaacggtgaactggtcggtatcgacggcgagatcgggcttatcg

SEQ ID NO: 12449 - DNA, 998 bp, Emericella nidulans
gcttttatttttcgttaagggcggctagaccaggaaaaatctgtccctgttacatgtggaaaccgtagatgaaccatggctgagaaaatttcattcgttgtcaagctagtcaagttagtcgggcagagtcgacagtctgtagattcaaaggcagcgcctcgcccggtttctggttcatccaaattcactccagatctctctgcttccttcctacgattgcatactcccatagtccgcctgactctatacaccccgcgcctgccagagcatattactacttacggcctctactacagcctctacccaaaggattatgcgtgcaacttcctactacatctcacagctcgatcaacactgcattgagtgctgaaacccttttcagatagcaccgcactgccttgggtgtctagtgcccaccgagagagcttctatagacctcacttcatttagctcatcgccacacattgtctcgatcttgtttccagccggtaccggttgaagacgtcgcaatgcccggcctcttttttcagcctattgcccctcctttttaaccatggattttccttactcaactttttttgtcccgtttgtaacgaagtttccagccgattttcaagacttgccactgcgatacatttccggacgccttttccttttatggcccctttttcactttccgggcctaccattggaaagttttagggccgcttctttttaaaagaacgggccttggaaacgccttctaaactgggtctgggacccccttgttgtttgcaccggaacttccgggtttttgccccaaatccccccaaacgggtgttttcaatttattctttttataaacaaaaacctgggacccctttccccaagaagaaataattttgatctctttcgatattatgggttaatttttttttttttatctcacccgttggtgttcttgtatgttttctccccacgtggatatattcttgccctgaaaatttcctaagctctca

SEQ ID NO: 12450 - DNA, 996 bp, Emericella nidulans
gttcgatgaaatgagctattctcggcctaatgattctctggatggcggtgaagatccgtttgagagatttgtataccgaaaccttatatgagtgggtgttggagacgatcctgaatggatggacacgtttccaaaggatagaatcaaatagtatgacgatagatgagatggaaaagagacaatagtcacaatgtgaagaggagaggatgaacccagagagaaagggtgggtggctgattgaaaactttcagcattccagcttcaatgaccacggttattaaataggcaaggcatatcaaatgtagcggatttttttcttttcttttcttctgctcgactctcgagcgaagcaaacagggcagaagacctcttcactgctagactgatgattttcaatattcctcgtacactgattggggggatgccacccctggcagtggccagactgccggctttgtttgggacccattttttgtgccctttccctttggtgagtcttgatttttcggtttacgttgacttttattggaaaattgaaaccaggtgttacttttccttgggttactgtacttaatttttacaggatactggacttttttagacattgcagttttatctgtaggccaggctagaacccacacttatttttttgctgaccaattaggaccctttcaataagactactttcaatctttatacctttttttattttatctagcaaactttttctttggttttggctctacatctcatttgatcctattgtttcggcccttccttgggcttttttcttttctttatttttctgtaaatgcttttatttccttagattatcccgtaattattttatatttttagtatatatatatgataacttttaatatttctatattattttttatatttattaggttcctcctttttaaataatttatatttttatattcattattgattaaatatgtttatttttttttttgttggggattatttatc

SEQ ID NO: 12451 - DNA, 597 bp, Emericella nidulans
cagcgcaggtccatctttcccataaagcggatccgcttgaaaccattctaagctttcaatattccgaagattgtcgttcttcccccggtcgcccatagcacatatcccaagacttaccccgtgggtaagcgccgaccatcatgaatggcctctgagcttcatcggtctcagagagcagccggtgcccacaccagctggaactataatcagatccccctcagagacctccggttcaaatcgatcggggttcccttcgcccccaaagcagagttttgcagacccggaaaccacgcccaggacctcgtggctagtcgagtggaagtgtgtctgggggtacatggagtatgtccatcttgcggagacttcaccgattttgtctaaatgtttcgacaattcctctgccgaggcactgaaagcttgatggtaaataatgagcggcttgtgttgaatggaggtatttgggatgcgctcccactggggtatctgtcgagaggtgacttgaatctctgatgatggcctaatcattgtgtatagtgatttggacggtgcagtgcttggtttgttattccgctgggattcgagcgctggtgttatatt

SEQ ID NO: 12452 - DNA, 141 bp, Emericella nidulans
cgcctcgcctcacctccatctcgccgctccaccctctcatcgcctccgcctcatcaccgcgcagccgctctttcacgcgcgctaccacgcatccttccacccctcccgcactcacctccacacccgcgcgcaacccacgcc

SEQ ID NO: 12453 - DNA, 3578 bp, Emericella nidulans
tgctggcacaagcggccaatctccaatcccatccaaaatagccaatgtcatgccaccgctctgatgcatctgcaggtgacagtgaagcaggaacgggcctgggttaacaaccttgtatcgtatagccagccagactccagttgcttcaggaacaaacggtgtagggtacgtatcgcgcagttcaggatttaccaagttgaagttttccggcatctcctccattgcttctgccacggacgaccatatgaacggcgtgctaccctccccgatcacaaaatacttgttcgagtgcttgtgcattggatgagggggttggttcgccccggatacgttgaaaacaatgtcaacccaggtgtcgtttagggtagacacgctgtatgggtatgggattgcgcttgcgttgaacagggcaggacggacctcttctaattccataggaaagctcccgtttcctaattgccagcggtaagcggcgtgatagtgattaatatttaggatgattgtctggtccacggttggcgcggggagttggacaggaaatgggacaatgagagattcattcaaatatactgtttgcggtgtggttgcgtcgccagtttccgtaatatatggtattgaagcgttctgctgaggccggtgcgaggtatacaacattgttgccgagccattgatgatctgattgagtccgttctgggcaacgcggatcgtgtagtctttagctgtcctattctgtttgagctcaataaggactgaataccgagaacccggcactatccgggcggcttcaacaaggaccggttcaatgtagcgtccgtcaattgcgtagatatacatcgggtgctcgtctatcgagaagatcagagaggccgagccagccatactgatcaggtcccggctgatgtagcgagtgctggcatcgaccataacaatctcttctggaccataacccgggatacatccgctgttgaaccctttgggtaatatactggggtcacgaggataattgccgaaaaaggaatcaattggagggaaacatctatggattggtggtcagttcgattccagaggatgtaggagccaaactcacccaatatcggtcattgtctcattcccaaggagctgtcgttgtccaacagacgtaagatcattaattctctgctggggtaaacaccacgcagaacctttcccgttgatcagtatagcattggagcagacgctctcaacgcccgaagctatttctacttgccaaatatcttctgaagtcaagaatcgccagtcagaaagcatgactggttctgtcttggactctgcactaatcattgcggcgaggtctgtagcatcttgggtaatcagcctgaatggcttctctactgaccctcttggctcgacatagatggctccataaagaccatctatgagctgaccacggctatgtgaatgatatatatatgatccatattcatccgctgtccatctatatatgaactgatgtcctggctcgatcggctcctgcgatagcccaggggtgccgtccgaccacggagtgcccagctgcgaaatacctgaacgagaattagccaagaacaaaacattcaaaagcaatatgataaggacgtcactttgccctagtattaccatggaaatgtaccgacgtagagaacggcattagatttctcacccgaaattcaacctcatctccctgcttaacgcgaagcgtaggaccggggaattggccattcgatagaataactttgcgcacgacgccagcaacatttcgatcctcccacgtcagcctcaggtcaaagcgaacagccctgctcgacacccagtgtgccaggcacaggatgaccagcaggctcaatccgtgttgtaaacctttcatatctaatgatctaggactgaccgaacatcacagagggaaacgggtctgctttatataggttctgttggatcgcgtattctattcttaacatggcagacccggcttcccatcatgcacgtaaaggatcataagaaccatggtcaatttgagaatatagccaattcgaactcgggcttcggaacccgcgttacagttaagcatagccgctggggagtttgtaacccatctcggtgcagttcaaaaggaactgcaccctagccgaagatagccaaggcagccataggcaagggatagccgctggaaagtgggaacataaatgtggcggctttcttttcggagagtaaggtgttccacgtatctggctggatgctatgcagttgaaacgagaactagcaaatcacacgtattagatcgtgcgtcgtgtatgttctatttcagtacgtcgaagggtgcaagcgtcgaacgcatgcttgaaggcccgtcatagtcgtggcagatgcagcctctattccgatcagtcgcgtctacttgggaatacgacgaacctagcaggggacctttgaggttgaggctctcagaacaataatataaagcgagagtgaaccgcccatcgcagaagtacagtctcaagaaaaagcaaatactagagaatccctgcagcactttgcgatacgtggcgatggtctgtaggcaatcgcagtggcggacaaaagcattgcgctctgggcaggggaagcactcgctaagacttgccgagagatcatgaggcgccgatctcctcagattgatgatgtgagaactgataatagcagtaggccgtcctacactctagtcctttcatgatagcagcggctcggaatgtggtcagctgttgatgaatgaaatcatgccatcgcaccaaggtgactatactcgtgattctgcattgatgccacttacttgattcctgtctacgacggctctgtcataccgtacctcaactcaagttgcatgaacatacgacctcgagcgtctcttcggacggtcttctagtctgccaacgttccagtggtcatatggtcctcactctctgcgcacacaccaaagcatctatggctgtctgtgcgaatcgtcgaagttgtgagagtgatgacgccacaaagaaggacgaaaggatctcgaaacaacaagggccggttcagccgtcgagcagaatcccgagtaagcctgggttacccagatgctccagcatgttccgtaagcctatcccagctggcacccgagatcgtagtcgtaggtggagcagacttctccatgataggtgcgcttggtgtcctaagctttgtggcattttgtgttgaaactgaatctagcgaccttcttgcggacgagctttgagggcgcttgaaggtcatgttacagaagttaagtcggaagaggtgccggcggtggtaaggaggaagatgcgcggtgtaaatggtaggagtggtattgaaaagagattgaggaaatatcggtcgttgacttgtgttaggctgaattttgctcgacataatagtcaagtaccaagacttagtgtcatggtaggagaccgagagttggccagtaagggactgcaggattcgagcagccagcctgaggcttaaaagctgttgttgcatttgttggcttacttgcgttaattgttacgaaattcagttacaccaggcttggaacc

SEQ ID NO: 12454 - DNA, 980 bp, Emericella nidulans
cccggtcaagacattagaagccgcccattttggcgtcgcctgagctgccaataatgtgttctttattgcgtcgctgagtatgggggatggtgaaagtcgggtaagggggatctgccgttggccactctgtatctgccttagggtctgaaatatgccactgattatgagcactgtatggcaggacgaggcacagaatcattgcacacctgaatagcaaggtatcctgacaggttctcaggtggtgttttcactacgacccacgggtggaagctctcagcctgtgggggtctatccactaggcccagatctgcgtgaaagcatcaggcctgtattgcaagggcaaaaactttcgaaccacaggctccacaaagctagcgggacacaaagtcttaccgttaaaattttatcaagaatttcaagccctggcttccatttggaggtggtagtcagaaaccataatcttccctgaaaccgtccaacatgccttacagagcattagctcagtccccttgttgcctggcatctagcacaccctctttgaacttggtcacacaaaacagatacccttttcttaatttaccctcctaaaggcgaaaactactaaaactccaaacttgcctcaaacattttcctggcttcactcccatacgccacacttattactatcaaccatatccatctgtcttacataaccctttaatcaattgatataccccccaactctttcttattttccttctgggctcaaaaaatgccgcctttggatattctcatttacccaccattacgcgggccagcttctacacatccttccccttctctactaacttatcccataacacatgtacacctttacagtacccttactatacactctacatattcccttaccatttctatcatctttttcctctacttatcatcatctcaacaattctctgtacttttttcttcttataccttcccctactcctaataat

SEQ ID NO: 12455 - DNA, 146 bp, Emericella nidulans
ggaggaaatgcatatccgctgtcgaaactgaacgggataatgttgcaccgaacagtcgcatgaacgatggcgctagagatacgtgtcaagaagattatcgcctatggtcagatagccccagccagtcccacacgtacaatcacata

SEQ ID NO: 12456 - DNA, 861 bp, Emericella nidulans
cctctagtaacggtcgcagcgaaagggcttggaatttgcggcagaagccggggcccagcgagactgagagaggctcgacatgtttctgctgtggacaacagagtacaacacaagcagtgaacaaaagatgcaccgccacctcatatcggcacggccacagccatggcccagccacacctcgtcgtctagagggaaaacaactgagatctcactcaacgaaattggatgactgctttggtgataaagatccagttggtcgtagttgaatccctatgataggatattgagaggacacaggatagcgacgagggtgaattcgcagtctgaattccaatcacctcataatatatatctcttcattacgcgagggtagtgtacggctagtctgctacgtaaagtagggctgcagacaaaggctggcatttcgcaaagcacattctatgatctaaagacgatgatttctagcagttaaagctgtcactgaagacagtagcgagcagatcaacgagaacactgttgaaagttaggacttatccaagttcctgcgagcattcacttactgtaggcgtgtttcaggccagcaacatagctgccaaccaccgtctcacgaagagcgcccgtgagaccagcaatatactcaatgcttgacaaggcgtggcaaatgatcttttgttcgacagtgctgtcctggacgttataaacacacataaggtcataccttatggggccccctcccagcagtcttctttgcagctgccttcgaaattcgatgacagtagcgaataagttgacgtaatccctgcgtgagggcaagttaggagcagtgaatccccccggagccatagcattcggttggtctaa

SEQ ID NO: 12457 - DNA, 1395 bp, Emericella nidulans
aaatgtcttgtcgattccctgaagaagaagcaattagctcccatttatccgcagcagaaggataatggacaaccggcgactcctagtccgcatatttttatgtgcatgattggtggtgggcactttgcggcaatgctggtttctctggcacccgaggttcatcggaaacagggtggtgtcgaggaaagacaagctcgcgttattgcacacaagtcgtttcatcgctatacaaccaggcgaaaacaaggtggctcccagtcagccaacgacgcggcaaaaggtgcggcgcattcagcgggttccagcctacgacggtataatgaggctaccttggaaaaggagattagggagctgttgcaggattggggcaagatgataaacgaggctcagctcttgttcgtccgcgctgctggctctacgaatcgaagggtcttgtttggccaacatgaggggcaagtgctgaagcagaatgaccccaggttgagagggttcccgttcagtactcgtcgggcgacacagactgaactgatgagatgcttcaaagagctcactcgtgtgaagattagtcaagttgatgaagctgctctcgccgcagccgcaaccaaacagcgagaagagtcaaaaccttctacaccaaagcctcagccgcagaaaccaaagatatcgaaagaggatgaagcggcaatcatgcatacaacacaaatacaagccctcatccgtcgctcgaaaattccggcgctgatgtcgtacctatccaaaaactctataccctcttcatttacctttcagccatccgacgtccagcagaattttcgatgtcccacacctcttcacctcgcctcaaacctcaattcccccgcaatggtattagccctccttaccaagcttgacgccgacccaacggctacgaatgcagaaggaagaacgccatttgaacttgcaggtgatcgcgctactcgagatgctttccgcgtagcacgccacgagcttggcgagtccaagtggaattgggaggctgccaatattccgccagccatatccaaggctgaagcagataaccgtctgcaaagggagcggaaaacagcggaagaggaagaagcgaaccggcgtaaggcggaaatggatcgcttgcgacaggaagaggcagcgacggcggctcgaatgacaaaaaaaggtggccggactgtgggcagtgtagagaagacagctcaggaaagaagagaagaagaaacgcgggggatgacgccggaaatgaggatgcggttggagagggagcgccgtgctagagcagctgaagagaggattcggaggatgcaacagggtcagaaacagtgatgtcttagcttgccattatttagacaatacttagcttacgataatagatggtcttgaaat

SEQ ID NO: 12458 - DNA, 711 bp, Emericella nidulans
  unsure (1)..(711): unsure at all n locations
gtaagagcgctcagctatttcttaccaattgccaattagtacccgactgcatcgcctgaactctggcccttgtttgaaacgttagcgaggaacagtgttaaacatggttggggttcagatagactatcaccaatttcctattgcgctgcccgattcttgtattagcgctttattttcaattccacctcaatcagcacagtcccaaccagccatgaggataaaatagctgatctagacccctgcttaagctctaactatactctacttggctactgtggatccacaggctgagcctccctatttgtggattctcgaacctgagctgaacgaggaacgaacaaagaacgaaagcgaaaacgaatgcgaaatccatacgagaatctgtctcagtccatctaggcaaccagaggactagggcttggcgggggcggtgctatcctccctatgctgatgttgtataaaagacaccagattgttcacagttcaagttctgccacagacaggaccatagctcagccggtatggcacccgagaacatcatttacgggtacagtccctctatccctgcgcnggttatcttcattgccctcttcgggatataacggcgtaccacgtctaccgctgatcaaagctcgacactgtatttcatccgttcgtcatcggggttttgtccgtctttgcccctgccctttgcgatacttcgcttagact

SEQ ID NO: 12459 - DNA, 861 bp, Emericella nidulans
  unsure (1)..(861): unsure at all n locations
ctgggttcgaccgtgcgtgatgattctagcaacatagcgaccaatatctctcaaatttgtcaaggccaagggcgtattgccatcaccaacaatctcgttgttcgacgttgtcatggcatagtcgagttttccagactcgagtcggtggtacgcaagttggtaccaccaaccaacatcgatgatagtgtagggaaggtggagctgcttgatggctgagaaacgggtcactctttgtggtgttgagcaacgctgactgctaacctcgaccgcgtatggaatcccgttgtcgtaagcagataacaccaccagatgggccatcactgcaaaaggcattatttgtagccttaaagcccagatttttttttgttggttgaacttgggggattttatcttttggtttaatgtttctaactttagtttccttgtaatatttttttttatgtttttggtcctttttttctcatcatctctctaatgtatacatgtggatctcatacggtattgttccttcttttgtctttttgcgcttttcctatattttctttgttttatccttttttcttattattttatntatcttttcttttcatattcaacattattatcatttttaatttatctactactgccatctttttttttcacctattctttagttaatgttcttttatacttttattatacattctatatattctatttcttttattttttcttcactcttttatatatatttactccttatctttttacctcttctttcatcttattcttttctcttaatatctttattacccttctattttttctcattttattatttctacttattattcttctattccattcactcttttcttc

SEQ ID NO: 12460 - DNA, 230 bp, Emericella nidulans
aatagtctagtacaactgtcattcaatgttctgctagagaactatagtgtattctcattcacggtcttgcgacagtggtacgtacaaaggaaggtaattgccaggcacagatggcttgggacggctctcgtcctaggtggaattccgatttgcgtgcactcgaagtagtagcggttaaagagttgtgcaccttgtatattgggtaaatcgatgagccgttgcatgagtgt

SEQ ID NO: 12461 - DNA, 196 bp, Emericella nidulans
aagcagggaaggagtgtgaggggatcatagaggatcagatagcggcggagcctggatcaaccgctaagccgagtacagtgcgggcgacgttcccgttaagatccgttcagtagctaacgagatgtcccagtacgtggatgcctgcgtcatgatggtcccaaagcttgtacatgtaggcatagtcagtcgggcagcc

SEQ ID NO: 12462 - DNA, 2067 bp, Emericella nidulans
tgcatgggcttttcgaatcttttccgcataccggtagatgaaggcattgtccagctggaactctagaacaatttccctaagcttggattgaatttgtgtgcgagattcatcggcgccgtcagtgctgggagcgagcacgctcagcgtgtagggtgtacgtctgtccatactgatgacagtgcggagtggtggagagaatgtcgggtgtagagtgtaatcagggaggaggtagcaaaatgaatttccagaaattgacaagacacgagaacacgtcgcgtgtgtctcacgcgttaagtggtttatgcctgacatataaggtatattttcaggtaccgacctcggaacatcaattttgccgacaaatggaaagcggactagcgtttggccggggttactgcgctttacccaatcggggccagctacgcagcgtccacgctcagccagcagccgattatcgctttgacagttggcggatatcagtgacctgagactctgctgatcgactatcctgctgcctgtagttctgctgaaattaagcaattggctgcctctatcggcggctctgcgttcggcttagacgacggtctagctgcgcctgtcatgctgaggtgaagtgaatgagctaggtggctgttgagtcgccagtttgacggcgagatgtccgcgagtccccggaagtcgattgacagcttagcatcaggcgcatcgactccttccttgtcccagtactcgttcaaccaaattgaatccccccgcggctcgtcccagcgataccccctgaggagagggtccacggccagttcgattgtgagcattggcggagtgcttgatccttctagtcgacatggagcgatagcagaatcaggccagaatggtacgtgggatatgctagatgactgtaccatactgactggatagccatttccacgcttcttcaacctcctatcgtccgcaccggccttgtccctcattcttcagctgcatctggcggatacaaacctccgagcactcgcgatatccctcctgttccactgacgaacatcccacacatcgatcgaaaagcatttgaaccatacctgacccaagtgggctcgttgtacgaggtctttcaggaagcaaaggagaacaatgagcaggatgcacagctagcgcggggaggtcagacgtcaccaaggtctgacggacaggactctctgagcccgaggaatcttgaacgccggctatctggagtatcgaccagttctcgttcaacttctccgtacgccgcacgaaaaggaagtcgtcgaaccgtggtcgtacgcctgctgtcacgcctttatcgactattccttccgtttactttgaggatgatttccgtcttgaaaatccgcgcaccttcgatgtagtgtcagagagatcagaggttgtcacacctcctaaggcgccgagcaaagacaacaaaatggatatagttgagcctgcgccaactgggagaaaggcgctagcgacgaatgcaatactacaggagaaattgtcatggtacatggatactgtagagatacacctaatatcctcaatctcgaccgcgtccaaatccttcttcacggcccttggttcgctacgggaattgcatgctgaggctgctgattctgtccggcgaatccaagtcctgcggaaagaccttcaaaagatcgaccgagaaatggcattgggaggattgaagatagttaacctacgtcgccgaagggagaatgtccgcatgcttgctgatgcagttgcccagcttcgagacgtggtcgagtccgtcacccgatgtgaggagctggccgaaggcggaaatatcgaagaagcagccgatggcctcgaaaaggtcgagaaactgatggccgaagactatactcctgatcaggcagagggcgaacaacggaaaactcttgatttacgaagactcaaagcattagagggtgcatcaagcgagcttgaccgtttgagatatcagattggcaccggctatgagaattcgttttggaacgactcctggcgatctgaggcgcatgttaaagggctccttggctgaactgccagaaa

SEQ ID NO: 12463 - DNA, 2999 bp, Emericella nidulans
tattctggtacatattgactagatagagggctttctttcctcttctccttgattcccttacacgtttgagcttcctggataattctatagagttgcatacgttgcctgatgcatttcctgcttgccaggggtcgcttactctcattttacttttcatatgtcagcggtgttggttagaggcacactcttgtattctagcatagatccaagccctggattcttcttatggcaccgcactgtgctgtccacatgccgtctggcatagattctcggacatgaaataacgacattcctgatgctaatatgtacacaaatacatcccaatcaaatccagaccatggcgacactgagaacgaaaactaaagacacaggagagagagatccccaacaaccattggcactgcattcgttttctctaaaagatgtataataagacgttcatttgtagttgttggttggttagtattgcggaccggggaatgaagcgtacagctgcttgggtcggaggtgcaccggggtctggttttcgggggcgccggggatggtcttcttgaggccctgtttaaaaataaatttgttaaatcgttcgtcaccgccaccgtggagagcgagaaggacatattggggtaacgcaccaacttatcgaagacacacttattcaagtccatctcctgcttgcggcactcccacaaccggtggttgttattctcgagacactcccagtgggtgttgaactgctttaagcagtgggtgttgatatccttgattctgcccgagaaacttcgtcagcagtgcatccattgaaccattccgctcagcccagcgattcccctctcaatgtcaaagtacaacaacgttgaagaaacatacacactggcgcacagcgggtaaccttcctcccctctctcaagcactcaatctccccccgcccattggcctcttccttgcacttcatataatcatcgttgaatgccttgcaccggtctccaatgaagtaagcggcgctggttagcggcgcagaggtcgctccaatctcagctaccttggggatgccatcgggcataggcgtggggtcgtagagattttgttggttgaacctgtcacgctgttgttagatgtaactgcgcaggtgcaggggccaagtctcctcatcttatcttggatagagaaagagttagagaaaggcacgacatactggggatccctgcgcgacattgtggcagttttttatgtgatgcgcgcgttcaattgcttctgaatctgggtagagggctgggaagcttccacttaagttgacctgacctcagttaccggacggagcgggagttaaggactctcggttttcgcgaagtgctgattggttgcaggctcacggtcacgggatttctgtctgaggtgtccagcagcaggtaagtgtgaagcgggtgtttcacgtgacttatgccaaaacacaacagctgccgcataggaatcaatatctagtctgacggtccaagctaagattttgcctactttgcgagctgctgcgattggtttcttgccctcggcttttgcggcgcctcaatacgtttgacaagtagaggaccagcgagagttacgcgctttactttgttcatttttttttttttgagctctgaacatcgatttcttcttccgagcgcggtctttcgtcaccaacctacccaaacgacgaagcagcaattctttcttaggcgtgcaacgataaataaagcttcagtatgtcgctcttcggagggcagcagtccggtcagtccctgggcctgttttccaatacggccaaatccagccccttcggcacagcagcttcaaataccggaacgcagcagaatacagggggaggagggatttttgggtcatcgactacgacttcacaacctcagcagacgggtagttcgttatttggttcgactacgcagcagaagccgtcgcttttcgggcaaccgcagcagcagccgcagcagcaatcgggtactgggctgtttggaggaccgttagggagtgggcaggggtcgcaaaagcccgcaggaggtctgtttggtagcacattgggaggtggacagcagcagcagcaacaacagcagcagcagcctcagcagggaggaagccttttcgggggattgggccagacacagcagcagcagcagcaacctcaacaacagcaaagtatcttcggaggtggctccctgcttggtggtggacagcaggggcagcagcaacaacaaccgcaactcggccagtcaacacaaccccaaggatcgagtctatggtctccagggcgcgcggtgacgggcgtacaccggacagtcccaatgcagatggctatcgtgaaagacaagtgggattataccaatcgtaactcccctttccggacatacctgtataatagtgttggcgagggtgatgcaccattctaccaacctggcccgcaggacgacgaaacaaagtgggaggacgccctccggcaacgaccaggtcccgactgcgtccccgtactagtgcgcggattctgggaacttggcaagcgcgcgcagcgccagaaggacttcttgacgatgattcagacgcgcttgcacgagatcaacaattgtctcacggagctgctctcgcgtcacgacttgaaaatatcagtcaaggtagccgactgtcgccggaaacatcatgttctcagcaagcgatgtctggctctcgctgctaagacccaggtcctccgaaacagaggatacgcgatggatgaggcggaagaggaattaaagaagaaacttgcgcagcttgagcgttctgtattcgacccaacgcttagcggtcgcagcgaagagatttgggctcgcatgctggctattcgagagcactcgactcgactgcaggcggaaatcgaacgggctgggtccggtgttgctgcgcaggcgaaagatgagttggatgaagctacgatgaagaaggctaagaaggtaaacgtcactttttcaatcatttgcttc

SEQ ID NO: 12464 - DNA, 2820 bp, Emericella nidulans
ctactcgtgtcgtttataaatcaaaatacggacgcctaaaggcattcgatgcagtttgcatgaagatgttcttgcgcgcgttcgctgctacggagaaccttcgggggatccggtggtgcatcctaactgcgctctcgcgagacagtgccctctcccgagatttcgctgtcgaggttgaccgcgttctaggagtgctccatcgggaatccgtgggcataagcatggacctccaaaaagccaagttgagagcgagtcagttgaagaccctgacataccttggcgaagttcttcacaaaaagttcgaaggctacttcaaacctggcgtttggaatgtcaattacggactgaaaaaggccaggcggcgagagctgaagactccatccgcgaacatctggaatttcgattacaacaagaagaaacaagcccagagcaaaattcaagggattgtcaatagctgggatgaggagtacgagcttgaacggttgctggactgtattgacaatgatcaaaattcgattcttgctagatggaacgaggttacctgtcgtcgacaggagctggaactggagcagatagacggtgtgcctgtatagtattaagtatagcggacctgtatattatgaaattattagcatgtgatgcttggcggattacagtctttttcgcctgtctcgaccttcgctgaggaagaaagcaatatttacagccaatagccagccccagtttacatcgtatgttagtcattagtctctggtccctgagagagtcgggagcagtcaggccacactttctcgcagtctggtgcggccagagctaccaccaccaaaagccgcgtcccccttaacctaaagtacgacttttaaacatcgctgcccccccgccagctttcctctttccctgctctctttcacgaaccctcagatactgcgacccgaatatgcgcagcggcctccttacactgccctccgtcctaccgttcccgccgattctttgaagaatttctcatccgccacttcaatggccaccacccgtgccaacggccacgccaacggccaagcctcgaaaccttcagacgccgcagagctccgcagacgacttcaccatgaagccgacgttgtaatagtgggtgcaggagtgctggggtgcgcgctggcggtggcattggggcgccaggggcgtagcgtcctcctcctggaacagtcgctcaaggagccagaccgcattgttggtgaactcctgcagcctggaggggtctctgccctcgagcagctaggattgcgagactgcttagaggatattgatgccatacccacaaatggttactatgtcacctacctgggcaagcccgtcaaaatcccataccccagccaaagtcccggggcgccgccaccggagggccgctcgttccaccatggccggttcgtgatgaagctgcgcgaagctgcaggggcttgtcccaatgtcactatcgttgagacaaaggttacggacctgatcaccagttcccattccaagcaggttcttggtgtggaatgcgtgaccaaggagtccaaggactgctatttcggtcagatcaccgtcgtcgcggacgggtacgcctctaagtttcgaaaacaataccacccttataccccgaaggttcgatcgaagttctgggggcttgagctcattgatgcggaactgccgcagccacactacggccatgtcctcctagagcctgagcgcccgcccattctcatctaccagatcggaactcacgaaacgcgaatcctctgcgatatccccgaaaatctgccctcggcgtccgtcaagaacggaggcgtaaaaggtcatctccgcaacgtcgtgctcccgtccctgcccaaatgcgtgcagccctcctttgctgcggcgttagataaaggtcagctgcggtcaatgccgaactccttcctgccgagcgcgccgaacaagacaccggggttaatagtgctgggtgatgcgctaaacatgcggcatccattaactggcggaggcatgactgtcgctttgaatgacgtcgtcattctccgcgacttgctcagcccggagaaggtgcccagactaagcgacaccagactcgtcctcaaaaagctgtccaccttccactggagacgaaagatgggggcgtctgtcatcaacatcctagctcaggcgctgtactctctcttcgctgcagatggtaagccgcttccctcctaatccattcactatcgaaccaaatactaacctctcgcagacgataacctcaaagccctccaacgcggctgcttccagtatttctccatggggatgtacgaaacccccgtcagcctcctcggcggcatgctcaagaaaccagaagtcctctttgcgcacttcttcactgttgcgttcctctcactgtggatgatcatccgcgactcccccctgtacaaactcccgctcgcattgatccggtgcgcgcttgtcttttggacggcgtgtgttgtcatctttccttatatgttaattgaagccttttgttagcctttctccctcttggcccggagatggggcttcttttcttatttctggttacacacctcactcacataatctctggccccggaccaaaacactcctcatgacgatgcatgtctgttctagtgtctgtactactacctactctacctattcatttacctatatttagcttctgtttctcttccttaaatagaggagggagagaactgttgtgttgcataaaataggttttttttttttatttcatttcctctcttcattcgaaacacctctcgctcatgcttgacgtgtacaact

SEQ ID NO: 12465 - DNA, 840 bp, Emericella nidulans
tcagagtggagtgtcaccggttattattactctcggttccgtcctggacttggatctgtcctcatcggtctgttcttagtttttggcggcggtgctcattacggagctcttatcctcagttggaagcgtcagcgggactttgtcgaccgctatattcgccaagctaggagagctgcgtggggcgttgagcttgatattcgcggcactggcggaacgtcaaatccatgttcagtctcctattttctgattgaatattcttcttttttctctttattttcttttctctgatttattcctttttcttcattttgcttattatcttagattcatttattaatatcccactttttctacttttctacagcattttctactttcattcatcttatactatctcactttattttgttctacttttctttctttttactctcgtattactgattttatcatttaatctttcttacttttctaaatctttattttattaacatatttttttctcagtctattattatccatcactatataatctcatcctacatctatttaccatacatcttatcctactacactacctattctttatattcttacatatcacgctgctcatagttctgttcataatcaattgtgtttttaattcacctttgatgctcctcaataatgtagattcacatctcctatactactatttttttccaacacttttactataaaattgtaattgtcttatatttatatatatacttttaatatattctagttcctaacgttatgatactattattttctcttattatatctttattcaattttcttactcttcttacttaatac

SEQ ID NO: 12466 - DNA, 1204 bp, Emericella nidulans
acagaagagagcgaaggaagccctgcatcactagagtgatcaattacccccgggattttgaagagcctaataggaagcaggccacaagcatcgagagctccacttggcctctgagactacctccatggtggcaccatgatttgtggtgtcagaaaaccgaattcgcgctaaccatctagaacgtcaacagagcgccactccataatgtctcatattcaatctgactccctggattgctagcatatgactactctgggtaaaggatggctgtttcccacttcaatttggccgatccagggcacgcactgcctacgatcgtcctgcaagaataaaggtccggaccgtgccttggtattactgaggttacattgatggggccaggtttgccttgcccttgcaagtgggcacacgatagccagatacagatatttcttgtgtgcatgcttgtggctaagagcagcaacagggtggaatacccttccagttctgaatacccttcataactgcacttgaagggcctgtgatcggatagatctttatataataatgtaataacagtttttgctaaaatgatggttttctttatggaaagtgagtcccaggcagcaaaagagggttatcaccaataggctgcccggggtgactttagaccacgttgcttgttagcctgacaccagtgatgctaggtatataaaaagcaggcttccccccagactaagcgttagaatccagcactgaactttgccacagtctcggtgagcacgtgagttatatatactcttctagtaacagatagagccaagcctgctgcttccgaatatatttgtctcttgttcccagtgtataagcaccggccatccttaccgttatacacacccatacccctcgagtacttccgcgtgagattcaaaggtacgaaatctccttcctccatgccaagatctctcttttttgatcagccctcttctgtgagtttatcttgttattctctctctagggctaatcacaccactagataagatcatagaccaacttgaccgccaacatgaaattccatacttacttatccctcctgctcggcatctcggcaaccactgcccttgccgctcttcgcccagacgcaacccccgacgaggtcgccgcggccgaagcggagtgtcggatctatgggtgtgatgaggatcgacccagcagagtgcctgag

SEQ ID NO: 12467 - DNA, 200 bp, Emericella nidulans
caggaagaccaaccccactgaaccagccggagtcgagtaagcagatccaagacgtagacacggccgttacaagtttccacactaggtccaagacgatcacgaccgctgtcatgatgcagatcgggacccaagaatgcgagccagaactacactaccatggcctaacctagtgcatcgtctgacccgatacgtatgcattg

SEQ ID NO: 12468 - DNA, 178 bp, Emericella nidulans
ggacggcgacgcgcgccgcagcgagcgcgatgcacggggcgccggaaaacgctcagatatagcccctatggcgcagacgaggagcagctagtggactatgccagctgctctcgatgagtaacgctggaacggatcgagacgggtgagagaggagccctattattaggctcgagggtgc

SEQ ID NO: 12469 - DNA, 709 bp, Emericella nidulans
tcccttgcatgatgtgaagaaatgttgtaaaagtcaaagaccggaactttatttcagtatatcacatgactactttgttgtagttgctatgggagttgtatggagaacgtagaagattatttgtacagctaggtaacaatgtatttagctgcataccaaaatttacccacatgagaggataggtcatttaagacacttaatactaccatctttagcttcccatctctgcgagctatacaaattggtcttttacagccctttgacagcaccaccttgttcgcagtaaactctaaaaaatcctggacacgtctgatatcttgggttgtgctttttcttgggaggcttaactggggaccatgacttggcggcatactacttggaaccggttgtttgaaccagggtagggtagaaagggccaggtttgttggagggtttggccggggttgtttggatggcaaaccgtccataaaggtcggacatggttccctccctgtccttgggtgcccggtttacagtttaatcagaatttttaagtttaacctactttcttggcatccacccctaatattaacttttcatgcttcccagcttttgccttatgtggagaataattctgtggtataaattcaatggctgcctcccgactttttttttttaccctccttgcggggggagtatttaaactgttaacacttgggcccctgtttat

SEQ ID NO: 12470 - DNA, 1059 bp, Emericella nidulans
aaaatgggggtggaaatggggagtgccacaataaaggtaaaaagccattttttaccctgccaaggggaattttttatataaaaagtaaagctttaacctaaaaaaaaccctttccggcccgaatttggtgccggaaggtatcgtgcccattttaacacaggtctttcgaagcaaaaacaaagaccagtccgtaatttagttggccaccaaaaccacgccggcctgatgtccctacccctgacagcaagaacccgttcattcatgttaagatatccatcgcgttcctcggtttttttggcggctggtacccctcaatatacggaatgcgttcgtcctctgcccacattaacatcgtatttcagatcatctgagcccattggctcgaaggaatatacgcaccaaagaatgccctaacccagctcttcggcaccgcccctgcctcgtcgtcacatatgtttcgttcccgcatgggccggtgtcatacaggttcaagtgctcagcgacggtggcccagatcgacgggttaaagtgcaggttgtcgccaaagtagaggtcgctgcggctgagggacccgtcaaattcgatggtgtcgtgcttgcgcaggtctgcgaggtggatggtgcttctattacccgttgtcgagagattgaagtcgatcgcggcttggaacatgaagtctatcgtggtgggctcgtaattgaaggctcctgagatggcggcgcgcgctacggccaagtcaatgttcttgccattgcgtgggaggtatccgtggttggccattgcgttaaggcccgggcatggagagcggcctgcatccttgacattagttctgtgtttccaacagaaacaagaataaagaagaaagaaagaaagaaaagtaatagaaagaggaaaacgaaaagaaaagaaatatgggggaaacagaactcactgtcttctggccgggggctaagccatttggggatgaaatggccgaagggacaagaagcaacggccaagctgaaaagagggtttccagaacaaaatcagtttatgggtctctagtttctaagagaaaag

SEQ ID NO: 12471 - DNA, 511 bp, Emericella nidulans
gagatcccacctggcccactcggcctgagcaccctgtgcgctgtgggtagcaagtaaatcttttcatatgtttggggatatgaacacaggtgggcaagggggtcatctattggcgcttatgactggcatcatcggtgatgtggcttttactcacgacctagcttgtcaggagtctgtaatgcaaacagcgcactgacaatattagagaatgggcgtgtctggctgactacaatgcctccacagatcggtatcacatgtcactcctggccaaatcatggataacccttgaatcttgggcacgtagtcccacacgctgctcatgatcatgcacctccaacggcatgaaagcaaccgcaaagcatagggtgacagtgaagaaactctgatgggacatatacgagttactttatgggggggggagcgcagacatcgtcctagacttatgactgctcagctttgacactcaggcagacttaacgccgttctaccaagataatgggccgcaccgtga

SEQ ID NO: 12472 - DNA, 3037 bp, Emericella nidulans
gcctctccatgccttctctatgggctggtttagtaattacaccggcaacgcgtcggtctgatcatggaagaccattgccaccaattttacgtctcaactacagctcctgcactactgataatcggtgcgtcgaatttccaccatccggtggggagccagcaggtgctgacactccatactccgtatggacggaggagactgcaccgcttgcactatgaatgccaaagccatatacaataatagtcgcagtggagccggttgaataattaaaagcgaagaggcgagaaccacggcgaaaagtcggggctcaggctcagtttgaacctagcctgctggtggcgttgtatactctgaattgccaactccaacaatgacatcattgcgatttactccgttagcgtcaaagcaacgacaactactgcacagctctcctccacaattggtgcgagtagatgcgagaggacgaactagcgagttcaggaaaaaaatatcatttctagagtggcgctggaactgaagggaaatgggctacgatcctaggccgcaagatggccttaatgattcggatggagcgtcatctcggctgggcttaggctctgaaactggatatggtacttcggttggagctagggacaatctaggcagagtaaatttgagacatacaagaatatagcgataggtacaaggaaaaaggaattacagacgatgtcatttgtcatttccgaagttactctttcaaattactctcaaaccccaccaagccatttatagattatgcattcaagcgagcggaaggtcaaaacagtcaccacgtaacttgttccgcataatgtcagagcatactgcccttgggtactcgatgcgtggttgcaggtcagccggggttgatctcgctcagtcatcacctagtaagctactcaagagtatgtggcttggataggcgggccataaacgtttacccgatgaaggcgacagtcatcgcttcccacaactcgaaacgtcgggtcatgcgaactgtgcaagtcaagtgccctatgaatttcctaaagacctcgagagaatgtttaacggtgcaggagatgaccttatggagcgtttacagagcattgacgaaaatttatctctgctagtctaaatatctgatatttcggatggggatatagacctggctgctgtgctagcagattattgagcagtgccttcgtatttgcgaagataccgaggcgtatctcaaatcattggacgctcgagaatcttcgctatcccaggacttccatcagagcgccacagacagcgctgccgtgcatagtagtactcttacccagagtattgaactgaaccagttaccaactgctgcaggtgctgaacctgaagcatctatggaccgagatgaagcaatattcctgccacgagaccgaacagagcttcgtcccggaatgattgacgaaccgcctctttcaattctcaatcgactttccgataatcagactgaatctggacggtaccgatctgctgatcacgaatacaatgctgatattgagagcctagttcatgatcagagcgaaattgggagtatattctcggaaggatcaatactgtcttcccaatcatcccagagcgagataacgtccatcgctgtttctgagctagccgagacttctgaccgacaatgaatgaaagaatatgtatccaactgctatttcaaaggttggccccaaaaggctccaaaggaactttacgcgcattctcaaagattttagccgtaatctggaacgcgaagcgtcaagcgaaactcagtatcaagcagcgcatttcgtgcggttatcggctcagaaagtagcaactcaaattcgcaacgtattaaagcactatatcagcaagcttcttgctgaacagagttcgcacgcttccagaaccgctcggatcaatgcatggtcgaagttacaacaactacgtctttctgagatcggttttaacggatcctctatcgacagagattcgaatgggtcggatgaggttgaaccagcgtcactcaccagtcttgatgaagtaaatctgtttctattatcggcaaatgcttttttgcgcttgcgtgagatttcaagaactggctagaaggtgaaaaagacagaaaggcgcaaccctgcaggcccagaaaatcaccagttctcagatccgggaaccactgaaggttagtcacccttatgatgatggcagcaaccccattaacaagtttcatagacagtagatctggtctttccatacaatctaggacgtcggaaggacaccattgcgaacccgcccactaaggagaatcaggacagtcgtccagagagaatttcagctgagcagataagcaccaacatcacggcaataattttaacttggtggcagcgcttattcaagatatactctccaccaatggttggctatgaaggatccgttatagatgtgttagtttttcgcctttccaccacgacctgtcctaactgtgctctaggggtgtggggaagtttcatatgttgatgtcaaggagctctcagtaggggggattgagagatcccgacagagactccttgccagcgtcgctggtgtcagcaatcacacacatagttcaccccattcaatcccatcaatcccccacgtcgggcgcatattaatcgctgcatggccacgtcgttatccagggaaaatgcgacatgggcgaatgccaacatgttccaccacccaatatagctggagatacccaagccggagataacatatttccaaatccggaaccacagttccttcttatgtgtgttaacacgaaaaacccgacggttcttatctatgttaacgttgattccgttaccaatgaccaggatttattccgggaaatataccgagaataccggtgtgtacaccacgagcctgagttcaggatcaaaaacttctttcctctatgggcttgcaacttgcttcacacattttcagtctggctttcaacacctttttctctacctggcattcgtaacttacctccgaagctcagctc

SEQ ID NO: 12473 - DNA, 1738 bp, Emericella nidulans
tatatgctagttgtgatctcagggacaaccgaccggaagcgattacgagagcttggagccaagattgacttaagtcagttggaccaacactcgagcagctacaaccgcagcggggagctaagtgagcttgagcaacgtctgcgccaggcatgggccgagaccctgaaacgcgaaccggagtccattcggctagaagacaacttctttgcgctgggtggtgactcggtaatggcgatgaagctcgtgactatctctcgaactcacggccttgagctcaccgtcggcaacactttcaacactcctgtgctatcagagatggcagctgttgtcaaggtgtgtgattcgcaaacacggacagaaacgcggccattctcgttgatagcccagagtcccgagagcgctattctcgaggcggcgcaagcgtgtggaacggagccggaagcgatcgaggatatctatccctgtacaccaacgcaagaatccttgttcaccttctcactcaaagcagttgtggcgtacgttgcccagcgagttgcaacgattccatcgcatattgacatcgactcgtggaagaaggcctgggaagacgttgtcgcagctaaccctatcttgcgtactcgtgtagctcagatttccgagcgcggtcttcaacaagttgtgcttaaggagaaaatctcctgggggcatgcaaccgatctggagcaatacctcgaaaacgacaaagccgagaaaatggaacttggccaaaacctggcccggtacgccattatcgaatcacacggcaagcagtacatggtctggacaatccatcacgtagtctatgacggatggtcagagccgatagtcctccagcaagtcagcaaggctctacagaagcaacctattgagatccaatcccaaatgagggagtttgtcaagtacgtgcgtgacacggacgaaacggcaatggaagaattctggagacgcgagctgaggggtgctgttggtccccaatttcctcgtctgccgtctcgagactttcttcctacacccaacggcatggttgaacgccacatcaatctagagatcggtgctggctcaactttcactattgcgacgctgatccggggcgcttgggcactagtggcatcacagtacactgggagtgacgatgtcgtatttggtgaaacgcttatgggtcgtgatatttctttacctggtgttgagggtattatcggtccgctaatcgcaaccgtacctgttcgcgtacatgtccaccgaacaagctctgtcgaggcttatctccagagtgtccaaaaggccatgttgtcccgcacaccttaccagcacatgggtatgcagaacattagaaaagtcagccaagatgctcagcatgcctgcgaaactggtactggcttggtcatccaaccagaccccgagtacgtgggtggtgagctagggttcgaagtgggcgatgtcgtccgcgaagcactacatttcaacccatacccggtcatgctgggctgtggaatccagaagggtggcttcaggatttgcgcaagctttgatgtctctttggtcgaagtcaggcagatggaacgtatccttgcgcaggttgagactgcgtgcttggagttgctgaagaattcctccaggagagtcggcgatatctcctgcgtgcccgaggcggagttgaaccacatatggaaatggaaccaattgcctccgctatctgtggacgaggcaaccggcaagccgc

SEQ ID NO: 12474 - DNA, 585 bp, Emericella nidulans
atattgatctccatggctggggatcgcatattgtctccagggtcctgatgccatggtcttcgtttgtcttacacattgccagtcagttggactggcctgtccgaagggatcaagacgggcagcagaatatcgcacacgccatgatgcagatggtttgagcccagagacctggccattgcatagttcgtgacagaccatacatgcaaggcgaggtcttcctaaacgcctgcccaccacggtgaggcaactagcgccatcatgctatgtggtcacacgcatcctgcacctaggcactggtcgtcgcatgggaccatgccgccctaacccatacggactatacctacgtataccgatgctacaacggctagagcgaccggcaggtcacaccacgcgtgctccccagggttgatacactattaaactttcacaaacaggctgacgatgccaagggctcatcgcaaaggggcaaccgttgtgtccatcatcacatctatggtccagggaactgctccgcgacaaatggccgtgatcaggaagacaccgacacgctaggctcggaccatcctttgtggcacctttcttagg

SEQ ID NO: 12475 - DNA, 422 bp, Emericella nidulans
ggctgaaggccgcagtttatttacgggccgacactcctgactactgggggatgcatgcttttgtacccggtcggcctactaccgattacgcgcttgctcgccctagatcacgtggactagttgatgattcccgcgagctgatccacactgcttagactgtttcctgttgcatgatctccggagcactgtctagatgaacttacacattttgaggcgtatgctgagccatgctcgaggaagcctaaccttgcaccaggggcactggggatggcctgttctgcataccgatggaggaccactcataacgtctcactgtaatgccggcaacgaactaagcaaccagggctgctgacatatccttagtatgcgaagtggcttaggtaggctctaccagcacgttgttgatactaactgttagctga

SEQ ID NO: 12476 - DNA, 845 bp, Emericella nidulans
tctcaggccttgacattcctctggttaaactagttttagttagctttgctagtgttttatctgcatcttcctactcccacctttgtacccttcgtttccaaatctctttgcgaaaggcggccctggggagagtgttttctgtataattcagcagatcccccgcgcgagtctttttagggttctagactgcagactgggtaacgagcacggtgatagccacacatatgctgtaccatgatattggttacaggtacaggtatagtcgaagctttctttttcaccaaaatcaaaatactcgccattccagttactaaccagattcagcttaatatgcttatttggctacgggtgtggaagtgttgtgagtatcagggatagaagaataatttgggtgcatctgtttgctcccacttcttgtaaagttgaaccttctgagcattgcacccttttgtactcaagttagctggttttgagtgatgcacccgcacagggtttcatactttaaaaggtcggtcccggaaattcccaaccctccttcattcctgaacttttccaggaacataatttatttcggactcattgaaacccttcccaaatcttttactgtctcttccccgtgagcacgcgtggaagttttctttaccacccagctccctgttttaattttccccacttctagctcaaattttcccctaaaagaccattcccttttatattctccaggacctcctaatattttctctctttggtctaccatcgctccatctccggtttgctaaaccattcaatattttgtacacctctcatctattactctttattaacttaacctcatactctcttac

SEQ ID NO: 12477 - DNA, 422 bp, Emericella nidulans
cgccatctttaaatcgggctttgcggacgcagtagcaaaggtgttctgaaagaagaatgacgagactccttgaacagtttccgttatctaattggagtcggcacggcgagctttggttcgtcgcccttttcatgaacatgtcacttggatcgtcgaagggcgtagtctagtaaagaaccagtgggtggttggacgagctcctcttgtttcggcgtatgagtattctagattgaggctcccttagtctttcagtaccggtagataaataggagcatctgcaccatatcagggcgaatctaagcagcagatgaatttatatactatatgttctctacttaactacctgaaaaataatgcagcttgtcattgatagtcagggaggcttccaatacccacctgcaagacatacgtgacatgagatt

SEQ ID NO: 12478 - DNA, 800 bp, Emericella nidulans
agtcggtcttaatatgtacaactcgccttctaaccagactgttggttctgccctgctgctcgacacttttttcgtcaacacacccactggggtcgtgaccgtctggggcagcgacagcattcccgttggcgccggtacgctcgtcctagataatgtcgacttcagcggcgctaccaccggtgttgctggggtctacggcactgctatccttgccggtggctctgttgaagacaactgggttcagggaggtatctaccgccccgtgtccggaaacacgcgctccggagaccccacggccgacgctgaagccgaggatgatgaacggatacataccagcatcgagaccgattacgagtgaggaacctccacggcaaccctcccactgcccaggtaaaccacggaattgttgacaaacgctgcctggacttctggacggcttttgcctacaataatgcccttgctgctggccttggcgggctcttggctgcccttgcgggatacttgtgctgaggctggcgcattttcggtgggcatgaaaaaaggcgccccactgggacccccttgtttctaggtgagggatttaactttttggaaactgttttttcagggtaaggaaccaaaattaaattatggtaaaccctttttttggcacaattttttttattttgagcccgggggggggccctctgttttcgaagtttttggaaatctctctctaacgttgagaaaactaagtgaacatgtgtcttaaaaattttatcccctgaaaaaaccggacaattttccccccatttgcacaa

SEQ ID NO: 12479 - DNA, 500 bp, Emericella nidulans
acatagacttgtggacgtgcgaccccccgtatcataggggagatgctggcccaagccaaagcgattcattgtatgcacaactgaccgagcatcggggtaccaaggactgccgtcaaagtccgaatcatccacagtgtacacgattgatacctacctactgtacgctggagcggctgctttgacaggtacatgtgagactggctaggcgagaccaaaccataatacatgacaaaacggtgcgactcaaaacgaaccgaccaaaacggcctgcatatctgggacaatgacacaactgtaatgctgtgtggcgtccactcaccctatatggtggtgaccaagctccgctacaaaaaaaaagtactctcggacggaacccagggatacaggctgtgatcggacatttctgaatgttgatatccatcgatcgaacatcactgcgcgcgcttaggcatcattagcattgagatcggtgctggcgatgctaatgacccgcccggact

SEQ ID NO: 12480 - DNA, 670 bp, Emericella nidulans
agccaccggcacctgagtttgccgccgatcccacagactatttgacgccaaatgtaagctatgagcaaatctcatcggatcgcaatggcatgcttccccttcctgaccgggacccatccacttttcgcaacagcagtgacctcggtggccacaggcgactgacacttgaccctgaaagccctgcgaaggaccacacttcacgacttatccaaaagctcgatttacaccgacggtctaataatgcagttcaatcttctacttctatacccggtgctggaggtggcataagcagccttatctctgccagtcacagtgctatcttgtcggccgagattgatacgaataagttactacccccgtcgacccttacgcccatgacgttggcaaatccaccagccccaacaaatctgagcaaggcgactgtacttgtgagcaacgagggggttgggggggtaggctttggtgacaggacaggcggtatgcctagcggcatgatggcaaatctgtggggaagctcgaatggggctttatgaatagcttgacttgagtatgctggggttcagaagaaaaatacataacaggagccggaaccgagatttcgcacaacagtggctcactggtaagaaatgaaagcgcgcctaaccactggagcttgatgggcccttttaag

SEQ ID NO: 12481 - DNA, 4436 bp, Emericella nidulans
  unsure (1)..(4436): unsure at all n locations
gctactgcggaacaaggtcctctccaactatggttacgatgcacagtggtggaacggacaaccaatctatctccctaaaatagtgtcgatacatgatgcgcaggacggcaacaccgagtgggacgatatcctttatgaaagccagagaattgtcgccttcctggattgcacaacccgggcttttggcagcaccgacgcactggccggcctgaaacgattggagacatatggttcgagcagtgctgtaggaacatttctcgaggcatggcaggaagcagctgttgctgctgaccctggaaaccccttggccacagtcttttcgtcaatggcgtataaacggccgccaaaaacggacgacagttcagccaccgagcaggaggcatcgatcgatgaggagccgattgataaggaatttttcaccctggaaccgtatgtagaaccgatccatggccaaacactctatgatgttctagatggtaccatgtggtcagacacaccaggggaggagcttgacgacgtgtggctagagcatgtcgcggatgttctcactattcaattagacagcgttgacacaacagcaaaggcgattgacgtgaggatcccagcaactttttaccccgatcgatatctcgctagctgcagagatattgcgcgtgaataccgtcttcagaggctcaaaattcgcgaggacgttgtcaagctacgaagcctcatggatcgcctctccatcgggtccggtttatccaaaggcgtcacttcgagagaagctctggaaaaggccgctgatgctgcagcttctcttgcgccccaaactgagtcaaacgaagacagtactagtgttgaaaaactagctcttcaactgaaggccatttcaaggaagatagaagataaactcaaaggtttgtggccttggtctgttcaaaactactgctgacctttcagaactcgagagtcggcaacaacaggccctggagagtctgaagaactactccaaatacctgacggaaccttcaacttcaccaggcgaaccgccagtccacaagtatacactgagaggagtctgcactgagcctcatgtgacatatgttctgcggcggacgctccaaacgacaccaccaagcccaaacctgacgattacgagtggtggcgcatcagcttctctgtggacgacgcaaaatccagacaagcacaaaccggccgcccagctccaagagatgcagatgtaattgggtatactgtacgaaaggttcgggaggtcgaagtcctccgtgccgcacgggaagagtccaagaacgtcttgctggtctatgccaacagcaatgcgatgaattgcaaggaggagccagcccctgctcctcttcaggtatgcctacctccactgttacatgttcctctctaacaaaatagcgattcgtatccgatgacaacgccgcctttgaaaatgagctccaggagtgggagcataacgccgatacaagacaaaacgctgatacccagtgggagcgaacggtcggttctcggccagcgtacccctctccctcaattgggcaagaagatgtgcccgctagcaaagtcaatgtctttgactatcaggttgcctcatttgatgacgatcccgcggaagggcaggaaatgcaagagagaggagtgcggccgttactcggtcaagctggaagtcatggccaccaaggtcaaaattcaggaccggggctggaatagttaatgtaaagctattatgttatatatgatatatgggacctaccaagttacgcatcggcgtcaatgtgtggactttagattatcttgtcgatttcaaagttcagtgaggattgctgccaagactaaagcttcacctactctataatcctccgccatatccagcttcccgttcgtcctaccaaaacacgaaccccaactggcccagttatctcacacctcttctccaaaggatgtcctccgaatccgatacacaactagaaacaaccgcctcctccactctctacctgctagagtcccgactcanccgcctcacatacctcctaacaggagacacagcatggaccggcacgcccaaccccccgccgaaaccgtcgtcctatgatgagacagtttcgaggcgcctacagagattagaaagtgagcttgagaatctagcagggaaggttggtgtcgttagggatattctggggttgtgtatgttcctctttcggtttccttcgattgattaaggttggcaacgtgatgaaagctaacgaaggattgaatcgaattgaatgggttagatgaacgctttccagaccttttcagatcaacatcaactttgtcgctacccacctccacaaccgatcagacagacaccccggaaacaacccagccctcagacccggaaacagaaccatcgccccccctccagattatgcttagcataatcctctcctacgcgtctctgatttctgaaacagcctcaaggctaacaagtctaaccgacacgcccattccggacgcgtccttatccgcgagcttgatcgccctgcaaccgcggatgaatcagttagcagcgaaacaagacgagcagagtagggagattgctgaattgcgagtgcgaaccgcgaaggttttgcagagatattatgaggtcagtttgcttgggggtggtgaggtctggggggagtgggaggggcggatggagagggtagaacgggaggtgaagagggtggaggttgcaaggggacgagagggaatctaagtctgtcacttgtgctatgttaattgggtggatgagtttggaagtcttgagtattgggtgtgggacaatgggcttgttatatgataccactatttcaaatcttcaaggtgtactgatagaatgctattaaagttttaagttcaaagctccattgacaacttcatatgctagctgtaatgaaagtccagaatggctatgctgggtatctaacaaacaacaaaacgagcaaaacggcatgcacatagcaaaatatacgtaatgtagtagagcccccagaacaataccaaatgttccagttcagaaatcgatccatccattgctagattagggggaaataatattctagagagccccgtcctgtaccggactcggtccatccgcatgcaacgaagcaggcgagtcggaaccatccccgctatcaggcgaatcatctaccaagtcattcttctttaaatggctgagtttcttcgcagatggggacggggacgggtgcgatggtttccgtgtgccgttgcgcgtctcaggggttgaacggcctgagcctgtgttggagttggactcggaggtggcaaagccgcgccatttgcgccagccttggaagtcaattagggcctgcatacagccccattcggtgactttctgctcgagccattcaaaccggacgggctgcttttgttagcttgtgtatgaagctaaggactagacgaaaataccttcgttagaaagtcattacagccggcggctagagcttcatgacggtcactctgtagactgctagctgtcaaagccacaataatgactggacttttgaagagggataaatcatgtaatgtgtcctcctcagttaccggatccggcgaggttgcagctgcagccgtcgacacgcccgagctcttcttcgggaacacgccgataccattcagccgctcaagccggcgaatctcctttgtagcgtccaggccgttcatgacgggcagctgaatgtccatcagcacgagatggaaccctccctctcgccacttcgttacagcctcctgtccattagctgcacacttccaacgcacactaagacgcttcatgaacgcctcaaggagcctttggttgataacgttatcctcaacaatgaggacgttaatcggtggtaccgtgccctcaatgaggccgccaaatgcgccgtttaataatgacgcccggttagacttcttcggtttcacggggccagggcgaggagatgaaactcgcgccggcggggtatgtgctttcgttttaggcgactctgcaggtggaccaggaggtgtgggaactggtggcgtgggctggctcggggcggcagtttgcgaactcacagattctatcaagtcagcatgcatgtaagcggtattaggtaaggtagctaaccttttgattgcgacatcccacgtattgtcggtgagtgtgtaatattccgtgcgaggggaggtcggcgggtacgtgtccggccgccaggagacggtacttgcggagcatggccggtagtaagaatggaaatagacggggctgaatgggcaccagcagagttattcgcagccggttggtgcactggaggtgtagagaggtttatattggtcggcataagcggaaagtaatcgccatgctcgcccggttctgactgagcaaagtatacattacggtgaggtgaaggttttggggt

SEQ ID NO: 12482 - DNA, 278 bp, Emericella nidulans
  unsure (1)..(278): unsure at all n locations
gctttcaactaggggtggtcctggtcggtgtgtatatgtctgggatgcgtacgcgcaacgtctaaagtgctcttagttcgccttaactctgcacgttgcacgttgcgagctcgaagcgaagagccctgctatgggcatagtgattatcgtaactctcgtcgcgctctgagtgtcaattgtctgcttagtgcgcgttacctcgagggtttgtctagtagacgcaggattatggtcagcagctgcgtgtgagttgatttagaactgaaagnggctcgcca

SEQ ID NO: 12483 - DNA, 150 bp, Emericella nidulans
attgtgatttcctgactcagctccgagtcaatttgtaagcagcataagaatgagcataatctcgagtcttggcattcatctctgatgcgataatccgaactccgacacacctgattgacgtatggcgaaatgctactgctatcttgatat

SEQ ID NO: 12484 - DNA, 2189 bp, Emericella nidulans
tccaagtcctgacacgaatcctttgaacctggccttgcaatctctgtacacactcagaatatggcgactacggtacttgtaacaggagccactggccttctgggccggcaagttttcgacaaatttaagcgctccggatgcctcactgttggccagggcttctcgcgagccaacccacctaccatcctcaaatctgaccttgaaaagccggatgacattaagggacttcttgatgaagctaagtatgtgagacaatgagctctgatatgggaatgctgcattgaaagaccctgagacaataatcaatttcgtactaacacctgttctagacctcagatcgttatccattgtacgcccaggcacacctagagacttagacctatgatgaacataaattgacaatttatctaggcgccgccaatcgatcccccgatctgtgcgataaggaccccgagcgagctcgccgggtcaatgtcgacgctactcgcacccttgcagagttaacagcggagaggaatatcttgctagtctatatttccaccgactacgtcttccctggcgtcgagggagaggcaccgtacgaagcagacgcgccgacaaagcccccgaacttgtacggtgagctgaagcgggatggtgagcaggttgtgcttgaagctaccaaaaagagcggaatgggcatcatcctccgtgtaccagtgctgtacggcacagcaaatgagaattctgagagcgcggtcaatacactagttgattccgtctggaaagctcaggatgagaatgcgggcatcaagatggacgattgggcgcagcgataccctactaacactgaggacgtcgcgcgggtattgcgcgacattgtgatcaagtatctcaaggagcgcggtcagattatgaagcttcccaagattcttcagttctcatccgaagacaagatgacaaagtacgagatgtgcgaaaagttcgcggaaattttgggtgtgtccttgaagggaatggtccgcaacaaagaaggaaatgatccgaacgcgtcagtccagcggccgtatgacactcacctttcgaccaaggtgctgaaggacctgggtattgatgtgcagacagtcgactttgtcgattggtggtgagtactcgatcaagatcgaccggcgatttgctgcaacctactggcagagctaacgcgaaacaggcgaaaacacttggaagcacagaagaaatgaagcgactctcatgaagaacgagcatgaatatgatagataagaaaaagtaaacagcaatttgccaagaatccttcgagtgcgtagtgagcttttactgtctgagcttttattgtctgctatcctactgaacgagacatgaggcagcaggcgagcgtaatgagacagcgtgagaggacagggtttgaatctgtagctggaatccatgattataatggatatattgaatcgaggacgctacatcctggccaatattaccagcattctcagcggcgtaagcgcgtagccgcatctttttcttgccagttgtcttgcggccttgagtcggagtgtgccgaatgcgccaatcacgtgtggagtctcgacgatccgatttcgagacatcagtctgatccaagctgacaaggatagaagtacgatgcagatgaagtcatgcaggaacgtgcatttcttgttattaatcaaattttcgtgctttgatagcgtgacacttttttggagacaagcagacgcaccacgacagtctaagcggcggaatctaattccattcccccaatgatctccctcactgtgtccgatcctcttcctccagtctttaccaccagagaaaatcttgacgcctgattccagccctattccaacttttccaagttcttgacacaatggaatcatagctgaagagcattcaactctccaccccacgccaagtactaggaccacaggacgagccttaatttcgtctgagcgccccttgcctggagcaggtggttcgcaccgcagatccaccgagtcgcaaatcgcaaagcgagtccctgacttaaatctccgctatacccaggcgcctagttgcgattgcaatcgactcctctttttgcttttttgaggccgcaattcgctttgtctatttctggggttggaatcaggccaccgattatgaatggtcaaacgtttgtgaaacatttctgcaggcta

SEQ ID NO: 12485 - DNA, 589 bp, Emericella nidulans
acatgctatgtttgccacggtttcttatgaccagcggagggctgggcaagcagactgaccggttttcgggcgagctccagtgcgtcatctacaaatagtaaagcttggagcgggtcccgctaatgaatctggattttgtgcagagccctgaaagataacacggactgtgcaatgatggatgtgggcgggggactcaaggggataatgcacaggcagacggactatgagactgtagacagagcgtcaatactgactgttgcattaccatatgaaatggaaacgaccgaaccaaggaatccatatcttaaaccttgagcttaagggggtacgacttaacttacactaatctgagcgaccgcgagaaagactccgtctcccacgctagtaaaggactggagacgatgtgctgtgatacagattgagctagctacgacgcgagagtgcctacgagcaagatcgtcagtcttcaagtaggaccgatttacagaccggatatacgacagaccccatgtagtagctggatacgaatgatgttatgccacattgcatagtgagagaacatgtcgacagagttacatgtccacatatg

SEQ ID NO: 12486 - DNA, 104 bp, Emericella nidulans
gtaaggccagacgagtctcatgagcaccgatcgtagtgatgtactgagttggaatagacctgcaggcaacctatggcaaccgccattgcacactgtgtccagtg

SEQ ID NO: 12487 - DNA, 1098 bp, Emericella nidulans
cactgactgccgcctaacatatccctattcttttttttcagctcttcatagtatgatattgcggtacagttacaagtcctcaagtgcatcaacggggtttggttcgtgtaccgttcgctataagctgagcacaatagacgtaatgtgtctgggtcgagctgagcataaaagaagacggggaaaatttaggaaaagaggaaccacgccctgatagttttcgttgacaatagtatcacgccttctataacctattatgaatgagtgaggtttatcttttcagtttggttacatacaggagaggagccaaggatgaacgcttggagtcaggacgacgtatgcatgcatgtacaaatgacccaagaacgtgcatgggaatcttaaaaattaagtatgcgcgtagtaatgacgagatggagctccccaaacaagctttattgactgggcttgaacaaaagatatttcaaacccttccttttttaccctttccacttacacccaaaggccttttccttaacaaacccctagcctttcctgttcaacgccataagttgccgaaactttttattttttgaaggagagattagaagctctttttaccaatacttcaggtgcgacggatgccggatcttcgcgcaagggctaacccttgtataaaaatgggggcaagaccaagattgctcggtggaagtgagaaattaaagaggacctcctttaaaagagacgacatgggggagttgttctaaactctagatatttggaaatttatttctatttgagcatacttgccgttgaaaaccactttagattttcggctcgaaacactcccctaaatattatggatgctcaaatataaattctctcatattatatcatcatattacctaccttttctttttctatcccatttcactataaaaacaacattttcatttatttatcttccaccacacttcattactcatacaataatatctttattattttcctcatcatattaaaataataacagattttacttcacgctctatatactttattcatgatccacatattcaataatctaccatatatttatacaatacattaattttaaattct

SEQ ID NO: 12488 - DNA, 641 bp, Emericella nidulans
acggtgataccttcgagccgagcgctactgattcggtccgaccggtatgggccttcacgacgcagaggtatggtggacacacatattgtgttccagagtactatgctagagataaagactgggatctctgcggccatactgaccctgggacatagaccatacagggtgcagggactggcagaacttggctatgaaaacaatcatcttggggcgaagggcatacaaactaatgctggataggatgcagccccaccttgagtcagagtatgctagcaccgtacatacccacagaatgaaaagactcctaagatatggtatgagggcaggtatactctgagactatcacaactatgcaccatccgctacgcaaagcctgatacactcactgtcggggtctagattttgcatatgtttacagcgcaaattctgaaggggatcatacttcgaccgtgcacatatatgtctcatcaggggatagtaggagagagctgacaacaaaggccacttgttgagcagtggctgataaattttcggggcatttcattgtacaaaatgtacgactgtctgaagcacactcttctaggatcggctgatggcgatcagaagaagaaactgccactagtttatgctagttcagcagt

SEQ ID NO: 12489 - DNA, 965 bp, Emericella nidulans
gagattgaagacgatcccttccgacgttaatagcagactaaacttctgttatttattatggcaatcacgttttaatgaaattggtgacataaaatccatagataaggaactgggaaacaatctggtaaaacttcaatctgctccgagtatcgggctagaaaagtgtggggattaccgaaagagtagtgaaacccagctgcattggctaggtaagtgccagaaagaaccaatgcttttttcaaacacaagataggcctgatatcggaattatacgaggtataacttgattctcattgtcctggagaagtaagacggatgcaattataacatcgctcgtatggctttctttctagattccaggtttgtaggactatttgatataactgcggagatatggccgctcgactaagtcgccgcctaatctacccataataggtgaactgatatgttctggctctgatatcgtccgcatgatgggactttgggctaatacgtcctccacaggcgatatggagaaaattaatgtgaacttaagttatgtacgatatggatacttgggaagaagccattatggggctagcttttagggataggcgggtacctacaccaaacgaacgatgctatacagccagccaaggatggccacgagataacttgggaggtacttggatatagtagtatattcttagacctacaaataggcgtaataatccctctgaaatagcctcacagcatgaaatactgatgctgactccttacgatatcctaatgacagcccaccggctgtcttaaaccccactagggagtactgataactgtgtctcaaaaaagtatgaacatgaaccgagcaatcagctaactaccgaatgtccatttaggaagctgagaacacaaactcaaggcggggtccggaccctggtaccagccttcagagtctggtttgcacaatgcgcagttttggggag

SEQ ID NO: 12490 - DNA, 271 bp, Emericella nidulans
agttaggtattagggtggagagtgttgttagattaagagtgtataggtatgtcagaggaattagaggagacacccccacctatgtgggtaaagttaaggtgggataatgatgttagacggaggaattggaggatgtctatgagagtagagtagatatagttgatatgagtgcgaggaatgtagagggtagtcagggataggtagatacatatggaaagtgcagtggtttgtggggagatagaaggcgtggaggtttgagagggtggggttt

SEQ ID NO: 12491 - DNA, 3082 bp, Emericella nidulans
ttagcttatgatcgcccgaattaaccctactaaagggatccgataagctttcctaccgagttcagcccagtcgttcgttatactgttttaattgaaagtatatatagagcttcacatctccccggaaaagagtacaattccagcagcatccttccaatcgcaaacaccaaagcctctctttttcttccttgttgatcaatcgctcttcagatttctctattctatcaaatcagacgtcaaaatgaaggtcgccactgccctctctgttctcgccgttgccggttctgctctggcttctgctttgccctccgctgccaactctgagaagcggcaaagcgattgcattggtcctctcctttgctgtggtagccttactactcctctcgatccacttgtcgaccccatcctcgagcttgtgggtatcgacgcagctgcaatcgttggctccgttggtcttctctgaatgtctcctgtagttgtggttacctactctccttcactgcgctaatgtcgacaggccatgcctacgacgatacttgcacttccgagccccagtgctgcacagaagccaacctcttggtaagccttatacctcaccggtgaagcctgacatgcggctaacaaagtatagggaggtactctcggtcttggctgcggccctctggagcacggccactaaatgcccaatggttgaagaattgtgatgcgtcgtgaatcaacctgagcggctgtggtatatagtatgtttaggggtgggattatgcttttgagttgctgtattttcaagagtgcatttcgggctagatatatctacttacaattttaataagtcactaattctaatcgacctcaatatgacctccgtgaagtgagctcttttagctcctttcccactgggcttactgtcagcgagtctatttagataagaccctgattcactttctgtgaaaccaggttatactttaccctgtccgctatggacatgtagaaggcactgagcacaactaagagaaaccagcgcgggaattctaagacatttccagagctaaaatcattagtagtcataaaaatattgagactagtagaagtcctccgtactctctaaccgccgctgcattgaccatgtcaatcgttgatgacaagcccccaaccccgccttcggttgctggggcagaatccaaaacaaacgagcgataactcgataagaaaatgtgacggctaaggtttccacccacaatcacgaaattcctaacctcaactgggctccctggatctgcccacgaaaccgacaagaggatggatggttttacgcatagaacattctgaagcagcaggtttagcgtgtttcacccgcaacaactttgacgctcccaactgaagacgccgtcgtaaggcatcatcaacagccaaaatagtctactgagcaccaactgacgatggatgaaagaaacagctcgacatccacccctcgatatcgcaggaaaactcccaggacgaagaactggtaccagcgaaaaccagatcaagattgcctcagtcggtctcaatcatctcggttgaacaacggagatagcgtttcgtaagacacgtacacagcccgctgtacacgatggcacgagaaagcaacgccccgattgatctcacgaccccggtaaaaccgaaggaacagacaaaccgtcctctcccgcaccagcctgagttcggggtcccctcacctctgggccgccagccctaccctcaaaatcacggctcaagcaatccttttaacattcccaagcagaaccgccctagaccagagcatcatagaccacaacaaaattatcaacgaccacacaaccctctccaccagaatgcgagccgaccaaactttcctccttcccacgccgcgtccactcccaagaaccgcaagcctttcgaccctttcaaacctgtccgtccctccgcctacaagaatgatgggatgtctcgccctgtcaataatgaagtcttcgagatccgccgccccgagaatattactttcggcactcccagagccccaaagacttttttcgccaataaagcttctccgctgaaacaaaatactgccgctaagaatctgcagaactttgtcgacctaacaacaacaacgcccggaggtggcttttctacttctcggacgagccggaatccaggattcggaatctcaacggcgaacgattgggttgatacagcgaaggctaatgagaatatcaaagcgctgctggaaggagcatttgaagacgaagatgaaaagcaaccaaagccaaaaggcaagaagaaaaagaacaagaagaacaaggggaaaaaacagaacagcgagagcccgaaagccaaagaagagagttcggatatggatgacctagccactaagctgcagggagtgagtgtcaacgagagtcaacaagctgaaaacgatgacgattttactacgaaggatagcaccaatgaaacagatgaacaggaagtcgaggactagaaggacggcagtgacgcttgttcggaaaccgaggaagacagtgaagacgaatacatgttgggggttgttccaaggccttatgggtttaactggttcctcaccagcggaggggagtaactgggatgtgcgcttaagagatcgggcttactgaaacccaaaaaggagggaaaagggcccggctccgaaaggttggtattttagcagaccatatgtgtcttgggaaagtcaggccaaggcatttgccttgtgtttacaaatcaaaaacccaagaagggtcgagacttttaacattactgtcggatcacgaccaaaacctgaaattctttttaaaaagggccgtccaaaaacttcccaatggttggcaataccctttggggtgccctttcgtttgtcaacagggttttccgaccaaaccaagttacttttcaaatcttgatctttttccctttttacgggtaaaaaattttcttttaaattatttttttctctttttgcctttttttacccacttcccaattctgaaggggttttttctttggccttttttttccccacaaatcctgctgatctattttttttctttttttt

SEQ ID NO: 12492 - DNA, 559 bp, Emericella nidulans
cagcagttgttgacacgtcacgcccacacccgtcgggaagggtacactgctagaaggtgctaatttttttggcatggatgctgagatattctatgatccttgcaagatggttggcctgtttgattacctccttgtttaagttctcatcggcagccttttgatcaacttcttctttcacacagcaagccatattacaaatgggacagttcttacggcaatcgacacaccaaaggtttctatgatcccagattctggcctcgttcggtctgcaaggtgccttgagttcatcgactactatcgttcgaatctcggttctggtcacgcggcggacataggccagcttttcgggtgtcagtccaaacgcagtgtgcatggtgcatacttaccagttcatcgaacgagctcttcccaatttttggggcgcttgtgttgggcctactgctgttcatagctgcctgggcctcgcagtaatcgaggtcgatcatcatataatctatcgttagcagtattagctgtcaaacgagcagcagacaaaggagtatcagcccatacccagtcg

SEQ ID NO: 12493 - DNA, 184 bp, Emericella nidulans
atgaggactgataagcaacgtggttcccgacgtaatacggacttatactcacccgatcggatagaccttgtggatgaattgcatatggatgggcagactgtgttgagcgatggtggcaccaaaatatagctcttagatcatgaaaagatatgttaagatatggcagcggatgaaggtattttaa

SEQ ID NO: 12494 - DNA, 660 bp, Emericella nidulans
  unsure (1)..(660): unsure at all n locations
aaaaagatgccatgtgcttacgatactataatcatagcgcagagctgtgcaggcggggaagcatgataagaaccgataaaaaggctgatgttcatggaaagggctaaggaacgagcacaaaactcaaagagacatggccaaaataggcccagattacaaacggctttcaacgaagtccatatggtgctggccaggccagtgagcatcaggccagatgtgtcgaatagcttcccatatgtgcctacgtagtttacgttagtaactttatatgagaaggagggatacaagaacatacttaacatagatgatttcgagaccattgcttacttcttccgggacatccttgacatctttccgattctgatgcggtagaagcactagtggttacgccggctcgtagcgcaccgatgagtttctccttgataccgccaacaggcattacgcgcccacgaagagagacttcaccggtcattgcaagcttcgggggtacagctttaccagagaacagagaaatcaagcgtggtggtgtgcgaagccggcagacgggccatccttgggaatggcacccgacgggcagtgcacatgcaaactgcggntcctcatgatgtcctcattggggtcgatgtttagccaagctcgaggagtgagcttttacccagt

SEQ ID NO: 12495 - DNA, 529 bp, Emericella nidulans
ggataacttataacgggacccctgtaagtagtattattttggcgattaaaagacaatttttttttcttttctagaattgaatatttttattttatttttactttcccttaagcctagttcctcacacgcccctccacgaccccatccatcaatatcatcagcagcatcatcgtcggcatcgtccacccccagtcggaccctggcctctggtgttctcgttggccaatctgtttgctgtccgatccactgctgagtccagatggtgctctgctcgtagggccagcaatcagagaacatgtaacaatggctttactcccctcatgctggctttgacggaccccccttctttcttcttactcctctcatcccctgcgtgggctcgcctcctcttcaacctttatactcatcaagcatccgtaactgtcaattgcttcggcgtctgccaagtttactttgcggttactgtccgaaccgaggccaggttcttttggttcccggctaccggacttttaaaaaccggccgccgtgt

SEQ ID NO: 12496 - DNA, 866 bp, Emericella nidulans
tacaactgagccctatagatagagaccggatcatgagtgaagatagaccgaaggcgttttctgaagctttttttgcattgatggaaggcttcttaaccttaacgtgtgacctttactcagcttccatgatggtccgggggtgagcatcaatatgaccccaagtgctccgctttcgcctggaactcctgaatgacctgcttctcatgcttgataggtgtgatcccatgaatcttaccaaggctactggtagcgatgaaccttggtcactgttcaaatatgtgacgatgctgatgattggtcaagctggggatacacccattgctgagaccaggctacgccggcgctggctcgatctgacatttgaaggctaccaggctcttattcatatgattgatctgataatggagcatatgtcgagtcaacattacaatccaggtctctcgctataggacaagcccattgactgccctgcatagccgcagaatagcggctctacccgtggacctatcaaattctttcctctgcacctcttaatcaaagttctgaaagaggctctcagtcgcaaaaatgagcggtcctctcgtgattcccaacattcaataatcctcctcctcctcctatttcttccccattctcgcccccttcttagtcttaagatctctatctccttctccattcccccccttactcctgttctcatccctcttttcttcactcctatgctctcccctccctttcactggttccctctacataacctcttctttttcatcattttaacttttctatcttctgacctatattcttctttattttcccactcctttatttttttacttattttctttttttcatctgcttctccc

SEQ ID NO: 12497 - DNA, 1870 bp, Emericella nidulans
accaatgtcataagtctgccagttgagcgcacgcatctggacaccacgtcgccagaatttaagggggtcgaagttagacgatcgtagccgaaaaccggagggatatacccgcgtcagatattttgaattatgcttctcgaaaagggccttgttgctgggctcccgacaaatactttcaaaagaccgctcggcaaaggagtaaacgtggttgaatgcttggctctccgcagaggcaaagctatgccatttgtagccgcgtgtgtacactcccaagtcggacaatggcttagtgattttgctcttttgccgccttcttctctctttcctgacggagacaagaccaccgtcactgtcctcagtggcgctgctgatgctggtggtagtcaatgacctcctctcgggtaccaagaatggacccgggcaatctgcacctattgtgggtggacttgaaagcgacggaaggttaggtaatgtaggtccatcggacatcgaagggcgaatgaaaggagaacttgagcttcggcttccgaccatgaaatgaagttattgggtcttgtcgtatattttccgtctcatcacacgtcttgaccttgatgagaatacgacgcttgagctcttctggcgaggggagaacgaatgagttagaaagcggctctaagatcagcttttctccgaaggtctccttcatgattttcaccatagcaatttgctgttcagggttgcagtgcacttcaagggatatgacgagtggaaactcgctagaaaagaaggcgtagcggttgataacggtgatacaatcggcaaacaagacactagtggtcatggtccttccatgagacacaatgggccgaccatctgcaccatcccagcaatctatctctatacagcggcatccctgcgttaaagcgcttatatacgcttcggtgctagaagaccctgcgacttgtcggccaagaagataggtgttgtgggagcttgagataaaatattcgttcaacggccggtcaaatctggactgaggcgagcgagaggcatacaccccattgcgggcagaggcaagaaacgaggagaaagcatcgagactcatgcgagaagactggtcctcagagctcgtaccagtagggctttgtgtgcgcgatttcgactttctgacaagtttatcaaagacagatatccaatacgcgcggtcagaatctatatcctccttctgtacgtcgcgaaggaagattagaaactcctccaatgtcaagccctcacgatgatcgtcggcgtggctcctgaagatctctcggacatcccttcgctctcttagacgtgtgacgaagtctttgaattcatcgaaattgagcttcccgtgcttgccagtatcagccttcaagaaatgagcgcgtaacatattctgggaacagttaatgtgcagactttgacaaacgctttcaacggctgcgaaatcgagcgtctctgtgtctcctgctttcattccatttggaaaaagcctcgtcatttcgcgctgccagtgagcttttagaaccgattcattttggtttgaggctgccagaccagccataagccccacccggtaccgcgaaatatactccaaagtcgtcgtccaaagtttcagcagacgttcgtttggggcaataaggtgtatcgtcttgactggtcggcctttggatcgctcggcatccgcgatcacaattgtaaaccatcgattctccgcatcttgggaaacttgatgctcttctcggtaattgcgtgcatctgcaccaacccgaatctctttgacatcgtcgatatagaaccgcttggctggattcgagggatcccagtagactttgcctgcgtctagattgagtagaaagcgtacttg

SEQ ID NO: 12498 - DNA, 3332 bp, Emericella nidulans
  unsure (1)..(3332): unsure at all n locations
gcatgaaaccaacttgagtagaaatccatcggagtacttcgtcggcaaaagtcccttcgatattgcaaagtcaatgattccagaatggaaggcntgtctcgctccggagaattagggtcagtatctaaggcgtgtcagtactgttgacaagacatcgagggccttatatactaacctcggagaacagccaggtaagttccagggcgaatactctcgcgaggaaattcttgagcgcgaggcggtccgctccagcttcgaaaaaagaccaagattttctcaagtccaaagcttccgtccgtcgcacagcatctataatacgctggagccctatactatcttcgacaccatcactttttattgcagaggcaaggacattctcattcagattagttgcgctgactgggtcatccttccgggaggattctgccgcgagtgaagcctttaatctcgcgatcccagcctcggtctcgttgtcatcaactgcttgtataacgagagcatccagtgaattcttgtattttggaggagcagttttccacaatggaacactctttggcttcagtgccaatcgatcgcgcgaattatctgtcttaccttcaccagtatggggtttcggagtcgttggagtgaggaacatggacaagatgtcgtcgggggactcaaaagaccctacagagtcggactcatcatcggaattagtcacaatcaccttcccattcttcataatacgctgggatgagctgaacggtgttccagtccgggaactctggaagctcgattgcggcgccgagtcgttgtcgacaagacctgctgggtcactttgcaggctcgactgtggtgctaaaacatcctcaatttccgcagtgtgtagaagcgattgatttaactgcgctgaagggccattcggggtatccggagtcggaatatcagacggtaacggctctgatgagagttcagtgggaggtgagggctgcggcgcggcgttctctgccgaagacccatgttgagtgtcgtcaggggccgaggcaaacttcggacgcttgaaataactagtaattctccgtggctgggacatgctgtgtaatgtagcgcaagcagtccagacactcaagcttgattttttggtgttttgatatccacgctgggcgcgttaacgactcgcgaagtcacgtgatattggcttctctatgagagtctctgccattctctcccaattgcattttgacaatgtatctaagacattggtgaaagatatatagcttaaaaattcagatataggcctcattcgttactggctcgcttttcagccgaatgcatgagcgagcatactgtacagtaaatagataatgacggcctccatttacagacatcaatctgaaaccttggagtctctgtaatgtactgtacttgtggtgggccactctgcatcaggtgcgcaatgcagcaatgcgtgagatatgcgcgagggagcgggttgccctttctttggcttcgtacaatgctaaatatatacttctcattggggtggggtcgcttgcgtccgtatgttgcgctgtcaagaagggagcagatgggcacttactagatccatggatttcgacttacggccagatgccattgttctggcacatgtaaagcaaacagtcagacaataagaatttgtctatccgtagatgcagacgtagcagggcagtcgtctgagatcgcgggaaccatctcgactccccctgattgggaacagcctcgcgggaacttggcgtcggcccctctttacgtcgatcctttaagagttcttatctccaccgtactctgaggttagttcttgtcccgtccctatgggtcttttaaatggtgtaacaaacaaagtgattaatagggctgtcctaattacaaatgaggatctggaactactgggagaacatactgtggccacaagacaccttcgtaggctgccgaggaggccgtttcgcttacgagacgaggcagtgttgcgccgtcagcgcagttggtttcaaaaagacgagtcttcgattcgacaccgtccttcgtgagccagggtaaaatcatgatgtgctgggagtacgcgttaaatggagccacgctatacgtgattgggaaacctggtctgtgcacgtacagtcaggcggatccacgctcgaaataaattaatacaaaagaccttggacactttgaatcatagaatggacaaaccgaatcaagttcatggctctagaagtgaatatgaagaaaagcaggatgtactccagaacccaaatctcggtaacgggggaagtcccgcgagacaagtacgatattatataatgaggcatgatagacaactagtagtggtactacgtagaacctctagaagcgatggatccagaaccactaagccctggaaggcaaggcgccgcaatgggctgtcaagcaagagctcgaagttccgctgggacccctttcgagcgccttttgttcgttcaaagctcgtataattccccccaatcctctcgccgaacgttgaaactcgaggtattagggggatgtgcttcgagaaggatttactcgaaagctgcaacctgcttgactgactgtgcggtcgaataattgcccgctgcaactaatcgaatgtctcagcggactatacacgatggcccatcaataatatggacaagtctagtcagtttcagcctgaagactgccaggatagattcgattgccggcaacctcgtattttattcactacgcatatataagcgataagacaacgattcccaaggtgggatcggtagatcatggctggtcctagtgtcaatgttccgagttcgacaatacgaaatgcggtcgatggcaatactctatggagcaagtggctcagatctttggttcgaccgagtagtaggaggccgatttccggaaagcgtacggagtacctcatacggagtacctcacctgggtagctcggatcatgaaccgttgctgaataattccttcaactacgtccatggcagtcgcctccgtttgtaccagtttgcaccgagctttcggttccgatgcgaacaataatgccaatgcccgccgggcggttgccacattcttcaagttttcgcgtagccttacatatcttgtcattaccactgccggctcggatgaggctgggctcgtggaaaatccagcctgtggtatgtatcaatggtatgaatgatacacaaaaattaccggaagaggatggatggtggtggatgatggatgatgaaccttcagtcagctccaaggtgagactcgaactttgtatagcccaaagtctgattagtgtcagcgaccgggttcagcca

SEQ ID NO: 12499 - DNA, 4117 bp, Emericella nidulans
ctgaccttcaggaaccttaaacgttcgtttaatcgcgtgaacttgtatgtacgattccttcccgcaagcctgtgatgagcggtttgttctcaagtcgatcaacctccaattctctcaggaaaggtaagagtctcgcttgcagtttctcagcgatttcagggctgtctaagatgattcgactgctgttgcgcgaatcggtggatatcttctggcggccgcgccgacagttgatcatggcacgctcccacttaccgtcggccgtgctcgcttcagctaagcggagaagctccttgcattctgtctcggtgagtgcgttgtcgatgacagctgcgagatatctcttgtattcaggaagcgggggctcagtgcttgcgaagtcgattactcggcagcgagcattggccgggggttgcgagggaagaaactggtcctttccgaatgccatatcgtttacaccgtaacggttgttgagttcttcgttcctaagtctttgttcttgttttcaggtcagtcagtatgttttgaggaggttacggctgaagaaacggcgttgaatctaacctagttgccggaactctggggcagtgcagcaagacggcctaacctgaaaacacctaagagttacaccagccgcaggagttctacatatattcactccacatgttcaataaatatttggtttacagaacgaaatacatagtatgtatactgcgcgaagtccttaactcgagcaatgatcacggattgagcaacatgagctcgttcataatatatattccgcgccaaggacatcggcggttctagccctaccatggatcttttcatcaacaatctcggctgtgatctcatctccatctagtctagcgtgttgcaagtctttccctgggcacgcggtcttcttttgttaggagcttattcgttctccccgtcgccagctcatcttgcatccactgccgactcgccttctgaatgtcaagatctgcaattctctcagcttgggtgatatccttgccagcatttttttagtcatcggcttgtataacctcctgtttctgctcaataaccgtcctctccttgccttgctcgtggtaggccatcgaaacgcgtgagccggctgttggcgcaaccagtgcatgtcgcaagagatcaatacctgatccctccaaccgcactcacttattcgaaatcgagatatctagagttcttcctttactcgaggtgtctgggattgtcctatttcatcgtctataggtcaggccatgtcatagtacgcccatttgctgatacatcgcgaaacttcgccgataacactaaatataggtatgagagtatattcctggccggatcccaatttttcaggttaccaggagcgacaagcactcctgagggcgatcattgcgatagtaaggtgaactctctttacggcgatcccaacatcataagcattcccgcgacagttttgtcatcacgaaggagccagagcgaggttcccgtgcttgtgaggcgtccattgtcaggtcctcgcagagtcagtcaagttattccgggagcgaatggacaacgcggtcccaatggtgagaaagtagaaccttaagatgtcatggtatgggatcaggcgaaggtgatccaccctaaacttaagaacaatggcagtcagaaagttacatagggcatggtttgtcactgttggcttagaagggactgccggccctttgtgtaacaagcccgtcaaacccattaacattcgacgcagccctcaaggcctctaaaaaaaatcagatatggtgccgtgtcaagtcatttcaaactgagccaagactccttccactgcggtagacgccatggcgaccagcatgttcagaatgacaatgatactgagaaagtcaactatacgtggggactccggtagttactgctacatattgcaggggcgcgaagcattccatagctgacattgagaggacgcttgaaacacggaacttcatttgcaaagtacggtggcctcgatgctaagggtagccgtaactgcacagcttcccaggacgaccacgcatacgtggctcagattcaagggggagttatgaggggtaggtagatcaagccagactcagtgagctgtaaacaagtgtgtaaagcgaggcttatatgaggaacatttcagatgaagtggcttttatgcaagacagctctcaaatactacttacgccctaatggcatttcgcaacagcagagtttccatgaagagagcagagtgggaggaagaaggagagaaaagcttcgcaaacaaaagtttgtacaggtcgactcttcatactggtagtaagcacgttctgtccatgggtagagacagagcagctactgacagagtcgcttactcgaaatagtgtctccctccttcggaacctgcttagattagatgttttctgctgtctgtaaatgtgcccttgtacagagtaaaagaccgcgcctaaaatcatagtaaaagtaacaacagcatgaccaccttgcccggaccccgtagatggtctacgacagatatgcctttgggacagagaggctctatcacattgatattaccaggtaaccgggacgaagagttaaaatggaatgtacagtctatggtcatggggtcttcccggatctatgcccccaagtcacgaggtctactctgtcgtcctcagaccgggtcagctacatacgttgtgcttccaaaggatgatatcgggttaaacgtgaccccggggtgtccaagagccgactgcgggataccgcatacccattatgcgctctgtcagcccggtacaagcccgaagagcactgggcttcaactggaaggtttaactgaaagttatgtaatagtacattcaggcaaagcatttaaggaagatctcataagctagtacacgctattcgaacgaaacacagcctggaatgggtatgtactggggtgatgaacgggcttacagtgataggtagttggcagaagagtggtgaatgtagcggtagtccgacaagagactaggttcaggatattgcaaccgggatggcgccgaagtcacctaggaaatgatcccatggctcggcgagaagtatacgataaacggaagaactcatcagcgggcgaacgccgcctcaatacccccgaaccaaggacgcttttccgacccggccgaggtcacacgatgtttcacggctcacggctcacggcctccttttcgcttaggcaatcgagggttgggcagccctgccgtggggaagatggaggttacgcgtctcggggcaacggcattatcaaagcgtagttgcaagaatagaaaaaactgttaatgggcccaagatagaggtgaccagaatcgggctcatgccggtcgtgccgggggtgtgcatgtccaagtgtcgaactggaaccagggtctaaaaaaaaaaatgagaataaaaataaagcctgaaggaattggccaataggacaaatgcaacaatgataagctcgtcgggtgacctgaaaaccggaattccactacagaaagcacggactaccataatggggcctgccaggaaccccggagttgatccgtatctctgaatctggagttaaggactgtggcggagacaggcggtaggcaccgtgaaaccaaggatgcgttgagagaaatcttgtacccattccagcagtttaatcatccatgggtgagttatagatttgtaaattcgtcaacctggaatccttctctactgctgtcgtgaaattttaggagccgagcccgcgagcgttcttctcaaaactccaaaccttgccatagaacattcgatgcgcttgattgagcttccagaaccctccaggtgaccagctgcggcagacttagcagatgttctggaccactcactccgttttcctttccccaagcctaagctctccaggtatgccggcgacggcatctcctgaatagggaattccgacaaaacgccaccaaccgtcacctgactgtctccatgcctgttggaactgtgtcattgtcctcaagaaaaaaattccagcaagcgtcatggcgacatggatcgtttgaatggatagtttaatgatgatctcattcccattgttttagaggattcgtattct

SEQ ID NO: 12500 - DNA, 684 bp, Emericella nidulans
taccgggtgataacggagccgatggtgataggggactcgtctctgtgcatcgattagaagaggggagaggggagaggagcacaaatggcatacaacttggcgtgcagagcccagttcttcgtctcgaggcgcagtctggcagctttgcgctggagcaggaccggggcgtaggtctctggcaggacgaaaagaccgatgaggccagcagcggcagccataatcatggtgatccaggccgtccagcgccattcgaggtaactagggcatttcattagctcgcgtcatcagactagcagagtgtgtcctccccccttctcacctctgcgtgatgaagcctcccaggatcggccctacgatcggtcccactagggtcgtcccgctgaagatggccagggccagccctcgctgaacgggatcaaaaaagtcggcaaaataccctcctgcaatagacaagggcccagatgcggccacaccgccgatgaaccggcagagaatgagcgtctcgatgttgcgggcgactcctaccggtatctggaagaccacaaagacggcgtatccggctattagcggccgtttgcgtccgtatagttccgacaaagggccgaagaggagaggaccagctgcgaaccctgcatttacaatcattagtttactatccatcaagtcgagtcagtcaagaggacc

SEQ ID NO: 12501 - DNA, 157 bp, Emericella nidulans
aaatgactgccatgacagcaccccttggattcgacgggagaggctttgatgtctgccgaagagctacagggagttagtatgatggtcctttgatctgctaatggaatgccgttgcgtaggcccgtgcactttccgcggttctgtactgatgagcttg

SEQ ID NO: 12502 - DNA, 566 bp, Emericella nidulans
aaatggagctggaggcgatcataagcagactagactcctggagccagcagacataagccgtaccaagcaacgcgttgacgcgcctggtgggacaggggcaataagacgctggcttgagctaaacgtgatgtattgaccggatggatatcagtaagactcgccgtaggaaacgaaaatgacacaagctggcaaaaacacatcatatacaaagagcactcaacgacgatcatgcttaaactcttacatcggtcaatagtactggtacattccgcctaccgctagtatgcactatcgtaatccgaatggactgcaccacatacaactgaaaggtctgatgacatgctctagacacccacagagaacctgaacatcagtacgactcatacgagcgagatgcacaaggatatctaacagggcctacatacccgtgcgtgcgaggttatactacccaggatacaacgctcttatgggcccggtcctggtcttcatatcactgtatacacgctgtgtccgtccgacaacatcacgcatcgttagcgatgagtagcccttgatggccgcagaag

SEQ ID NO: 12503 - DNA, 106 bp, Emericella nidulans
aaaccagcgatgattcaaacagatgtgttactaacaggacgcggttgtggtgcgagtgttgatgtaaaaaaatttgaagaagatggcaagaggctgatcgtagtgg

SEQ ID NO: 12504 - DNA, 3831 bp, Emericella nidulans
cgcaccgtccacacaactgtctgaacatcgacgcggtgattgacaagtcaagcattataattgtctacatcatgagcgcgtcgagaatagggcgaagcgcggtgaaagcggccaaagggcaagcacccgggccgttacgggcacccaaaaccaccaaaaccagcccagcaccgcggcagacaaggtacgccagcctgaatgagagataaaggaccggcatagctaatagaatccagccctcggttgctcaaacgcgcgaacccgcacctgcaaaatctcagctccgactctgcaacggcgttgcaagctcgcatgtctcctagggcaatgaccgtcttaggcgtcagcgccctggttataagcacctactgcggctatctctacgcctcataccgtcgcgaggtgaaccaagcgcagtccctgactgttccagaggacgtctctgaccggtataaccataccgcgcggacgttcgacgcggacgttgagctctcagagaaactaatgcgcctgggcgcgaagcgccgcgatcttgtgcggcaggcgcgagggaatgtattggaggtcagttgtgggactggccggaatctggagtactacgaactaggagagaaacgggggattatcgatgaaaagagtcaagtgggcgttcgagggtgccggaccgttacatttgtggatttgagtccggagatggtcgcgattgcgagggcgaagtttgagaaactctatcctggtttcattgggagtgagaaggttcagttccgcgcgcaggatgcgagggatgttcctccgccgtcattgtcggcgtcgggttcggtactgccatccgagtcgcaagggcaagggcagggtaaggggcaagggtattacgacacgattgtgcaaacaatgggactgtgctcgatgccggaccctgcgggggccctgcggcacctagggacgatcacagaaccgcagcatggccgcatcctgctcttagaacatggccgatcgcattacgactggctgaatcgcgtgctggataatctggcccccgcgcatgcggaccgacatgggtgttggtggaaccgtgatatcggacagattgttcgagatagcggcttggagattgtcgaggaggagcgctaccatttcgggacaacgtggagatttgttttgaggcccaagcggacgtagaaggttgcctttccgtccctacttgggcggttgtatattatgtagttgtctctctgcactaaccatatacccgggtactctagctcaaagcagtcaaattcgagaaagacgatgtgcttcaatttgagtctacggagtagagcaccggagcagttcctctgctaggaaattgaagttggagcgcagcgcatatcatcatcttagtccgcgtatgcgctggtaggtatgaggtcaaaatcgcgtcgataatggaggcctcccgtccttatgcggggtaatgcgggtgaaagtacaaatggtacaaggcagatcgatacatactttgagaccagtatagagcattctatagtagacctgatgaagatgtgtttgagtatggcggtaatggtgaagttcatatggaggatgaggtccagaattgggctcaagctctcctatagtatacgcatactatagggatactcgaataatgcctatgccgtagagcttacaagaatgagccaaggtgcttgcctaggtacgtaccttgtagttcactgatcaagtcctcctaccctgaatgttggctatgaaacatgctacatccgtggtatgttaatatgtttacttggtcgacagccgcagctagtgagtgagaccgtgagctgcttactcagcacatattctgaacggcgggttccaagccaggatctgtgaaatttattgaggattcgtctctggctgagttgccaacgcagggaccaacatgaaccagtatttttgctgcattgccagtattgccaatgtactccagagcaaactccaaacagtgaggggtagccatgttgtcactgggcaacggcagggattgttccttggattctgatgtttgattgtcctaaaagtatgtgtctcaggacctgatggttatcagggcgatagatcattattatcgaccccttgctttaggtgacacatccagcgcatgagaaatacacctgcagatgcactactgcaaacgcgtcgtcgaatccacataacaaaccctgggtgccgaggcgaccggccgggcagtgagtgtcgtgtgtacgtttctctttgtacatttctctttgtacatttttggtatacaccgcacaactgtgacctttcgcctcattcgattggatgtgccgagcttgaaggcaaaggctgggccgtcttagaacttccgattggatttaatggaattccaagctggaggtcggcaacggcaaataccccgccggactgatgtggttggcggtcgcacagggcaaacggtgacgctaggaacgatatcttctggcttcaagaccaagtgggcttgagtggggagcagctaccggttgagcttgcctgaattttggttccatgctctggccctgctcggcgctagcgcatcttggtagcttggaaatttttattcatcactttttcgagcggtggaggacagacccgaccgtggaaccatttcgcgatgatgcacttgcccagcagctccctatgctgagaggcggttctttgttcagagcttcattgttgttgaccagtcatacgcctcctggtcgcgaaagaggtcataccaaggcgacgtcgaggctggcgcccgcagccttgttgattgcattgggacggaccacccctccatcaccaaaccgagatcagtggcactactggcactactggcacatggagatcagaggagtcttgtaagtcggtgagagctgcctaaagcaggtagtgttcctgtgaagagtccgaaactcccggggctctcgtctcgagctggtattgtatccaggatcatattcttagaggtcgcgttgtttgtttccctcacagaaaatttctgcgcagcaaccaagcgtagctgcagcagtagctttccgattcgtttctttttgtttctccatcgtcgacaccatgcagaacctcagttgatcatggatcctttcgcaccaatcgcagccactgaggcgcggtgtaattgggtcggtcgtcatagatggcacatggcgggttccaccgtacttttgccgttcgattctgtcatggcggcctcctgagttaccttagtaaagaggtatactagagtagtggcgggcgtcaaaggcagcgctctatgtgagagaccagcggtgtgcgaagggcctgagtattggatctacgaggcttaccttctgatcaacattctccgtaaacatctcgtcgctcatcctccgtagtcccgtctccattacccgaattcctgggtgttgtctctgtgctatttccaccggcgcatctgggaattcctgtgcccacaaagcacgtgacccgctggtctactggacgaccaataatcgccactctaaaacatccgccgcttccagagcgactggaaatttaggaaatttaggaaaaaattagggaataggaaagaaggcgagcacagaaacctaaacagcagactaaacagtatttctgttgttgcattattattcacctattcatggtgcttgactctgctgacgcgcgctgattagttcctgagctcatctccgtcgtcactcttccccatcggaatcgccagcgtctgcttgcctgcctgcctccctccctttccagactcgccccttcctccatccatcccattccacccacccacccact

SEQ ID NO: 12505 - DNA, 539 bp, Emericella nidulans
aggacatggttcggacgaccgaccggagcaggaacgccaatggacaggacaacacgccgacagttgtatggaactagacggacgccgggagcgaaggtgggcttattcagcggatctcactgaacgaacgacccggccgcaggtcacttcccaaaccagccaaaagacggggacataccggcaacacagaggatcaaccggcacctgaaaatcacagaaacccccaagccgctagaccaataccggggactgacacgacgatgacacagccgaaagagatgaaacccaggaaagaaggacgcggccggaccaaaagaccgagagccggccctgtcagacataaaaccaatacaaagaaacggaacccacttcaaagcaaaacaagcggaaccgccaaaagagctttgaaacccccttggcagcccggccaccgcgaagccggaatcccgagcccgatcgccaaaggggcacagctaaaacccataactcccaacccacgccgccggaagaccccataaacacccatgccccatagagtg

SEQ ID NO: 12506 - DNA, 3666 bp, Emericella nidulans
gagcttctccatgccgacgtcttcaacactttcatcctcttcacccttcatagctgaaatgccgccagaagcctctaaatcctccagccattccgtgacaagcgcactatagaatgaggcatgatcatgcgctcgctccatatacatgatctccttctcaagcgactcaatgcattccctcaagctcgactcagacacggatgggtcatacttcccctgcaaaaggaaccgacggatgttagcgtggactgctcgctccgtcccagcttcaactggtgtttcaaatgactcagcgtcgacatcgagatcctccttgtcaaatgcatcgttcgggtggcccttcagtctggtgacgccttccaagagaactcgagcctttgttcgcaggtcagaggttgcagcagcggactggataatctcatcgcggcgcttttcaaataagccgcgctgtttggagagctccttgattttggtggcggtgatggagcgaagggtttgggggagtgcagaggtggaggccatgtttgcaaagtacaagagggttagtgaacgaaaggggcggttgaaattgaatgaaagtaagagggggcagaagtaatatagcgagtgtctgagtggcttgaggaaagctggagacctgagatgctatccagcaatgatggaggaggtgggtgttgcggtccttttaattcagcctgatacaccagtagaactagcagcaagcgagagaatatattgagccagtttaaagtgagtcatacgatctaactggaggtctctatagctgttgaaatatcaaagaggctatgcaacttgtatctggaaaatggtaaagtgcagcttctgacatgacactacgctttacctatttcggactccgactaaaggcataccgcagttctctggcttgtattacctcttacaatgggtttttttgtacgaactaatggaaatcaggaccccgacaactgagatttattatcctgttcataactgcggttaggctctttatcttgaaaactttaccgccagcatcctgagtgcggagagccgtcaccacgaaaaggcctttgttgacgggaactaatgcagtctatacctggaccctaatctatgcaaacattagctcaatacagtaggtctgggaaggtgtgacggaacttccgtccaccgcacctgtcttactctctgtcccattacaggacataggtaggaagcagtggaaagttttagtcgctctttcctcgcaaataaggggtaggataacatacgaaccctgaggggaaaacaactcccggtgtatcaagtggtgctcctactctgggaattgtgaatggtactgtaggcatatcctgggaagagcgcttcgccttggccctaaattagggcacattcacagcgggcacatgtgcccactctagctatgaaatcgcgccagagtctaacaccattgcacctactctcgatatgcccttgcatactcttacgggagttagcgacagttggggcagagcgagcggtctttggcttcgtgtaaactttgtatgagcagagtgaaattgtgctgcaagacgtcggattcacatactgaaatttccacaaaaaaagtctctagcttcgtaacatgcagagagtcgtaatattaaataactacaatcatgacaacagaatgtgtcactatctatacactagcggatccagcctttgcacctttataatcttcacggggctccgaagtttcgaaaccaatcggtttgccggtgtggatatcttccgcgtcaatgtcatgtccctctgtatctaattcgaggtcggtattgacttcgttccaggtatcgcttgtggcggctattgggcagagacgggtgatgatgaagtacatcacgaaggagacaatgaagccggagaggtagttgacattgtagatatattgcgcacccactggaacatcgcggcctacagcgcccgcgaatccgacaatgttgatgagaagccctgaaaggtatgaagcatatgcttgccaggaaaagccgtagttgaagcgatatgcggagtctttttctccgctgtaaagatctttaacgattaaatatcctttgcggacgacgtagtagtcgcagatcataacccctgcaatggcagagaggaagatagaataggcggatagatatgttgtgaattggttagaatcggacaccaggttccactgccatatgttagccaaacatgctcgttcggaaagagaaggatttgagtaccggacacatggctaagccaattgcagcgcaaatgtaactgccccgtctgatggtgatgtatcgcggaagcaaagcggtcatgtccgtaccagcggagaccgagttggcggaaatgttggtgcccagctgagcgagagcaaatccaagcgcaatgatgaagacaccaaagcgctcagccgagctagcaccctcaagaaatcttcccaagagatcaagagggttccagattgcatctcccccaaatatgactgcagatgaagaggacgcaatgataccgatgaacgaagtgatgccgaaaccaatgggaatggtaagcagctgcgcccaaagggcatccttgggtttccgtgcaaagcgagagaaatctggatcgttcatgatcaaagcagcaaaattccccaagcaactcatgagcgcttttacaacggcccaggccaaagtgctgccatggaccgtgtgagactggtgcacaatcggaccaagtccgttggcacgagagatagcccaggcaaagaaagcaatagcggcaatgggcgagtatattgacttgacagtaaataggtggcggatctgatggaccgggaaccatagggccggcaaagacagcaaccagaagaggaagaaacttaggaagttcttcgtgtcaaccccagagctctcgggaataccattgggcaagctctcatagcttggccaaatcgcccgaatcatcagcgttatacactgtcctaatacagaattaggcaccggacaatgatgctaggtttcatgttttctcacctccaatatacccctgtacaccataccatattatagccataacagtccggttcagtactggccacaatcccccccaaactccgaacgaggagcgacaaacgacggggaacgatatatggtagacagcgccaattcgaccagtcaagcagacaaagcaggccgcaagaaagtacccgaaccagacgcataaccatgattgccaccaggacaagccatcgacaatcatagaggacgaaatcatccatgtgttctacgcggcccagaatattagctcttagctccgctgcttcataggtcacacagtgtagtatactcacaatattcaatgagtctgcaatccagaagaaaatgaagttgtaccacctccactgacggcggtcgggttcgactttgattatgcccgttagagccatatctcaggtcccgggagactgccgaaacttacctgggcgcaagtcatgggtcgtcaacatcaactgggtgttagtcaagcccgggtcttgattcaccttcagctttttgatccatcgtttaatagctgacatcttgctctggggaaaagaataagatatgtccaaaacggccccgctagacaacgcgaggagtcaggtagagctttctgtgtatc

SEQ ID NO: 12507 - DNA, 629 bp, Emericella nidulans
tacgatcatttggttcgagaccggacacgaccgtgctggcgggggcggtgccgatcggacataccggttgggcttcaatgcggggcggtgcccctgccatatatatccaagatcgtaccgtgattacaggacgggacagacctacaattcactggagcgggggctacctccttgtattccgtataggtggcagcatacgatctccagacgctaaaaggaatttcatggatgtaaaactgtcactcgatacaacgagccaggaggggcatgcatgattggagagatgtgtgctaatagtatccattacatgagcttgttggcgctctgaccagggaaaagagccacggtaaccataaacgacggatcgcataccatccacaacacacactcatatgcgctccatactgcggttgtcacgaacgaaatgtagatatacaggctgagaccgatgacgtgcatacacggcgggctagagatcaccggtgacagtactgatgactgccgaagatgattgcgaacgcgctcagctggctttacgatacctgacgacgtctgaacataggtcgacgatcgactgatgtagcggctgggaatagacttattgtggcacgatcgagagcgcaatgctg

SEQ ID NO: 12508 - DNA, 1521 bp, Emericella nidulans
cgtttctcagtatgtagcaggcaatcaggagaggagaagtcggaaatacatatttgcaatatattcgtatttatgggaacctcctaattctgatcagaatagaattctgcatatcctgccatattgagtctctcacgagggtaaattgacgccggctcgcaggtgaatgtgaaagtgattgtggtgtgagatcgaaagaagccttgcgcccgccgctccaccgccaacgtcagaggtgctcgctggctcccccagcacagcttgaatccctccagctccaaaccgccataaagaaacggaaaaggccgtgcgtagttcaagaacgctgaggttaggaaccggttagtctcatcgggtctgaattttagccttggttctgcctccattcttatatttcatctctactctgtttttttttcattccgctctccgttatttaagtacctgcaaccgacctgagctattgctcactctcagctctcgtctcagccagcccttccatttgcccttggaaaactctctcaatcgagcagacgtgccagctttcaactttccagtcctcaaagaccgagcttgaaaaatgtcatggcagctgccccgctagagagctctagcaccccgcctgacgctacatcgaccgacacgaacgcgttccctcggtgattccatggaagaaatcgacccccaatccacccggaaacgtcctcgtctcgatagcgggagtggtgcttgtgaatctctgccagctcccgacgaggcgtcacgccgctccccgaaactgccccggatgctcctgccatagcagaccaggaagctgctgtgccgaaccgtccagctagcagaatgaccatcaacatgaagtcccctactgccgctaataagcgtcccactgccaccgaagacactcccatcgaaggacccggtgccgaccctgatgcccccgcgaaaatcaccggcggacaacctttgaatgtcgtatcactctcatcttcacccgctcagagcccggagatagaggtggcggacgtggaagatatggaccaagatccaaatactacaaattggaagtccttaggtggagccttgcgggaccctttggtggcagacgtggtgcagctccgtgagcaggtccatttaccggatagtttcccggtgcttgaccaggatcgagagccgcgcgagaatttggaggaaatttgtttgtacattgaaaaaggtatgagaatgtgtggcttacatgcttagttgctagactgaacccgcatccaggatccgagcatgacactatcgttttcacaatggttaaacagtggctggatgatgtggcgaactctctagaaaacttcacatacgagacctttatggactcaaagctgttctgggatgatgttccgatgctagcagattgtctgcttcgcagagcgtaagtgtcctaggaatctgcacaatggcaacttgagcattaacgtatacacagtgaacaatttcgaccagatgacagggctaacttttatgatgggg

SEQ ID NO: 12509 - DNA, 194 bp, Emericella nidulans
  unsure (1)..(194): unsure at all n locations
tagacttcgcggtatcggagatacccatagcacctccaactccgcgccgttgccgnagccagtgtccaaaggcttacgtgcagtagttcactgacaagttgcaattggaatcatgtcgataaatgactgtaatgacaccatttttcgcctacagggacagggcttgatgttcgtcgaagaggcagaggccgtta

SEQ ID NO: 12510 - DNA, 1259 bp, Emericella nidulans
gtatcacaaaataatctacactactctactggatggaattagtgtggcggataatgcgaacttgttttgaatgtttcgtatctcaatgcaccgcgcatacgttcctctataattggtactcaatcaatagcaatccaatttgcccacagctgccagagcccttggaattatctagatacacaacagaccatgcctcctgaacacccgccccgaccaaagcaacatatataataacccgtagaacaatgacttatttactaaacatgcttcacttcggtttcgccgcttgtccattttcccgtccgcccatcactgtattcaggaactcctgataattcagcacttctcctctttttccggttccctgagtcttgccacccttccctctaaaggcccgacggcttgtaaacccattaagaacctcattgacttcgcgctctgtcaggggacgctccccgtcttctggggctgtgtgtagaagggcatcacgtagttcttcaacatcaatctgaccgctgtcgtcttcatcgaatgctgctagagcattgagtagttcttgtcttgaagacagcggggagaggagttgcgagagagtgtttaagaaagtagggaagtttatcgttgaagcactgcccggagggaagaactgcgatagagacgatgagtctaggcctgccatcatcactgctattagaaaagggtttcactgcgtcgagctctggaacaaaaactccacataccaacattcgaaagcacatcggccacatcatccttatccacaaacccatcgttgtccctatccagaacctgaaaagcttcccgaatctctctgagttgtgcgggcgctagcctagccgctgcgtcggaagtcgctgccatcatactagtcgttttcgcctccatgctcgacggtgaggaacccagagcgctggcccctctgcttggggatgacgggggatctctggtaaaccgcggctggggaatcggctctcggctcttgggggaggcatcttggtgatcttgaacggtgtaagactggttcagtttgctgggcgatactacgggcataaaccccctgcttggcgagctccctggtgttgtaggacgggcttgtgttggaggagagttcggggtggaaggacgtcgaaaaggcgatgcacgaggggaattgaaggagagtggggaggggcggaaaggggcgttgctggaggggacctgggtatgtgggtaaaaagaatttgaatagaagaatattggaa

SEQ ID NO: 12511 - DNA, 184 bp, Emericella nidulans
cctgcggtacgtcacttgcgcctagtttgacggtatcaagaggtcctcctggttacgtcttggaggatagtagatatatggagtatatcgccagtactcatatgcttgtctccgagaataagccctgtatgtccatgtatgagcgaattatattgtaccgcatcgattgggtaaatttataagt

SEQ ID NO: 12512 - DNA, 504 bp, Emericella nidulans
  unsure (1)..(504): unsure at all n locations
gccgaatcgctggacggcggggacaatctggaaatgcatgattgttagacccgacgcccggcagcagcgctcgaaaggttggccatacacgttcggtgtcgtgtcttgttatttaactctggcagatctgatgagcaacaggctgacatcgatccgctcatagctcgtgacagactcgttgtgttgtagacagcttggctgaattaggaggcatttgacattagggaggcaggtagattagnttctgccctgccaccaagattaaggccccgggccgtaccacttggtaatgtattcttagaccgacgtaccctttttttggattatcaagaaatggcactatgaagggcaattgtcacaacctgaccggttggaaagaaatggccaaggtaactctgggaccttttgttatgaagtagacagaggggtaccgaccggctatgtgagctgatagacaaggcttgagcggcggggaccaccaccaatttttgtcaaaatgtaatg

SEQ ID NO: 12513 - DNA, 827 bp, Emericella nidulans
aatcgtccagagacgtcgatctgctacctcctccggtagattcgacttggctcaatgtcactcgacagatgtcgcatttctttgacacaacactcagtgcaccaaatagatccgccacatcatccagctcatcctgctttttggacgatgattgactgttcgaagtacccgtctgcaagaggacatccttgtctttagccaggtcgcttctgaccaaatcgggatggttacagcactgtcggagtcgtaacagcaaagtcagcgccccagcataatctattttagaatcacccatcatcttttcgagactgttgtccgttcgctgtttcagtccctcgttaaaaacttttctccctggtctttaatgctatctttcgactttttccccctcacgcttgtctttttgttatcctattctcttttttcccccgctacttccctccattgcccttcctttttccttccccttctctccctatcctcccttccttttttaaatcttctctcctccatctatgtatctcttttcttgctcctttctattccccttttttttttcctttctcttatctatttccctgattcctccaaccgtagtttatataatctccgtttttttctcccactttttttaccctccctttatacgcctcctttatttactttactctctttttctccttcttctctcacttactctgccattctctatttcctccctcttctctttttactttttcttctctcttctttccctcccacttttcctctctttctcttattctctacctatccacccacatctttactctcttccttgtctctca

SEQ ID NO: 12514 - DNA, 861 bp, Emericella nidulans
gttcacccgtcttcccgacattgaccgaggtaaagggacgctcgtgatgccctcgccgctatcgtccgcactagagtcatgggacactggggctgtccggagcggagagcgcgatcctgaagctgatgaaaggggagagggacaaagccccaggaaagatcaataactcgggtctcgagccgtagacgcaagcgaaggctactggaaggacaacatccacacatgactccagaaacctcaccgccacccaatccatctctcttgatcactgatactttctctcatctctcctctacacactatcgaattaatatactcaccctccaataacaaacaccactacaattaaactcaactttataccaattaactaccattctaacaccttcacacaccccccatcccattcatctccctccccccactcaaacttataacttatttaaatatccaactttattcacatcatacaacaactatatacaaccctctccctcaccatcatactcaatcaacaccatcacctccatacacccatatctcactcccacccactcaacaacctaccttaatcacaaacaactattctatatgctctttctcaaccacactccaaattctccaccatttgacataacatccacctccctatacatatcaatatccatttctacaaaccatcttaatccatcccactccatctaatcatacatctcaaatccatcctaatcacaattactatattcatttaattacctcacacacctacaaacaatcaactcattaacatccacattactcacatctcaattatacactatccaaacttgaacaaaatcctcatatacccatccaaaaacc

SEQ ID NO: 12515 - DNA, 140 bp, Emericella nidulans
cgattacgcccggtggtatgccgcacaacgcgatcatccaatctgctgtcaagcacagaggcgacacttgatataagccccgacgcacagagcgcctgcttcggtacggcatttcgatccccgggtgtccacagtatgat

SEQ ID NO: 12516 - DNA, 119 bp, Emericella nidulans
gatggcccagccgtaggcgtctccctctaggcaggtgaaatgcgttctcctgtctactgtaccgcatggctaccgctgcatcgttacggacctccagccggcatgcttgattggtgtcc

SEQ ID NO: 12517 - DNA, 4124 bp, Emericella nidulans
  unsure (1)..(4124): unsure at all n locations
gggagtgaggttgatggacacgcgatggcattggaggctgcattataactgtttattggctcttgttttcgacctggctatgtcagaacttgggagggattgaatacacgcgaagagggcgtttaatttggaaacaaggtgttggagcttaacctcttccagcacgtggaacaacggcataaattcagagatggtaactacttttaccagatctcgagcgagtatcgtgttgcccgtccagagtcgaggaacagttggtttccccagattagaccagacaagtcaattccgtcgacacccgcgacggcagataactggaaagattccccattgagtgcacactcacgatctgcgagcgttgaccaaaatgctcctcaaacaccgaccacgccatcaaggtcgaagagcaaagcgtcagttatgctctcgaagacattgaagtatgatgtcgaccctcgcaagcgctcgaaccggccagaggtgattgatcttcactacgaccggctgcataaccctgacaactgtttccatattgaattaagctggatgaatactactcctaagcttatcgaggataccgttcagtcatgggccgcgacagctgagaagttcgggctcaagctcgtccaagtgcctattgccgaggccagtgccattgatcagacacagccattccgccagccatatagggtcaagctcaaagtgccccctcccaaaggtcccagctcgacgattttcaacgcagcttcattctcgcagcaagacgcaccagacccgcattatttccagaagctcatcctaaagaagtttgactttgtccttgatttcgaagcccgctcagccttccctccagatgtggaagtcggctactcctggggaagacccgactaccgctactcccaatacatccatcaatcaggcactctcctcgttcaaatcacagacgaaggcgacttcctcgtcctcgcaaaccgcctcgtcagcacccgcaccgtccccttcaccggcacgcgcgaccgcgaccaccgcgcccgcgcaggctatgaccccatgggtacgatcgaacgtgatcgtctctccccgcgactttcccccctggtacgcccaatccatgacatcgccggccccgcaagcccaatggcacactcctccctagactcggctagcctctaccgcgcccccgagcacgtcctgcacgggttcgaggagttctgcaacgaccccgttagactagggcagctatacagcgagtctttcgtctatccggtttccgcgaaagcggcgcctaccacggcgtcttgtgttgactcgtctatcccgtcgctcgagttgccggcgccggttatcgggcatcatatttcgccaccgccgggaacgccggtgagacccgagacgaggactcgcgctgcgagcacgagtgctaatggcagtctgccacttattgacccaaggagtcggcagcgtgaggagagttcggttgcgagggggagcccgaggagtggtgggttaagaccgttgaatttgagtggggcgtgaccactacatatcatttactataatattcacttctcagcctcgattatgttgtaactatagctatattatgattgagatatgacatttcagaacactttggaataatctgaatgcttttacccgagccagccggcttttttcccggcaggatttagtcaaatccgccttgtttactcttcagcatcaccccacttacctccatcctctgctttctccaactctcaaacattctaccatgcaacgtcccacgccgaaccgtgattcgtggatatacagaaacgggtaatttgcttcaatcatgttggtttcacaaccaatagttctcatccccgaacacctgcccctcatcagcacttcaactcggttcccgcgctctgcgcagcgagtcaggaatcagcccagattataatggagcagaaacttgggatccagcagacaacctggcatgtggaccaggagagctctaatgcaagacggagtcttgccctttgcggatgagggaatgcttggggtagatataccccccgcggtccctccgctgctgttctggctctaatacttttctcttctgaattccgtctgttgcaggttgtcgtctgagtataacctataatcggccttcaagatgaagttcacggagggcatgtggctcctgcgggtaagattctcgttgctgttatagaggtgcatggagcaagctaacatttgggtgttataccatataggagggcatccggatcgattggatgagcaacgtcgagcgattgaatgtggataaggacactgtgaatctgctgctcaataagttccagcgacaccgtggagatacgcttaattcatgtgggtttttcgttctcgctttggtgagacatacttagctgacctttccttgatagctactgtctccgcacgagttacttctcccttagagggtattattggtgttaagcttgtccattggtatgctattccgtactgctggtcttgcctcccacccatttattgttgttctatagggccggcggcctagacaacggaccacattacgaactcaacacctccgcgggccataccgagatcacgcacgagaagggcaaaaatttaaagtataccagcggacgattggaattggacatcaacatagctcccaacgaactagccttcaccttcaccactggcgcagatggccaggacaagagaaagaaacttacaggccactccttccgctcaatcggatacgtcggcgattccacaaccccgaagtcccagcttagtgacggtatcttctacgagcgacaagggtacacccttgcggaacttgatctgagcgttggcgaaaagctctatggtctaggcgaacgatttggtcctttcgtgaaaaacggccagagcgtgaatatatggaacgaggacggcggaacatcttctgagctcgcgtacaagaatattccgttttatatcagctcgaacgggtatggagtctttgtcaatcatcctggcaaggtcagtcttgagttgcagtctgagcgcacaacgagggtgaacgtttcggttgagggggaggagctagagtattttgttattgaagggaagaacccgaaggaaatcttgaagcggtggaccgaccttacaggaaagccggcgctcgtccccgcgtggagttatgggttatggcttaccacaagtatatctattcccctgcctatcttatcatgtccttaacttatgaccgtgaatgtggttaggcttcacaacaaactactccgagcgaaccgtcaccggcttcctagacggcttcaaggaccggaatctgccgctcagcgtctttcattttgactgcttctggatgaagtcctaccaatggtgcgacttcgagtttgacgccgatatgttccccgatgcggccgggtacctagcgcgtttgaaagagcgcggtctgaaactcagtatctggattaatccgtatgtcggacaggcgtcgccgctgtttgagattggaaagagggaggggtattttattaaggtatctgccatcactgcccacagctggctcttgtaatcaggatagacgctgattacagacggttggtatagcgcatcgacggctcagtctggcaatgggatctttggcaagctggaatggctgtcgttgacttcacaaacccggccgcatgttcctggtacaccggtcacctgaagcgcctaatggatctcggaattgataccttcaaaaccgacttcgcagagcgcattccattcaagaacatcacgtaccacgatggctctgatcccgcccgcatgcacaactactatgcacttctatacaacaaagtcgtctatgagaccatgacgtccatctccggcaaatccaacagccttctcttcgcacggtctacctccgtcggtgggcagaaataccccgttcattggggtggagactgcgaatccacttacgaagccatggccgagtcccttcgtggtcggctttctctgggactagcggggtatatattctgggcatcggtatcgggggttgnagggggaacccccccgcagcgctattaagcggtgggtacagttcggccttt

SEQ ID NO: 12518 - DNA, 124 bp, Emericella nidulans
cgctgcctgtgtctgcctgcatagtgtccacctcccatgccgtgcgcggctttagatcaagtccttatatgactggcatgagctcaagagtggactcgagtgatatgctttgaagattgtggtc

SEQ ID NO: 12519 - DNA, 3629 bp, Emericella nidulans
ccgtatgtgtcaccaaggacggcgtagaacattttgttattgcagatcacagcagcaacgttttgaccgggaatagccgtcgggttggcttctaggaatgcttgggggatgacaatataggggacttcaaaggcagaaagcgcaccccagttggttaagggcccgccatcgacgttgccgtcacatttgtagttcacaccgtcacagtcggtatccatgtcggctctgaatacaaatgcagctccttctgcgaaagatgcccagtcactgtggatcgtcgatttatccttgaaatccttgattgacataggataagtggcgtgtgctggaacttgcttaactttttcagacgcagacgatattgcggcaacatcaatggccttagatgctgcaaaggcggagggatgcaccttctttgcaataacaggcgctgtaatggcgagtgcgagggtgagagtcttggcgatttcgaaaaacatggtgaacgtcatataagctgggtttgttgtatatcgaggtgagtgtatcaagaggcttgtgggagagaaaaaaaagctatcagggcagccggggaagaggggacacatataagccatcggatagaattcgcggttcgctcgccgcgtttgaaggcagtttcgtctccaagaagaacgatatcgtcaaccaaggtactgctataaagacactggttgggaaaagcatggaacatacctccgctgggggtgtcctaactcatacctctttcgctgccgagctccaagaagcaccccaaggcgtaagttcttcagcgaaggctctgttaccaaaagcactgctataccagtatgctctcagcagatcgagagtaaaaagaactcttcaggggcctataataagcatacgcactgtcctttgctgcttattcagccgtggattctagggcagacgttgctgagaagggctggacagccaaggcaccccaaaaaaagcaggacttgtaagtcagaaaggcatgaggtatggagtttacctccggaggcgtcctctttccacagaccattcggctgccgctcgtccaagcagtagtcttaacgaagttgcttgatgttcaagtcaacaatgctttggcgccttatttaagagtcgcaggttgcctttgtccataaggcacagaatgggatctgacaagaaaggcaaggaagctccttagctgtctattcatatacaccaatttgttgccgacaatcggagtgcaagaccggtgttctacgtccatggttctgctacgcgtggaacaaaggtccgtggctattccctattcatagcaaccattctgaccaggggctccggaagagtagaccgcttatatgatgcctaaatatttagtcaagggatcacggtccgagagacaaagggcagactcgcctgcgactaaaggagagtagtcacaatcgcacacacaaaagctgacgatgtagaacgcatcgtttctttcccactggcagtgagaagcggtttaaagagtgcataggcaaacccagcgaagagatgaaacaaaatttaacttttccattcctgaaacataatgtcgatggaagcccaatataaatgacaagaacgtatgactcatgaaatttctcaatgaatagagatctatcgtaatatgacgttgacggcgtataatttaaaacggtaaaaagaagtagggttggtatcatcgtactcaaagttcggtagtgtaagtcgtgagggattcatgaggaaggatgaagggagaaaatgtctggcagccgtatagcgcgtgagatgcgagatgcgagatgcagataagtagcaaactgtgtgcttctgagatttgtgattcttcatagaatcacgcaaggcccctttcgtttgggttctcgccgttttcctcgctttctttcctgtcggcttgtattctcacgcttgcgcggcgcaagttcgtagtcctctgatcttccctgtgcatcctttcgaatgatctgccgacagaggtcgataaagacctcgttgacgttggctcgtcgacgagccgaagtctcgtaatacggagcgctgccccagctctgggatagagaaaatgcgcgagcacggggtaccgcgcggtcctcttccaagtccgatttgttcccaacgataacaatggggacgttctcatcatccttgatacggacgatctgttctcgtaattcagctagctcgttaagagaagacatgctcgtgatggagaagactagcaagaacccttggccttgcttcatatataattctctgaattgggttagcccaaaatcaacatgtcgccgatactatcaagcgagccagaataaggtgtctggttacctcatggcagctaagaaggcgttagccaggagagaaacggctgctaagggacgagctgaacttactgaactgttctgtacccgctgtgtcaagactgttgccatcaaaggtcagcattcaccgagcccccgcggtcctgtactcaatcatctaacatacatttctaatatacattgtcggccctatttaatgtcagcatcgacgaatgcaggcgcaggacatgattgactcacgtcgacttcgatatgtttgcgataagaatcctcaattgtcgggtcataactttcgatccaaacattctgaacgaattgcgctaccaaaagtgagccgcgtcgatcgtgagaccataccacgaaggcagcggtaaagagtcagagcgacggatctccataccggtaagacagcttttacccactcctcctattgtgcagacaaacagaatcagtgctattccttcggtatcctcatattagggtagaagtccagcctaccagcgcctaacacgacaatgtggtattctcgtctgccggtgacacaaaagcatattagcatttaccatgcactcatatgtaacgcgagccaagctccaaggctaacactcactgcggccgcatcgagacaagcaattgtgacaccagtaagcaaaaccaaatcgctcaatcgagattgatttcttcaatggcagaagtataacaaagtaaaaaggtaccccaggctgaatgactatattttggggtatgttgattccgcggcgagcgagttcaaaactcgcaattgctttgttgagatggtaaagacgcggttttgtagatctggtgcaatgcgcggtgctcgagcaatagatggaccttcctgggcggatcaagtggtggaccaagtccgttcgggggtaaaggagcggggtgagcttggagagcaagagtaatgacacgcgatccgttacatcggtcttgatctgattaaattaccatccaattgggtatttccaagcgaaagggggcgcttaaaacaggagaagaagcgagggaggtgaaaagaagagattggagaagcgagagtgtgcgcaagaggttcgagaacgaaatgcagcggagcgaacgaacggaccggttcgatgtcgagagcgagactgagtgccggtgggggcgaggaggtagagccaggccgactgcagtttagtcgcggtctgctagcagcaaaagctgtggggagggcaagtaaagggtttggttcgaaaattcgggcgttggctctggcggagcacggacgagaaactgcggacg

SEQ ID NO: 12520 - DNA, 3689 bp, Emericella nidulans
cactgcaaagctctagcgcctcaatacgaagaagcggctaccgaattgaaggccaaaaacatcgccttggttaaggttgactgcactgcggaggaagatgtttgtagggagcaagaagtgacaggttaccctacccttaaggtcttccgcggccctgataatgtgaaaccctaccaaggagcgcgaaaaacagaagcgtaagtcgatcacgagatttgaacccttccttacctcgtaactaattggctgggcctatttctaggattgtctcgtacatggtgaaacaatcgcttcctgcggtttctactgtgactgaagaaacccttgaggacttcaagaccatggataagatcgttattgtcggctactttgctgaggatgataaggaatcgtctgaagcttacacggcctttgctgagagccagagggataactatctgtttgcttccaccaatgacgctgcggttgctagcgctgaaaatgtgaagcagccttccattgtgctctacaaagactttgatgagaaaaaagctatctatgatgggtcgctcgactctgaagccctgctcagctgggtgaagaccgccagcactcccctcgtgggtgaggttgggcctgagacttactctgggtacatcgcggtaagtaataagaggcggcgccgccacaaaccagcagatcaccattgcatacttagttcagtcggctaacgtagttgtcttgggtaggccggcatccccctggcttacatattcgccgaaacccaggaagagcgcgctaaattcgccgaggagttcaaacccattgcagagaagcacaggggcgctatcaacatagccacaattgacgccaaggcttttggtgcccatgccggaaacctcaaccttgaccccaagacgttccctgcctttgccatccaggatcccgcgaagaacgcgaagtacccgtatgaccagaccaaggaactttcggctaaggatgtcagcaagttcattcaagatgtcctagagggcaaggttgaacccagcatcaagtctgaacccgtgcctgaaactcaagagggccctgtcacagtcgtcgtggcccactcatacaaggatcttgtgatcgagaacgacaaggatgtccttcttgaattctacgcaccatggtgtggacattgcaaggcgtaagttttgcccctctgtgcttggaaaatttgctgacaatacttgggatagtcttgcccccaaatatgatgaattggccgagttgtatgccaagagcaaagatttcgcatctaaggtcactattgcaaagatcgacgcgacggccaacgatgtccctgactctattaccggttttccgaccatcaaattattccctgcaggcgccaaagacgcacctgttgaatattcgggttctcgtaccgtggaggatctcgcaaatttcgttaaagagaacggcaaatacggtgtcgatgctttcgccgctcaggccgaggaggccgaagaagttgccgaagatgccactgagaccgccagcgacgctgagccctctgctgaaaagcctgagcatgacgagctttgaatttctacttgttggttagggtgattcactccaagtatcatgaactgtatcctactgcttgtaatgattgactaagcttttgtgcaactctactgccatctgcgtgcctctgtcctatgttgtagctagaatcaagcgaatgccctgaacgaccacccattgcaggcaccaataatagtattggcagcaaggaggtcgatatctaggttgccaattgcatacactccagttgaatccactgaagtaaaagtagccaatatagtattattgttcttgatctaaactacagcaagatgccaagattttcatttcttctgtcctcagagaaacttagtcatattttcccatgccaaaaccagcgccttgtgtgagtctcaagtaaccgaactcctgcacagaaaataaaaattaggtcgggtgaaaacagtcttcaaaagacaacaccaatgatataaaaaataaaaaaatcaatgtaaggaatcttagggatttcagggattttcgacaattaccatggaatgtcggtattccaagtattgatgtctaactttgtcatgttcgacgtgcagtccttatgactcttgtgagttctcgagagctgcgagtgcctcgagtgcgtctaagtcttcttcaaactcggcttcttgcggaagtgtgctcgacttggttgtaaccgttcttttatttgccgattctgtcactgcttgctgggttgattgattgaccgtaacggaagagctctgaacgacggcagaggcaggggaagcttcttgtttcgataccagactccaatcaatgatttcatcgggcccgtatcgttcggcaagccagtcgttgcattttttaaaatgttgattgtttaactgtataacaggttaatcctactaacttcaaggcaaaatatccgggaggaaagctgaaactcacaaatcccctgtgggcactcagagggctcggatgaacagactgtaaaatgcaatgtctatcgcggttgatgccagtaatacgcttccctgcaggggtgccccatgcaaggaagaccactccccgagtccggacacgggtgacgacgtcaatagccttctgtgtcaaccgctcccagcctttgtttgaatgactcgcagcctgatgtgcacgaacagtcagacaggtgttcaaaagcaagacaccacgctctgcccatggtataagcaggccacctttgttcggaggcggtacgaatgacgggtaatcatttttgatcgaagcataaatgttaacaagagatggaggagccgcggttggagggcggactgagaatgcgaggccgtgtgcttggttgtaattatggtacggatcctgtgcgataacatataccatgttagtgaagcaacaaagcatattcctttttgcaactttacctgaccaatgacaaccactttaactttgtgtagaggcgtatgacgagacctaggcatccaagggtcagctcatacacagctactgggttggaatctctctcgaaccatgagtaaatatcttcttcgggcgggaagactttcacccccatctgcttctccttttgaagaaaacgtttcagggccaggaactcaggtttgatgagctcttctttcaaatgggctagccaactctcgtccatggtatcgatctctagccggagtagctccttctgctctggagtcaatgtagccacccatttctgtttattgaaactcgagaccgatgaaggaaccgctgacttggtcgttgctgccccgttttcttttggcttaggagcgccaaagaatgatgtgatgctgccattggtcttgggtctctttgactcaactgctgggttcgccagatcgccggcacttcgcttaaggctggggctcgccatggtatgcctgttgtaagagtgaagacaactatctatgggtaaccggaacgacctatgagcttgatgagtagctgcgtgtatgttgggtaaatgagtgtatggagagaggagtaacaacatggaattgggagatctaaactagtgtaatgggcctgataattccagtcgggatccgtagactcaaaaggatacgtgcagagaacgcgtctcgacgcgctccaatcgcgcgctcttttataga

SEQ ID NO: 12521 - DNA, 445 bp, Emericella nidulans
  unsure (1)..(445): unsure at all n locations
tgggggccggcgtaccaggtgcttgctagctgtccaatcgatttatactgtgagcaccactaataacgggaggggggctacaaccgcactggtgtcatagaagacgacaccgataactgcgggaaccagcgctggccgcttgggggccttgtgccagtggaactggtcgttgggtatacctacatgatcctctcgagaggcgctagggaataacatctcgttagtggacgaacacagtggatgactggtctctgacaccgagatagacactgtcgtgatgacacactcgagcggtactgcacgatggagccccctgcctgaggcccggtgaacatgccttggcacaggagatagcccaccccggcaatacaacgtgtagtngggaggctcgatttggccaaaagggagccccccttgttcagcagccgggccgggtcaaggatag

SEQ ID NO: 12522 - DNA, 814 bp, Emericella nidulans
gacaagaattcaaaagtgtcgccatctcacacgttctccgcatcatgggcgtcgtgttcctggcccctcatctaatgccggccgagctgcgcggcaagcgacaagagaactacacatatgccatagaaaaactcaagaaacgtatgcaaaagacgggtgatcagggcgacttctgggaccgggtaatcgtcaaaagtgccgacgggaaccaatcaggagatggaatgagctatggcgagatgatcaacaacgcggcggtcatggtggccgtcgggtctgcgccgaccttggcagcgctgttccgctgcccgtatctactctgcaactctgttaagtcggtcgttgatgcttcccattttgagctatacatcactcatactattttcctatactctatcgactttttgttttagtttcttagtcattcacattttcttcattctacctttaaatctttatctcctctcctcctttttcctctatttcccccaccttccccattattctctttttattctctcttttactttacttctcttttttcacttttcttctttctacttttactattctctctttttatatttcttatttttttccccactattctttttttttccctattttctctctcttcttcatttccgttctccattctctcttactctcccccccttttctctccgctctttctattctcatttctcattacctctatttgtattccctttactcattacctacttacttttctatctatttaccctctttcaatctcctcttatgctcactttcttatcttcccatcttgtcc

SEQ ID NO: 12523 - DNA, 171 bp, Emericella nidulans
ggtagagaatataggccatggggatcaaggcggtggtggctggggatgatcatggtaaattctcatggcgtcgatgggcatttgtagaccggatccacttcatcaactaattgtttactaattgtggccgagtcgatattccatatttaacatatgttagcgcgcgagctc

SEQ ID NO: 12524 - DNA, 749 bp, Emericella nidulans
  unsure (1)..(749): unsure at all n locations
atggactacgatactgttttcaaatggccattgatgaaatcatcgtccgattccatatccgaatcatcatccactctctgctgaatggctgcatcaagtcgcgcaccatccttattacctcgaatactgccaaaggatggtagagctgcgcgaggcttcaacaccccatcaaactcatcattgtcggtggaccgcaaaggtgaggatttccttttgtgaagattaaaccaacttgtttttgacttggactttcccggaggggattcggggacaatatcttctggtgacgctggagggcttgcagccactcccacaatttccgcctcatcttcaaagctaaccttcacgggtttcctgcggtggttaggtctcacgccgtcgtcggatgccacagacgttgcgtctgaaatctcgctcaatgagggaccaggacgtaagatgccagagagccttccatcgggggatagagagctgtttcggcttttcatggcggacttagccggggagagagaccgtngaggagcgaagtaaanttgatccccccggcaatcccataccagttgctgactcggaactgtgcccttcttgttgaactaccacgctgtctaaagctgcggctgtcgctacgaaccaattccgatgctgtttccctgcgcggcctaacactggggccttcatactttcattttcatgctaaaagacacagccctgaggtacttaagtaccaacttccactctcttcctaaagg

SEQ ID NO: 12525 - DNA, 800 bp, Emericella nidulans
gaaggatatctgcggcatctggcgagcagcagaggcgatgcgctgatacgtctctaagggaataatggcgcagatagaattggagttcgaggcgtggcccaggcgccagatggcttggatctctttgggaggaaggacgcggacttcctcctcatccaatcaacagactaagcctgaccgggcccgcgaagaaacaacctccagcccctatcaccaggtggcctaggtcgaccagactgggccatggcactacacactcgcctatcctaatcgacgcatccggcctgctatcacgctcgcaccctcctacaaccccccgtcgctcccccacgtaatttaatggaggctgtctactatcaaattctgcccatagtccttgcattgaactcctcaccgaccttgtacccacttgtctacctttacctcttacactaccatccttgtacacaccattatctctgcttaagatcttcttacccctcgcgagctacacattcgctactccttcaatacgatttcccacagcgcttcctctctcgtcgtccccataccatactcttaacgcatcacctaacctttgacctacttcttatcccactccacccttgccgaccacaaatctactctttaccttaccgaactttacctatatgcacatcaacctatcccccaactcacactaactcccatcttctctcacataacctttaaccaatatcccaccccgtctcccaactcatatccaaatccttacgtctcctcccaccagctatactccccctcccctgcctaatccatta

SEQ ID NO: 12526 - DNA, 124 bp, Emericella nidulans
gccgagactgatagtaaggatctgcaagcagggacattgcccactttccaggcaagccattacaggtaggtctgtgtcccatcgccagttacaagattattgcggctaagcggatagccaatgg

SEQ ID NO: 12527 - DNA, 614 bp, Emericella nidulans
  unsure (1)..(614): unsure at all n locations
cactagcgggcacacccggatgtgtacgcggcggaatctttccggagagctgaggtcgcgtttatggcgggctggttcgatgatgagatcgtgccgataacgacccgcgtcaaggatccgaagaccggcgaggaacgatctgtgactcttaccaaggacgacggtgttcgctatggaacaaccgtcgaatccctctcaaagattcgacctgcgttcccccagttcggtgataagagtaccggcggaaactcgagccaggttacggacggtgcggcggctgtccttctcatgagacgcagcaaggcgattgaacttgggcagccgatcctggcgaaattcgtcggcgcgactgttgcgggtgtcccgccgcgcgtcatgggcattggacccacggctgcgattccgaagctgttgagcaagttcaatctcgacaagaatgacgtagatatctacgaaattaatgaggcctttgcgtcgatggcggtgtattgccgtgaaaagttgggtctggaccatgcgaaggtaatcctaggggtggtgcaattgcgttgggacacccgctncgcgcgactggngcgaggcaatcgcgactattctagcgagcgaggagacca

SEQ ID NO: 12528 - DNA, 478 bp, Emericella nidulans
gatccccctgcggccaggcggcactgtgattcctggtccattgactccgttttttctgtggtgagccggagagcccagagtgtttggctacctcttggcttctaccctcttcatcaagagttccaagccgttaaggtctgtgtgacagccttgaacgtcgttaatctgcaggactaggtcagcgctcatttctgacgttgcacgaatgcttcgtcttgttcaccaagcgggcacgatcgctttgtggtggcttgtacaacgcaatgctcaggtttgtctgagcattacttccgtccggttcatggtagcttcgaagagcatcttgatgcctgctacggtgaccctagagtggcctttcattgctcatgaatttacccgcctcctgccggtaagttacgtgggatctatgcgtcctacgagctagaggatgcgatctagggtgtatagacaccctgagtgaacactttacgttgacctt

SEQ ID NO: 12529 - DNA, 536 bp, Emericella nidulans
aggcaggaaacctgccacgccgcgtgtgacagcaagagctaccacaggtagcaccacgccaacagccgcgtgagcagcttcagcggccagcaggactactcgaccgacaacaagccaaagacaccggaacagacacgagagctcagcgactgcatggacagcaacaggcaccaccgcagcaaggacaacgggctcatactctagagcagcgcgcacagatgcatccaacgagacagggcaaggaagcgaccgcaaccctggtgcgcgaaaggggcgggaacgccgataatgacaaccgagtgccttgacaaagacacatgatagaatactgatggagcaggcagacaatgcgaccgggaccagatcgagaatgatctgagataggccgtcacatgactgagcctaaagagtggaggttccctcagaaacgggctacgacaggggcccgggcatgactaagcacgagagtggaacagaagacgagagagtcacgctagcaccatcaacagaagctgaagaggaggacccactggaac

SEQ ID NO: 12530 - DNA, 571 bp, Emericella nidulans
cccggcggggcgattccctacaggaccccgagcagacaggcaccgcctcacacgcacctatgacagccggccgacccggtgggatttataagacagccgggggggccgcggaaccaagaccagacaccccacatacaggccacgggcaccgcaacgcgcgagccaatggtccaggcacagacgacaccgagacgcacaacccactcctggagctgacgcgagaggacattgagcccagatcccacagcagacgaaacgcagaagaacacgcacatacacacctggagaaacggcacggacaccgggccgacacgcacgatcaaacgcactaacccaagagccacccagagcaggaatcacgaacggaccacggggcaacaccaaggagtctatgcggaggccgggaccaagaaccatgagtgccaaacctcggaagactactgggttgagaggagtaccccgtggcacacgatccggacaaaacaggcgaaaacacaaacgagggagacccaatatgagcagcaatacccagctgccaccccacacgggaatgatttcgggaacagacaga

SEQ ID NO: 12531 - DNA, 4109 bp, Emericella nidulans
gagaagaactcgatattcggctgcttgggggtcagtcccatggggtctcggccggggaggcggggggcgtcgcgccacaggggctcgtctttcagacggtcatcgagacgcgcgaaggcgaaagagccgaacgggagaggtagacaggaagccggtcttgtgctccctgtactcttggagcgccttttcgagggcgttgtcgtggtagactttgtcgcagttggtgaggccagacttggaggcttcgtagaagatgaagacaatctgaggatgttagtcgagaaagagagaggcagaggcagaggtagggaaagagaaggcgagggtagaaagacagagagggcagcgtacgaggtggtccatcagattcttgccgacgcctgggagatcaacgagacagtcgataccaaattgggcgagctcgtcgcgcgctccgatacccgagcgcatgagtattgctggactgcagtatgcgcctccagagacgatgacttcgcgccgggcgtagtaggctttgcttgtcccgtctgcggagcgggttaacgcacccactgcccggaggccgtcgtccttccgctcgataatgattcgatcgaccgtcgcgtcggtctggatagtgatattggtgcggtcgtactccttggtgatgaagtcggccgatgtggtgcggacacccttgtagacggtgcgggggacgtggccgcagccgtgggggacgtcgcccgtagaaaacatgtcgtggtgcaggggaaggccctgatcaacgaaggagtcgatcagccggtcagcgatgggggcgaggtcgtgcggttcggtgtgtagagggccagagtagccgtgggccgactcgtcggccttgaaccagggcttgccatggaatgtttcggactgactctttagcacgtttcatctatcgagtgcggggatgacgaaagccaaaagaaagggaggggtaccttcttcatcgcctcgaagaactcatcgccgctccagccctccaagccccagtcatcatagtcctgtttgctgccgcggatgcagagggtgccattgcacccactactgccgccgaggaaccggcctcgactgagcttgacctggcggttatcgacccccgccataggcttggtaatcaggttccagtcggtctcagagtcgaagttgttggaccaaccgccggccatgtgtacgttctcgaggtcacggttatgctggcccgcctcgagtagcaggatacgcacatccttgttctcagccagacggccggcaacgacgcatcctgaggtcccgccgctgactgggtcttcagcactgccattatagcgaggtcaggaacggagagatcgaagctacatacccgcagacgatgtagtcgtaggtgttctcggggtcagcaatagagcccatttttgcagtgatttcagtgcgaggacggtttgtgaagagtggtcagcccatgaggggagatgccagctccctttaagggccccggaagcatgccgggagcacgactcgcgcggaaccgagcattagccagttggacaagcggtagtagtacagattacagagatataacggagtcagtcgtgccacgcagacaggcacgtacaactccaaatgatacctaagtggcccgcgtctccgcccgtacgcatactgctaggatagaaccgccgctggccccgttgatcctagcccaggctggggtctttaggcggggatctcagggagaagagcggaatggagctgggttttccgcgcaagcggggatcctgtagagcatcgcaagcagcctgaggatatcagcttcgggctctatcccgctgatccatcctgggggaatgcacaattcccttgttcatatgaaggctgcacatttaaggagagaaaataccgggattcatatggtcggtggatgccggcagcattaaaagcctcgcagtcgctagcgcttggccgatggatggactaagacgactggtatgccaaatccagtccagtcgaggattcctcatcctttactcatgctttcctcatccttcccttttgggaaaagcctctggctaatgaagcctgaagcatactcggtgatcctctgttctctggccgtgggccgattcggtccaccggattattgacagggattcgcaatagcaacggtcttctctttcatccttactagtcaaccttattcatttttctaattatttataattctttttctcataaaagtggcgtggaaatcccccgaccacgagttactcccgacgtagccttgctcgcgtgacctaccggggacactgcttccatgctcatttcgtctagggccaccatattcattactacttgcaatacagtatacatacgttctcgcgcgcgatagcgtgcagagcccggtaaactggagaggatccgcagcagatttcggacgatgaccgagagagacgatctagcctacttgtaagtactacagggtactctgtaggtcaaacagagttggcactggactgggcaggagacgatgagacgaccaggatgagaataagcgacaggggtctgaatccttcgagcgccaaaagcatgaatagcggctcggggaaactttgtatagaactttacccactgtagaatatgccgcttagggttagaagccctggggcgccacttattattactggtcgacatctcggccccaagtaatcaagtggggaccatgggtcccgagtctccagttttcttgcccgcttctgtcatatgccgaccgttaaaggtcaatgggcaatctcttttgagtctagccccccttaggttgttgaatgcacgaggttagtgcagatggggtatcgaatacgggtcccagagtaaaggataccacgggtttattgcagccttaaattgataggcataaaatgccgcataattgcagggtttgcagaaataatgatgtctttatctcgaaggtgcttgaggggatcaggtggccaactgatagctgctcagcccggtagcagcctgccggcctcggtggccccctggatctgcgactcccacggggaccacaggggtcggtcccgactggcggaaacaaggagttgtctgatggagacgacctggcctcacggatggcccaccgggcatcgtctctgtgcggtcgcctgtcccggccagacgagcccgcatgccgatcgttcttggtctggctgtgtgacggctgtcagttgctcgaaccatacttatccaaagttcggttgatgtttcgtaggatcagtagctcttggagatcgcgattaaatctcgtttacggctgaatggccaagggacgactgggcatccaggaggaagctgaaactgttttaattgcctgtcccaaccagccgggtgtgaggttgacattccccgtcatcctggacccttttcttctttctttttgttttccctgcggacttggccaattgctacaatggcgactgctacccccttccagaaggaggcctggacggagtatggggtcggagtgattgtgcttctgctgcgcttgttcgcacgcatgaaggtggtagggatcaggaactggcagggcgatgactatttctccatcattgcgctcatcttttggacggtatgcaccagggtctcgaataaaggaggggaatggggaactgactggggaactgactcgctaggccgaactgaccatgctcgaactcatcggccagtacgggaccaatatcggcctcacggacgagcaacgagcagccgtgacgcccgagcagacagccagactggttgtgggatcgaaatgccttctcgctggatggacgtgctatgtgacgctgatctggtcgctgaaggcttgcatgctgttcttctacaaccgcctcacgtacgctagagcctttttccctatgactcgtattcatcgcgactaatgtgccgcagccttggcctcttccagcagaagcttgtcaagatcaatgtcgtcctttgtgctgcgacctatgtggccgttatcctgaccatcttcctccactgtcggccgttgacgaagcatttccaggtctatccggaccccgggcgtacgtcccccatccaacccttgaaaattaatg

SEQ ID NO: 12532 - DNA, 2885 bp, Emericella nidulans
cagttatggttgcgcgggataaatttacgctgcacatttacaccaggataagccatcatgacagcgccctgagccacctaaagcagaccggcgcatagaccaagcaaggcaccggcgaagatcaggaagccggagttgtaggtatggttgtagcaaaggagagcagcgacataaagggtgtagccaaaaccaccgaacgagagagtcaatcgcaggccaatgcggttggcaatggagccggcgaagaaaccaacaacggcaaaggtgctgtatgtggccgtgttggatttactgatatcggagtggttgagttgaccggcgccacccagaccattgacggagttgtacattcccgggcagaggaagcaaacgaaagcaaccaggaccaactggaattgtggcgaagcatagtaaggcacggtcaatggaccaagcttcagattcttgtacatccacggtttgccagggagacgctgagagtcctgctggacctcaggatcggtggtgctcaagggagcagctttctcgttcacggttgccatgatggcgattcttcgataaagctatccagaaagcttgaacgacgagagatggttacaaagatcaaatgagaagcggggcaaataaataaatagcttccagaaacacgacggaagccaggaaaggggtattcaaacaaaagccagtggcagcaacccgggagaccgaaggaatgcacacaactgggaatcagcaatgcaatgaggtattcgggaattatattaagtaagaagaaatcagagagaacccccgtcaacaagcgacaaagaaaatattaataggtgagacaacgatagcttgcgaaggggggaaaaatatagaaggaaatcctagagcgagtcgattgactgactttatcggcggccttgacgatcaggcggactgcgatggttttgctggctgggggctgcttcagatcctggatccggggtagatgctagcagcattcgagactccgtgaagcaggccacgaagaggcataaatagagcccaggacttggagctccaggagaagagccactggagagccactgaaggacaactgaagagcaacctcagaccgtttatctcaagcgaagagacggtgggattgtttcggtccacttgaggctgatgttgataagactgagacaggtgtcgttcgagtatcagaacttttttgagtttgtgagtggcttctccaacgatcgaaccctgctagagccacgagcaggtcgcgtgcagggaagagtctgtagtggcagatgctgtggccgctgtgcgcccacagaggcacaaaactcgggcaataatctcagctcaggagccagctctgcacggattctggaacgattgggggctaaccaccactagcagcgagacggtagcatccaattgtccggatgcggggagctgggtcgatacttccactccacacctactgtcacttagctgccgagacgaacaccatctacagataccaagacaattaaacagctttcactgcaaagaataatcataggctgcgtagaaaagacaggatcatatctggtctggtcgagctgaacaagaactcacatgtcagcttcgctcgaatcctgaccctcgtctgtatggtgctgtaccacgtcggtatcggctagtaacgcgtatgtaacacgcggtatcatgagttcccactgtaaccctccacttagctggaggcttatctcgctatcttgctatctaggcgcctctatcctgaccttccaacaattgcctgcaagtcatcaaaccgaggccctgcttccgttacagtattaggtaaaagaagctggctggaagagcgaggatgcatcatgataacctcggcagttcatgatgggtcgaacggggaatggagtatgggagattccgctttgatgaccatatcgacgtcacatcgatcttgacctctggaatggaacaacgtcagtcaagcttcactctgtggacagtcatggtttctgctcctagacaggtaccacatggtgtctcttccgcccgccatcggcgtggccatggatcgccgcagcccttaccggtctttgtgttcccttgtcggcctatatactactgacatctccacggctctttgcacgactgccttcgtccatactaaatcgccggcttgacagcacacgatttctgcttcctgctcctgatcctttcgcccactatgcctggcaaggctgcgctaccatcccatgtcatcaaattcaccaactgtcgtatcgtgaaaggaaacgagcttgttaaccaggatgtctggatcgagtcgacgtccggtaagatcctccgggcccaggaagcattctatgggctgcacctgtccccagatgaggtcatcgatctaggcggacgtatcctcgctccaggactcatcgactgtcagttgaacggtgctcagggtttcgacttttcgatcccgcaggcttccaaagaggaatacgatgaaggattgcgggtagtaaacaagggcctcgccaggaccggggtgacttcgtatctccctacgttggtcagctcaactgcagaagtataccacaaagtccttccgtcactcggcccggcaggatgcaagcatcgcccagaggatggcgccgagtcgcttggcgcgcacgtcgaaggcccgttcctgagtcccggccgcaatggaatccataaaacggatgtccttcggtcagcaactacggtggaggacctggatgattgttatggtcgcgagaacctctacggcccgaacaagactattagactgataacggctgcgccgaagtcggcaagatgatgtccaatatcccgcacatcgtctccaacgacatcatatactcaatcggccattcgga

SEQ ID NO: 12533 - DNA, 436 bp, Emericella nidulans
aggaaaatccccccgtgcatatacgtacgtccatatgtttacacaaatcaggccaatctggttcacaaaaacagcgtcggcacgagtccgtggtgcttgagtaggattaagatcgagcagaacacccacgatcgaccactgctattcaataatgaacctgagccgagggcgcgctgtaatgagccactggacctggaaggcaacgcataccccggtactactcaggaactgttgatcatatagagaggtccactacgggcatgctagtacgaccggccagcacaccggcgctggcaccacatacgacgagtgtgggctctgggaacgggggaagctgatcatgtagacgaatagataaggtgaggtctgtgtggatctgcacggaggggatataacaccgatcggtctgctggctctcgttgatgtgacgataacg

SEQ ID NO: 12534 - DNA, 122 bp, Emericella nidulans
ttgtccctcactaatttgacacccagtgtaactgagagtgttatcgtcactggtagaacattatcgctatactctgtgatgtcattcaattcttggctgcctgtgtccgagtctcctcagga

SEQ ID NO: 12535 - DNA, 135 bp, Emericella nidulans
gctccagctaggcctctccgaagctgtgtagttcgcaacgagaccctgactagtccccccgacagtagctacagcggcgcccagtaccatctgcggagcacggccgacatgttgcggccgtcaagcatgagagct

SEQ ID NO: 12536 - DNA, 949 bp, Emericella nidulans
gctgagatctacgagagtgattcaagatctgcctcccctagcagacgtccacggtaccgcgagagatatcgggcatcgacggatgactatagtgagccccccaggatcagagtgcgccatggtaggcctgcagcaatgatttctagctatcgtggggagtatacgaacgggcgtggagatggtcgcgacctccattcgggcaatccgctcgagaattttactgcagttggcccgggataccatatctcacggttggcatgagttacgattacaatacctgcttttcttttttcttatgtttgtggtggaggtctcttgcgcgttcggtctattgctactacagcattgtatatacacagagagcatcgagacactgcatacagatctcttcaaggataatcggcacaagatctgcatgaaaacactaaaagaggaacatagatcactatatagtggcagccaacgtctccaacaatgcaatcccgcagaaactgacgccatctcgcatccccaattgcaccatctcaaaatgatattgctcttcgacacatttgataaaacacccgcccctctcccgctttgcttcgtactttgcacttctttcaaataagtatcaacttctcttgaaacaaactagacccgggaaacagtacagaaatggctcacctccaagcccgccagcacatctccccagactccgggttccctgtaactttgcaccccctcttcaaccccggaatctcctcgcatgttcctcctgaaccaatccgagacgagattacaccgcccccggaccgcgcctctttcgcagatccagagaaacgtgctttgttctctcctggtgtcaagcggatcaatctcactgagagtatcggcacggtcctggagggagtccagattagccagcttagtggtcagcagctcgatgaacttgcggcactggtgacgg

SEQ ID NO: 12537 - DNA, 5165 bp, Emericella nidulans
cacagaacggcaagcaggatggcgatacgataatgtgtgagcatcaacatcgggttccgatgaaggttcctccacgtcctttgtgataggataatgaactggcgagccaagctcactcttgcatagctcttaggggtttgaaccagaggtgaagagggaacttcagagttaacagacccattcccggcgctcgcacgttgagttgctgaaataatctcattacgcacgtttcgtgcaatgtcggatgctgcgtagtgggcaaccattaaatccaaatcagtctggccggaagcggcgtggggaaggtcgtgcggatcgtctagaatctggggtggtgtctggccctgctggcgggatagtcgcagccagtgctgttggctttcgcctacctcagcggcgtcctcctcatcagttcgaggcgtaggtggtgcatcagcatcttttctgcgggagtaaagctgacggtcttgccgttgcttgagggacgttcgtcgtttacctttgggtcgtctgccgtaatggaggctattgctggaatcctgtgttctggcatttgacgcactcgcaacagacttgactgctcttaaactgcttgaagccgtttttggcggatcagagcgcacagccaataacgggctctcctcctcgtcgctgtggaattgagtagtgctgccagcatgcattgtgagatccactaggtaatcagcaatgttaaatcccggtggacaagtgtatccggcgtcatcaaaatactgttggcatgtcgagaatgggccagaatagacagttttaccattggccaagagaatcagcctgtcgaagagcgcaacgatattggaccgcggttgatggatggtaaaaataacagtgcgattgtaatccttcgctagcgataccaagcattcgaccctgattccgttagataataaagttaaacctgcgtcacaggaaacacttacacgttgaaagcgttgaaggcgtccaatccactggtaggttcatccaaaaacaggatgctagggctggtgactagctcgcaggcaataccaactcgtcgcttctcaccaccagaaatgcctcgacctgagccttcctcggagccaattaattggtctttgatgtgatgtatcccgagctgcttctcgacttccgttactcgttgctctttagcggctcggctcatgtctcggggtagacgcaacaacgcgcttgtcagaatcgtttcgtgaacagtcaatgtggggagcatagtatcctcttgatccacgaagccgatcatgctcttgaaatccgcgtcgtccaacttctccccgttaacataaaagtctccctgggcgatacctcgcttattcttcctcgccagcaaatcaaggaaagtggtctttccagcacctgacgctcccatgattgcggtaatttgtcctggctgtgcaacaccctgaatgcccgaaagaatctccttcccattaacgaagtaggacacattatcccagtagagtgcagctgggcggtggtcagctaaaagcttcgatgcttcgtcgtcagaatcatccgagagggacagctggatacggctgtaacgggaccgccgagactgataccaaagacccaatatcacagcgacaacaaatagagcgcatcctgcaataacgcccgctataagtggagtattgatcttcttgacagggcgttggtatcctgggacttccgtcttatggacacattcaccggaagagcatttgagcgtgatactctcgtcaccaaagacacttttgatcaagttatccatctcgggttcctggaacttgctgccatcctctttgctaccaccgacagtggaaacggatgaaaaggtggccggtcccttgattgactgtttgaggaactcgccgatgtcgatagaaccttcttcaccgcaaagcatgcggccgggaatgcacttgcaattgatattctcgcatttataatgggttgtgtttttgtcgtagtcggtttcaaggccccagtcacaagtatccaagccgcaatagaacgactccacctggtcgacccagaactggaaattgcaagtcttgtcttcggcttcgcaggagaacgttacttgcggctttcgttcctttagctggtccaggatcttccgattcgtcacatcacacatctgaaagttctccttaacagtcacgccctgcttgtaacaaacaccatcttcgccagtcggcatcattgcattacacgcatcatccgtattacaaacattgcagttaattccttcccagccatcattgcaggaacagtatttatctttccgtggcgggcgctgaggatctgaaagagatccgcaaagcggaatcgaacaatcctcccctgcaaacccaggtggacagatacattttccgctatatttatcgcaggtagcaaactgcgtacattgaaaggcctcgagctgacagttgaagcacggcggacagtcgcctggacgatcgtcgaaggatgagaagagcagtgaatcgaggtctgttgctgagatgtttccttgtgcgacagcaaagttcgtcagtgagataccaactgccagaaacagtggtagtgaggggttgagccgcatgctgttgagcaagcaagtcggccggcgaaggtcggcggcggcagaggaaatgcggagtaatccgagagcgccaggaacgagtgcagtgatctatccgagcgaggacacgaagaagtagatgaatactatttgagaaaaggcgctatcattgaagaaagtgagcgatcggatgagaaaacgacagcaaggatagaaacaaggcagtggcatcagacgatggaggtgtaggggacttgggtgtgaacggtcgaggccgatgacgcgggcggagaacgggaacaggaggctggcaccaaggtacggaatggcagcctcgcagcctggggcatcaacattcaggttcacgaaagcatcctctctgaatagaaatgcactcagctgagacgacaatgatgatacgaggctattcttgagactcaacttgcctgggcagctaggtcaaactagtttctcaaatatccccgtagccatggcatgggtcagtatagcacaggctacaccacaagaggcaacctgaaaggcgcgccacgtgatacgggcatgcccacaagagcctgttccaggtacaataagaccccgcttggagttctcgatattccaggtgctgactctttcctgaatctcacattctgccatcatggttcagatcaaggactttgctgtggagcaagtatgtgccctgccaccccgcatcttgcggatatatcgtagcagaaattaatcccaccagtggatggacaagtacgaaacaaccgccaagtacaacgtggcagagacctgcagcgcctcgatttcggttcgagacctccaggcgctgtgcgaggacccggctttgaaccctttagacggcgtcctggatcgcaagctcacgtacggagagatccgcggttctaagcaactacgatcaacactggccaatctgtattctgtgaggacaccgactccattgccttcagacaatatcctggttactgccggtgcaatccaggcaaatttccttctgctatatacgttggtcgggcccggggatcatgttatctgccactacccaacctatcagcagctctactcagtcccagaatcgcttggggccgaagtcagcctatggaagtcaaaggaagccgaagggtggaagttggacctcgaagaattgaaaggccttatccggccgaataccaagcttatcatcatcaagtatggcaccattccctacgaacttcacttggcatctgacgtggtgatctagcaacccacagaaccctacaggggctattatcccacagggtacattggacgagatagtggagatagcgcgcagctcatcaatctatgtcttctgcgacgaagtctatcgccccctcttccactccatcagccctatggacccagacttcccctcgtcagtcttgtcgcttggctatgagcgcgctattgtcacagggtccttatccaaagcatacagtctggccggtatacgcgtaggatggattgcatcccgcgatcgaactgtaattgaggcctgcgcttcttctcgggactataccaccatctccgtatctcagctagacgacgcggtcgcgagctacgctctagccccgaccaccatccatgcactgctcaaacggaatattgaacttggccgaactaaccttggaatcctggagaagttcattgagtcccatcgatgggcgtgcgactgggttaagccccgagcgggaacgaccgcttttgtccggttcaataagatgggcaagccggtaaacgatactgccttctgcgaaatgctcctggagcggaccggagtgatgcttgtacctggaagcctgtgctttggcggcggagaggattttctgggctacgttcggatcggatatgtgtgtgaaacgcaagtgctggaagaagggttggcgaaattgaaggcattcttggaggatgattacgaagaagtgcccgcagtaaaaaggaagaaacagtcctaggattcgaatacaaatgccttccagccgtcctcagcggtcgatagagagtctgcccttctagatgtggtattcagtacttcgaaattcggcggaggcgcggtcatgattcctgacgcccaagaagctggaaagtgttggtctgcgcgaacggccatggttcaaaatacgtgcagcgacgcgactagactggcttgacgagcgcaaggaaacgcgctggtagcaaagaccaaggaaggcgccatccatattaatggattctcttcacggctaggtgcgtccaggtaaggtaataatttaaggaattacttttctggatttttcttagcaagcgccttggctgttaagtgcccatacacttgtggcaggccttactctactatgagtatggagggggtcgggactaataagaccccgacgaattacaacaaaaaactccgcaaaagccaacgacagtatctagcggcgatcagctgcaaaaaagctccactctatcccagagcttcagcgagttcgtcaacggcagttccaccctcaatcaataagtctggcagccgctgtgttgccgtcgccttgaaccgagg

SEQ ID NO: 12538 - DNA, 2808 bp, Emericella nidulans
ctggtcatttgtgcagttactctgcgcgggatttcttgcatcgtgtagctacgatgcaactcgtgacgagctttgttactctacgcaggtgacagagttaggtggccagtttctagctagaacgaatgcgcatatatctacaacattcaacacaaagaacattagactccaataaaccgttctgtctgaatcagaagcgcgcttacagcatcacagtggtacccagctcaaaagctcatatcatataacaaaatccttcccgtcaccctccaccctcaccctccaccctctttaccctcctaccatcccgataatgtatagcttacagcccgttgttctcgcaacctcccttccgtcccattctcgccaaactggaccgctgacagatacgtactaacagcgcctgtccctcacaagatatcagtagcctacgtgtttcaagggctatccggcgttttcacacttggctaggcatacttacggaatgccttgtcaaatttatcagcaacacgatgggcaaagcaaaagaagtgcactgcgattgcgacagcattggtgcaacgttcaccaatacagttgatttatcccattcttgaggctagccttgtacttcgcgggtttataggagtaatttgacttagggctaggttggtttccttaccaattctgggctgcaagtgaagtttctatgtacgattgctggcttaggaccggatacagattatgcagtcagaaaatctgtagttacagttgaatcaacaatctcgaacaagtcatatacaatattggtcagggacaggcctttgggctcggcggaaattgcttataccaagtggaaggacaaacagtgcccccgacaactattctgtcttggtccagatacaggttttcccgcaagacataatggaggcaaatgcagaaaggagaaacggtaatcgcgtgtaaggtcgggcctctgcgttttgtactttgatggtcaaaatgatgatgaattgttgacttgcgccacaacagaactgctgcgggaggtacttgagccagtagggaacccaatttagtaggttggcgctcaatctagtaatgacaagacgttcacctagacaagcaagacggcgccggcgagagtctcagtgacatgggcaagctcatcctccgaccatgcttatctcgctgaggagaaagtcgtcgtaaaggccacgagtcaggaacccctgcccagccgtggcggacgaaacaagccatataagccttgtcagcactacttcaggcgtaaaaggtcccggaaatcccatcggcaattccagctcagcaagcctcggaataaccccgttctgcccagccagccaagcacagtttgcagaaatgcttgatcaaactaagagtcggcactgccagactgccctttaccgggggtgccggcattgccagcggtgctcatctaccgggcaacgtcacgatctccactgccagcgctgtcagcgcccggataggaggattgtcacacgctaaccccgggacttttatgcactacttatctccagactcgactccatgacccacattggggatccccccgcgtgacccattttggggttgaggcgatatagaaaggaggtggtcctttgtttggggttgagggcggataagcaagtccacacttgaacaagaaccaccatggagaagacacagcccgcctacgtggaggaggcagggaatggagcacatacgcccctcgagggtgctctgacggagcagcaccaggcataccttttacagcgccatgggacgctggatctcgaccccttgccgagcatggacccggccgatccccagaggtagcctttagtggaaggtcagccctaccagccctgcacaaatctacaagtcaattcgttcgcctaacataggacagaaagcaacaaacctagcccttgtcgccttccacgcctgcatgggcacctttacagcggccgcgatcatcccagcctacacagaaattgccgaggcggtccatgtctccatccagcgcgtctcctatctcacttcgcttcagatcgccatcctcggcgccgcgccgctgctctggaaacccttatcccatcgtttcggccgccgcccgatcttcctcatgtctctagcgctcagctgtgtctgtaacattggctgcgcaaagagccccgactatgcgtccatggctgcgtgccgcgcgctggtggcgttctttatctctccggccatggctctcgggagtgcggtcgtgatggagacattcttcacgcagcaacgggcgatgtatatgggagtctggactgtaatggtgacccctggggtgcccaatgggccgttatctttggctttctggcgggaccggtcgggtttgctggatcactgggtgctggctttggccctggtcgttacctttggctggggcataaacgacagaaatgctttctccatcagactaacggatcaacatcctatggttttcggccgaaaccgtaaggcctgggctccagtaacccagtttgacctgttgataatcgcccttagcctgtggttttcgccggtgtgtcgcaatctgttgtttcaaggtaagagcttttctgcccgccatcgggagccaccctcggaatcccaccaataacccaattggttattagtctctttaaaagtgggttttttttgtgtgatataataaaaaaatatacccaaccctttcacatttatcttttaacttttttatcttgatttctatatggcacatttctccactatttgtatataccttcctagtggcccagcatttct

SEQ ID NO: 12539 - DNA, 2197 bp, Emericella nidulans
  unsure (1)..(2197): unsure at all n locations
tacatcaccagtaaactctggcccatgctttaccagggggttgtgggtacgtttgtaaagcttgggatggcaaaccaagctttgaaatggcacaagcgcctgcagaaggcacaggctcccagtgacggggatatgggtgaatgctacacggctgctctacttgactatgacagctctgggagagcatatgtcggattacgagcccgggttgctgccttccacgaaatatgcaagcatacgaatgggcatcaggtttacggccaagtcatttctgccttgatggcaagcgggaaatcgaaagagttgctgcgaatgcacgagtttctagtcggacaaggcgaccatccgcgttctatcgaggaacttgagccggttctcgagtacgtacggatcttttctaacaacgccaccaaagctaggcttgagcggtattgcgatgagcgattcggccgcgacaacgccgccgattccagcgtattattaccatcatctacaacgggccggtctccagcagtgggtgtgaaacaccagctcgaggaaaatggtttaaaagatgacttcggagctcgtatctttgccacaaaagctctatcaattgaaatgattatagctggtttcagaacatttcatattccagccatcggcccgcagtccctgcgcgagatggctaggcgagctcgtggaagttatgacatattagaaaagcttgagcagcttgagcaaagcaagatatctgttgggaacagtgttttcgtgcgattactgcgccggcttgccagggagaaggaagagatacttctctccgacttgatccacagcgatcaacatcatgacgtgcttgaggactatgaaactcaggcgtcattgctggtgtctcattacgctgctcgcgactggcgacaatataacctgacattagttgtcctgaaagagctgttaggcgaaggatcaaagttgctgaatattcattttcaaaaacatctcgcagccggggaaaaggatttggctgctcaggcagtgacggagatgctcgctcaaggcttcaccttagagcctgctaccttgacttttatgatcaactacctcttcggccctcggaaaccggggcgtaaagcagtcaatcagccgaacctgcgttcaacccactccctaccgtctgctttccggtatctacagaatattgctttaacgggtacaagtgttcctgtgaagctctgggttgaactgctcaagcgatacggaatggtcggtcgctgggaagaactccgcgcctgttgtctctggctggcccgccgctactcgaccattccttccacgccaagagatgatgtccgagcctcaaagagagacccgcttatactgcagcaaatattcgaccgccatatgcaggaagcaatagtcagctggggattcatcatagaaccgccaaccatgttaaagtcaaaggattaccacgtgactggaatgcacggtgagcgtctagttccattcgttcgaggcattctacttctccgcgagctgcgcagtaaaggtatcgacatccagtcaccgctcattcgtcgggtcagcaaaagacgccttgttatgctctatggtccgcccttcttctcaaaccgaaagaggaaccgaacgctgcgggctttgaacccttacccggctgaccgactcattgaagatgtcaatcgtgcctggggagagccggaattgtttgacgaagaggtcaagaaatctctgaactggatgattcaattccatcgtccgaagctctcgccccgtcatcgtgctgaccgggctgatttacggaagtaccggcggaaagaaatcagtggctagtaaaaatatggcaataatagcatctaatatactatataatattatcacggagtacagtgtcaataacgttggtacctagagccccgagtactctgaatattgctgccaagcaaccacgtgactagagtagtgcccgagtaacgagaatgttttgctccgccacgacagctggcgtgtccccaaacgtcagctcggctgccgattcgtctaagaatagccccgacagtccagagtccagacagtatctgagttctgtggagcgactgggccatcaagttctctctttcttgaagaccaagagtcntcgatcagatgacacacccatcatggcagctgtggtccactactatcacatcagatcgac

SEQ ID NO: 12540 - DNA, 312 bp, Emericella nidulans
gggacccggtgatcctctagcaacgaccgcgcgcgaaagtcaagcaaactagccaaggacagccaagcaacggacacggacgaaaccaccaggggcaggacaaccaggcgaacgagagcgacgctaggcaagcacaagcgaaccacgcgccaccgagtcgcgcacaagccacccaacacactagacaagggcaggccacaccagggcaggcccaatcgcagactaggccagggaaaggcaggctcggggcgacacaagcgcggacaaggaccaccgggacaatcagcgccaacaccgtccggaccagaccaa

SEQ ID NO: 12541 - DNA, 105 bp, Emericella nidulans
tccacactgacaaattaagcaatacgtacaataaacagcgaagacgtctgttttcccgtcagcttacgcaaacatcacgcaaagctcgacggagccctagacact

SEQ ID NO: 12542 - DNA, 581 bp, Emericella nidulans
  unsure (1)..(581): unsure at all n locations
ggtacgctgccggtcccgcgtgaactcttccctaagcgacgtgttgacaaacccaacaaacaatacattgccgccgtcacacctctccctaccaagcaagaaactattgacccagatgagcctcatgctgaataccggagctggaaacggagcatggccgaaatgaggcgacagaacttcgaagagggtttggtggaacttcacagccggaaactacggacggataagacaatggaggatcgaagtcgggagaggcagaagctacgagatcacgttctccgacaacgtgaacgagaggacgaatacctcacacggccgtctattcctcgggatatgctaccgaagcgcatgcctgtgctgccggatccaggcagggaacagcgactcgctcaatctaaagcccgaactgagaagaaggctgccaagaaggtggcagagcgtcgggatgcattgcacacgctctacatgaatgctcgtcacttcatcactaccgagtcccaactagcggctgaaattgagaaggtctttcctgagggagagaatgaagcttgggcgcacgatcacaaatacngcgagaacat

SEQ ID NO: 12543 - DNA, 489 bp, Emericella nidulans
caagagcaagcaggtgcggggaagcaccctgagtgcagggcacatctttctgatttaccgcacggagaaatacggggctggggacggtataattaaggtcactccttctgatgcggcacgagacacggaagaccgagactactatgtagacagcggtggaggcccctaagcttgacatgccacaagaggaagacagacaagcgtgctgaaagagctaccggaaccaggacgcatcgatggatctcttgctacacggaatgcccacagagtacgaagcccaaacacatggcctgaggcgtataggagacaccaaacgaccaccaaccctagtggcttggggggctaaacacaaatgaagtggagcaaagagacgagctgacggaatcagaacctcaaacagttcagcacagcagagaatatgcactacgtgccgcaggaaggggcgtttagccagaagacgcccagcccctgagaagaacctcagccgag

SEQ ID NO: 12544 - DNA, 1140 bp, Emericella nidulans
tggagaagctacggggtagactgggttggagacgtttcacgtatagggcgacccagagacgtaacagctcgagaaaactggggaacaacatttattggagttgttaaaagcaggtctgaggcaactgcaaaagttacaaacggtcagatacctggttcacgttgacagtgagcgagatcctcgtataatagcatcgcctaccctagtggtcgctccatgtgtatcccacaccgcgcccatgccacaaactccattgctaccgtgcacatgaatggcccaattcctacggattttactacttatatagcgtaccaagaactaatgccgtaccacaaaagtaacggagatcgtcaaccgagcgacccagcaagacctcctgaaacacgaccaatggatggctcaaccaggtgatgtgcatgcagatcaggcagaacagaacgtcagaatgaggattggccaatcttacgcttcagaagatgctgatcatcttcaagaaggatctatattctatactttgtgtgtagatgacgtatcaaacgttatggatatattgtcccttaaaagatggaaatgtgatgaagaatactaaattaggtacaggatgagccaagccgatgcaatcacaggcaatgcaaagaactgttgggtataaaccgctgaacagaagagaagaagaaacgagaggaaaacagatcggctccgggaataaatctatccgctcgcagctgtacagaaagaatgaaagcaagacagtctatatcaatcagacaaactcaggccaaagccaaattagtcaaacccagcacagcacccctatggctaaagccccagcaccagcaatagtcgccaactctccacctctcactcgccaactcccgcccgtccctgtataggccggctcctgtcccgcactgggactccccgtcgggataacactcagactcggccacagcacaactgagcttgtccggataggtgtcggactaagggtgatactgctgttcgcggaatccgatgacgtcgggtgcgcggtcggtcggtggtgaccaccactgtcgttctcgctatcgctatcgcttggtttaggtggcggaaatgtcgttgactcggacggcgggcttgtcgggacaagagtgaggc

SEQ ID NO: 12545 - DNA, 1743 bp, Emericella nidulans
  unsure (1)..(1743): unsure at all n locations
ggacaagagtgaggccatattctttcgcgcaggattcgggcgtgaggtcgtcggggcagcagtagggatctagcaggcagaaggtggaggaggggcaggcatctaaattcatttatcgaagcttgttagcatcgctctggcgcttctttcttttgctttagttgaagagataagggaaaaggacgaacaagttcctcctggacaacaggttgctccttcgtctgggttgtagcagatgccgctggagccgcaggtaggccagccggctgggcagccgtcggtcgttcctggagtgaaggcattgctcttgctgtcgtctcgcttgagtgaaggcgaaacagacccgatggtctggcccgccagaaggggggccaaaagggcgagagcaatcatctatttcgtggaatgttagaagcggaatgtgtgatatcgaaggctgcagaaggaggaggagagagggaaagggtgggatcgagaattggggcggcgggactgcagggacgctagcgatagtcacacaacggaggaactgccgcagggtcgtcgcagatttagccgcttttagtctacgtgaggataaactcggtccctggtttcatgtataggggggtactccataatgctcaattcatatatattatcagttcctaactcgccaaaacaatgaatacaacccaaggtcatcagtcataatttataagcccgctaatcgcagtcgttccctgagcgcctccatctcgtcgttctctccaacactgttacctttcttgtctctaagcgacaccgagcgatactccccatcgcctccaggcgcgcccactgtcacccatacaaatttgctactgccaccgccgcttgcttgaggtcgctcctgcgaaccctcccagaacatctcagtacccggtttgtctgacgaaggccgccctcccaatcgtccttgacggatccagcttttgagaacatctttgatgaaggcgatcttctggaggaacgaattcgcatccaaaacctccctgattttatcgtccatggcgctagtgcttgtaccgtaagcaatgctgaggaacgtggctatttcgtctgataccaccgctcgggtgtcgaatccagacgggtgcatcttgcctttcgctgcgaggtaacgcgctgcagtaggtgagagatggtagaagtccatccacggtgatgagttcctcgtacgaccaggtgccaggaccagctttgtgtgatctgggaagttaaactggaaagccccatctccgaacccccagacacccacattgcctagtctctggtagaatttaataaattgtccaggggctccgtcggttgccgcgtcgtcgagcaacgtctcgtcgccatgtcgaccaagggatccgatcatgtactttccaaactggtcaacgagcttgacgcgcttgattttttcggcgtctgcgcgtgcgcggctaatcccagaatccattcgaaccttgacacccccggaagagtcttttacctcgaacaaagacggtggtatcaacgccctacagataccgccacggcattcgaggagatcgtcgctacagttctcgtaaaactccactggttntccgtgacgaggcacangttgatcagcttcagaatatgaccatgactgggaatcggagttctcttggctgcgagccttgcgacgaatgtgctttttcccatctcgaagaactacgccgctcgccggcttgccattctcggttttgacacaca

SEQ ID NO: 12546 - DNA, 538 bp, Emericella nidulans
  unsure (1)..(538): unsure at all n locations
tgacttgttcgtcctgggngggaaagagaaggccactttgcttggcatttgacgagggggctggggaccccacccacgacaacaacctacaaaacaagcaagggccatggatcagaccatcgatagatgagctagcgaagacgattcacgcatcactacctaggcctgatctgaacgccccaaacaaaaccaaaccacagtgagagcagacactgaccccaacacactgcctgctcgaacgaaccacagcaaacggactagggactccaagaacccaccgagagcggacgaaactgacacgcaagctagctacggcaaaatccaccagcagcgcccaaggcctggatatccacaacagaatcgctagagcgacatcacaagcacagcgaccagtcgaaatatgcctcatccgagggcagcgtaaagagacagaaaagcactagtcgtagcacacagacgcagaatgaatgaaagctgagactgcgagaaccgaaagcggataagtgctaaaccatggaattgaagggcatactcatag

SEQ ID NO: 12547 - DNA, 511 bp, Emericella nidulans
  unsure (1)..(511): unsure at all n locations
gagaaaaggaaaggacagttagatgtcaaggagaaacacctccctcctaggcnccgaagacngaacgaatattgttgtgtacatgcaacaggacagcccgccctaacaacagaacaccgagagaacactggacgtgcaccagcggagggcggaaccacgaaacacatagagcacaggagacaacggccaaaacagcgaaggacacacgaacccggaaccgggaggccacgcaagagaggagacccgagccgacaagagtcaaccacgaaaagcgcaagcatgggacacgcgccgcccagcacaacagggcgcaagacgactgaccacggcggagcaacccaaaacagcacgggagcgcaaagcgaccaagctcagaaacaggcatgaaggttcgaccacacgaagctgaacggcgaggccgacacggaggccagtgccacgagagcaagggagaccaacgaacgcgggccccacgcgcggagggaaaacagaagagcccaagctggccaga

SEQ ID NO: 12548 - DNA, 973 bp, Emericella nidulans
  unsure (1)..(973): unsure at all n locations
tcgacgatcccgcaggtcagtgcgtttttgctaatgccgtttcctccgccttaaaataaagaggcgctcgatgtgttgtctgctgcgagcgactgggatctaaattcgtttctatcattgttccttttccagttttgcacctgacatcgacgagcttgactcaacctgtagaggtcaccgtctctgtgccgttcattgacgtgcctgattccagcttgtgcttaattgtactcgcagcctcaatcgtgatcaagactgtatatagatcctttatcgtcctctctgagagcgttcgtcgtcgctggcgtagcgctggaattaggcccgaaatcgtctcggcatgcgcatttgtgcgtgtaatatctatcaaagtgatgatgcctgtcaatgagcaactggcacgatcgactgaacctatgtagcgagatgcactgcagtctatgccagccatcaaggactggggatactggaggaggctgttcgcgaaaacctcccagataggcgttgcgtgactgggcgagagctaaagaatcacgaaagtgacttctaccagaggccaggcaaggaaacaacacccacatagttgatcaactgaataacaccactngggagtgcatggcctcgagcagcaagctcccctgggatcaccctccttcctctaaaaggcgacctttgcaggcgcgcataattggcaacttaacgcacgcccgcccatggccttcgggggtgtaaaaaaaaaacggctggccccggcggggcccacagaacagtttgcccccttttgtggggcccccccacaaaaaaaaaaaaagccccttttaaaaacgccataattataaaagaacctcccttccaaaacggagggggcgtcccctctcctctaatggaggtgggcgtggaagaggggncctgcgccctctttttcccccccggggcataaagggggaggggtgtacacacatctgttttttcc

SEQ ID NO: 12549 - DNA, 4261 bp, Emericella nidulans
  unsure (1)..(4261): unsure at all n locations
agtgtcaccactctgaccgacgtagtcgtcgcatcgggcggcagacagagggtctggccgagaagcaggttcgtgcagtccattcgtagactgttgagggttatcagcgactccgttgagacccggctagccttggagatgtcgatacagttgtcgccactgatgacctcgtgggtgcggccgccaacgcatgcagctgttgcatagcccgagggggcgtagttccctaggcttgtcacattggtctcgagagtcggcgtcgcagttgggtattccagattacagcgggcctggatctcagcccaagcgttggccatctcgatgtcgtagttggagtagggggtcgactgctgatgggtaaagagggcgacaatacactccgagcatagctgctctgtcgtatacccgccaagcagatcctgcgggtcagttgcgtcacccagcgtctgctcgagaaattgtgtgcagtatgtgccagtggctgaatccttgaggcacatctgcctctgcaccgaggacacggcgtcaacccagtatgttgccgggtagccgactcgcggctggggatcgttggcgcaggcctcttgcacgttttgtcggtaggcatccagggctggcgggcagggctcacggcagagaatgtccatgatggtctcattctgcacggtgtagaactcgctcccgctgaggaggttgagcaactcttgcgggcattctggaatcggaaccgagagggctaggttgcattgtgctgagactccagagaagagggtctcggtttggttgatgaagaagaagaactggttcttgtgcattagagtatgcctttgtccagatgggtcggatagactcacgctctggtctgctgctagggctagaggcaggaagaagacaataaaggccaccatcttcacttgtgcttcacttggcttcactgtgcttcacagtatcgagtaccagctttggctggacattacagtcacggtagaggcctagacgaggagctgactgaggtggttgttcctcctcattcatcaaagacgcctttaatctccccactccttggtaatcgagaataggagtttccaatactccaagactgaaccacgcaatcatcctcttactatctatcaatttaatcggtttgcagtacaccaatcaagttctctccttcgtcttcgatcagacctcgcggcaaggacgatgtcatcggagattaccccgactctgcatgttactcttcagtccagatgctcacatgttgcaagatatagcaagctattggcctctgttccgtgaggctgtcataagataggattgtctgagctccagtacggattccactgcctgttgattgggctgggccttacggtgtatgcaggtcagatcacatcacatagcttcacggccaggtccctgcatacaaagaggggaaccctgtttagcctacctagaatttcttagtcttcattcaatgcaacctccgtactgtatagagcagttcttatcacaaagatatcactcttgaggttagagtcttcttcaataccaccctccgacaggggattccatcctttatgcgggtgttgtccacagtacccctctcgagtttgaagtccggtcggtccctactcaatggcttttgctggtcatggctggcaagggaaacggggagcagtggagggtaggccagttcaggcaaggcaagaaagggtctgggtggcgggatattttagattttcagctataaggctgacggggctatgagggaggaatggctgcgacaagttcatgtccaaagacttgcaaagattcaatatgctgttgctgtactgttctcgctttcatctctgcgtccttgcagctctcatttgtctcgccattgtgagcgcacagcaagactactcttgctctcctgtcagaccatgcaaactaggatgctgcgggaagaacaatgtgagttggtcgtctatgagggtccaacttggctcacaaggaacaggtctgcggtatggggccctcctactgcgccagcgagaactgtacctcgacctgcgacgcaaagagcgagtgtgacccaggctggggctcgcaatggagtcagcggcaaagctgcccgctcaacgtctgctgctccaagtatggtttctgcggcacaaccgaggagttctgtggcgatgaaaaggtcaccaagccgagttgtcccggggggacgagcgcaagcaaaaaggtcattgggtattatgaggggtggtcgacaagtaagaagtgtaatgggcgtaagtctttccactttctgtctgtgtatgtgggggaaaacacatgagtgagccctttctgacatctcagtcaatccggaggacttgttgatgggggcgtacacgcatctcaattacgcgtttgcatttattgacccagagagctataagattgccaatatgcaggactctgacgaggagtatatgccgcgcctgacggcactgaagaactataaccccagtcttgaagtttgggtaggtcagacgcagctgctcatcgcgagatagatattaacaagctcatgatagattgccataggtggctggagcatgaacgaccccgatcaacccacgaggcggaccttctccgagctggcggcatccaagtctcaccaagatgtattcttcgagtctctcctctccttcatggacaagtatggctttgacggggtagacattgactgggagtatccgtaagcgaccgtgcgtttcagtacagaagcatagattgactggagagaagtgtagcagaagagcgctccggcgcccccgaggactttgaaaactatgtatccttcctcaagaatctccgggctgtgttgggaaaccgagggctcaccatcaccctccccgcctcgttctggtacctgcagcactttgacatcaagaacatggagcccattctcgactggttcaacatcatgagctacgacttgcacggcacctgggatggcacaaacccttatctgggcccatacattaattcacatacgaacctcaccgagatcgacctcgccatggagctcctttggagaaacgacatagaccccaaaaaggtcgtcatgggaatgggcttctacggccgcagtttcactctctcagacccagcatgtaacactccaggctgcggcttctcagcaggtggcaacccgggtaagtgctcggcgtcggcagggagcttgatgttctctgagattcaggagattatcgatgcgggcggcgccaaagtgacgaacgacgagaaggctggcgtgcagatggtgacctgggacacaaaccagtgggtatcgtacgacgatgacgagactctcaaagctaagatggagtacgccaacgagctctgcctgggcggagtgatggtctgggcagcctcgacagacgaccacaaaggcaccgccattcgagccctagccaaggccgcggggcgcaccgacctgactgtccctgtgctcgcggcaaaggccaacaacgacccaagccagtgcgtctggggcgagtgcggcgctgactgcccttcagggttgatccctgtcgaagagtcctcgagcaacaagaacccgctagggattgagctgggctgcaatcaaggaactcgttacttcttgctgcccatccaaaaagcccgctcgacctgcaaatggaaagagcagtccccaagttctcgtggtttgtttatccaaaaaccaaatgcaccgccgcccaaaaaaaaaataatggttcggcacaaccaccaagggttctggacaaggccccaaattcgttttttggccccaagaccgagtccactgacgtcctcgatgcctgcaagtggtttggtgccgcccccatctgcgctgccagtgcgttctttccttcactccttggcccactaggtggcgccttctccttccactcctacggctgcgacgacgatgacaaccgccccaacgaactcacaaaggccaaacaggggcagggcgggcagcaaagctgcacctataacggcggattcaagagcttctgctgcgagaacccaacgccgtggaaggactgcaaatggcgcgccggaaacacggcttgggtgcaatgggagaacctcctcttcgggcctattggggctctcttcttcgacttctcaacggactgcaagacgggctgcgagcctggcgagacaactngtgccacggacggttggggctgtcgatcaggtacttattcgtacttctgctgcgcggaccccacca

SEQ ID NO: 12550 - DNA, 127 bp, Emericella nidulans
tgctaattggccagctctgtgacccctcggatctctgctcactctagacgtatcgtacactgtggcactaacgatgtaagacctgagtggacgttgcatctacttcggagaattcctctgtcagcaa

SEQ ID NO: 12551 - DNA, 4505 bp, Emericella nidulans
aagaggattcatcgaaagcccgcatgagcaacatggcgagcaagaacatgaagaagatgaagaagacctttccagtcctaaagggtccgataaagacaaaaccaaagacaatacgggggaatcagatttcaacgaggtgcctctttgatcataaatattaactgttgagcgctacgttcgagtactgtatatcctacccgcctacttgatgacttttgtggagttgaagtttagcctttgacgctttagtttaatgctatgctatcatgcttttgatactcctgctctctattttccattcctcctcgcttgtttgtctgatttcgattcctgtgtcttaccctattgactaccattctgtatagtaaaaggcttcagtccagatggttctctttcactccgtgtcaggaataggtaatcaaaattattcattagttgataaaagctgaatttcgtacgtatcgcttttttcgttcgtagtagaattagtttgtccgcgagatgtcagcgcgtgactatgtaccttgcccaacccaatctttattcaccttcacaaaattgtatattactgttgacgcttctgaagatacagctaatatgctacaacatctctattctatctatgtacacgctgtaaagagtacatacaaattggtgacatgtaccaatattctcatataacgtgcttgatcagttgacatttcgtacaacctcgtcaatagctctggcgacgtaatttacattcttcgggctcactataagcaaaagtatcgttagtttgacccagagctttgcaccgcatagcggaaaaaggtaggcattgtgaagtgccaagagaacttgctaaacttacgtccactgatggaggctctgccggacttgagcaggtagatgtggaatttatctttaagagcgtagacttgtgaaggtgtaagtcctgtgtaggagaacattccgttctgcgtagagtgttagcacctgagaccgttgggatgctatagtttcggtttgggcaaggtacctgttcgacgatgtgtttccaagttccgggggttttgagtctgactagttcattgtaaagagcttcgcgcatggaaattatccgcgaactcatgaccttcagatcctggtgccattttgccgtgagctcaggacttgtgaggactttcttgacgatgttgcagcctgccgtgggacccatggagtactctccgcggatgaggtggcaaaggttgttgacgactgtatcgcggagatcctctgcgccttcgttgaggacgtaatggaaggcgccgactcgctggccgtagaggccaaagttcttagagaaggattgcgcaacgcacatttccatctgcggcttctcgtttaggacgtaccggacagcccaggcgtcttcgtctacggatccggaggcgaagccttggtatgctgagtcgaagaaagggaaaatgcgcttgcgctcgcagaggtcgatgatagctttccattgctccttgttggggtcgagtcctgtgggattgtgggcgcaggcgtggagaagaatcacgtctccttcctgagcttcggattcgagagttgagatcatgccgtcgaaatcaaaggagcgggtggcggcagagtaataggggtatgttttgcggggcactccggcgagttcccaaatagtgaggtggtttgcccaagaggggttggagagccagacatttcgtggcttcatgtgagttgcgaggaagagggcaccgagatggtttgcgccggtgccggcgactgtctggacggtgccaatgcgtgctttggctgcctcctgcttcgcatcagaagtagcttggccgtcgaacccaaacattaggtcccgagcgagagggaggaatgccctatcaccttcaatggctgtgtattcatggcggaagacgctgttttcggctgcgagctgcttctctgcttcctcaacgacggggagaggccatggctggccctcgttggtgcggtaaacgcctacaccgagattgaccttctgcgggaagtcatcgtcgatgtatgcacggttcagggcgaaaatttcgtccggaggaactgggctgacattgagcacggtcattgtgagtgacgtctatgagaacgttgagggcagcagagatcttccgcggggtgaaagtgcggaatgcgagtggagcagtggatgcggtcttatactaggcgagatcgtcccgtagtaataatgagtcaagttgaaaactatgcactctatatctgcattgcatttgtaccaaaaaaccgaaaccacctgggaagcggggagtagcgtcaagatatactgtattccggtgacttgaatccacaaggcttagaccgatatcgcctcgtggatttctatagttgggtctcattgtcattggcttttcataaatttctgatggaaccagagaaagccaattcggcaaacgcagccgctaacttggcttgctgctcaacccgcaccagaataatagtgctttcaattcgtcagacccggctaagacggtcaacatggtttgatgcatcacttaaggtggatgaccttttttttttttttttgtagcgtagacacagtacgcctttagggtccgggcttttctaccggtgcgccgctaggccgctagactgacaccgattaattcgcttatcgtagaaggattgctgagacggccgtttgatgctatagacgattcatgaagtcagaagtcagctggatgtcttctgccaacaatatccgttgccatccatcagaaagccggtgataaccggttagcacctcggcggagatttcgaagaagccggccatgataaaggctaggtggggttaccaaatgtttctcttccaatataagacaacataccgcaaccggagcgctggacgctggcggatgttgcggtggttgatggagttggagaaggaatgccttaacgtgggtgggagtagaggaatggcagtagcacatccccgcatctccaaatcactggacttgacactactacccatctcctttacaactccgcctgcgtcattgttcgtttttgctcgtaaccaatggcaggtaccaaggacctgcatgagctgcgccttgcatttcttgcccagcttctaaacaacagcatccctgccgagcttctgcctcgtttcgaccggtctatgtagattactccgacaaatacaacggcggccgcctgctgccagcatacctacgaactcgcaaagactcggctaatactcgacagcttacagtcatgctgcagagccggatattttcccactgaggacatgcgcggctaaagtcggaagaatcaagaacgagcctgcgcctgttcttgacgaccaagggaagcccaagagagccgactacttttgactttacggaagcggctgggtaaccagtcacctcgcaactgaccacgactactaaacgcctcgtcgacatactggacagattcgacggtcacctggtggcgtttgacgtggattgtcgacttgcacctgagcgcaagcttccccacggtcgggagtgactgctgggttgcaatcaaccgagattgttcaccaaaatactgcatattgtcttctcttgcgcggctatagatcagatcccgagcagggagagtccaacctcgatcttggaagagcatcagttgggggcaatcggctggcggacatgtttcggcggaggtagcgctctactgtcgaaatgccaataccccgctagctctgcaggtcctcgtcgtgcttgtctgcgaattgcaaagtccgttcatgccaaagagagaattgaccgtgagaactgtccatacgaatcgtatagggatatggagtatacaatacctctgcccttagcgaggatgtcatacctccaaaaacccttcgcgggagcgcctctacctgtgctgtcaaacgatgtaaatttactttggtttcttgactttcgttcacggtcacggactcattataaaaccggacgtataggcccctgatttctccgactagcacggctttggtcttcagtgtcgaatagaccctctccgaaacgaagccggagtgtttgcggacaggctgaagcgacagacggacgagtggaactgaccggagttgcagtagctgcgcacgcctcagcggtttcgacgcagtctatcggccaaaatattcaagagaaggatgatagaaactttgacgggggaatttgttccttgacattggagtggccgtgctttggaacttggaagaagaatgtcaaggatgaagggagaacaacggattttggtttatccgccaatcttagataccgtatcatacagctgtttcaggcaaattcttatataaatgtgcgatgtcgtactgtgtaataccgggccgggagtattcggccggcggccggacggcagcaacaggaaagcaccttgaggcctctggggcaggagctgtcgcggtgaactggatccataagtcttttgtgctggccgcctttccttggagt

SEQ ID NO: 12552 - DNA, 754 bp, Emericella nidulans
ccaaagacccaccagaccccatgggggcaaaaccagagaagggagcggccgccaccaaacacgagaacaagaagaccgagcggagacagccagacaacggggcgcacacagaaaaaggagcccacaccaaagggacacccgaaaaccggggccacgaccagaaccagggacaccccaggccggagcaacaagcaggaaggacagaggccaagaggggcaggcagcacctaagcaccacaggagcccgccgaaggagcacaaccaaagaggccccgaccaaaaaggaacaaaggccagacgacccgccacaaccaggggaggaaccaaacaaaggaaaaaggacccgaggccaacaacccgagacagcagccaagccaacggcccaaaaacagaaggcaccgaccccaaagagaccaaacgacccccggcagaacaccacccgcgggagcgggccaacaacgggaccgcaacagaaagggcggaggacacccacgacccgggaaccaggaaaaaacaaagccgcacggccacaggagcgggaggcaaccagccggggggcccaaccaccgggcccccaaaaaggaaacccgccaaaccccgacgaccaaaaaaaaagaaaagccccagcggccggccaagccaaaacctgaccaacgggaggggcccgcagggccaaacgggaaacccaccggaagaaacacggccgaagggggccaaaagcccagcccggacgggggcagtcggccacaaacca

SEQ ID NO: 12553 - DNA, 131 bp, Emericella nidulans
ctggtatgattaaggtaacacgggatggttgtcacaatgatgaaccgcctcgtctctccatgttggacccatgcgtcatcgatagtcgttctcaagtgctgaacaaggatggcataagtgcctattgcata

SEQ ID NO: 12554 - DNA, 180 bp, Emericella nidulans
aggagtataaaccatgaacgtagatacggcttgccagaacgaagcaagagaattctcgcagatggtcgaagctctaatatacttcgccgcggaccaatcgtcattgtcactcgaccgtgtcgtcgtactccctgaaaatgcgtggctgaggtctggactagaccgaggtcctccaatccg

SEQ ID NO: 12555 - DNA, 784 bp, Emericella nidulans
  unsure (1)..(784): unsure at all n locations
acaaaaaaagggaaaantgaaaaaagggaaaggccgaatacaccaagcgaacacagccgcaaacgcagggggcaggaatgaagaaacaggggggagaccccaaaaccccggagggagacaaggcggaaaccgcaaagaaggaagccacgcagaaagaagagaaaaaccccccaacaggaagacaggccaaagccgcagcccaaaccacggcacgagaaacacaggcacccgacaagggcagcgcagcccgcccgacaaaagaaagcccggggcagcccacacacggccccagaaccagaccacccaggcagaacccagaaggacaaccacgccccgaagaaagacgcagccaagcccgcaaagagacaaggcccccacagacgccaaaaaagcaaagcccaagggccaaaacacacagggccccagccggatggcacccaagcaacacgaaccccgagggaaccaggaccgaccaaccccacccagcggaaaggcgaggccaaaggcccagcagaccgacaacccacaaacgggcccccaaaaggccgcccgaaagaaaaccaaaacggggcaggcccccccacaaaacaccaagagacctgcaaacacaacaagggcccgacccaaacggaacacaggaaaagcggggaacagcaaaccagcaacgggccaaccccggaaaaccccccaacagaaaaaacccgccacaggaaacccaacaaccacccccaaaaccccccggcccaagaaccaaacccccgtgccccccaaagaccacagaaaa

SEQ ID NO: 12556 - DNA, 2561 bp, Emericella nidulans
taccattgcagtcatggtgggtaagcatctggaccggcgactctaccataataggcgagcctagagccagcggacacgatcggatgttctacctaaccatctacatggccatttccatggctgcctgtctaattggaactctgaggtgtcttgccctggccctggcctttatctcctcctcccgcgctcttttcaatgatctgctgggaacaatcctccgcgcgcccctacgctggctcgacaccgtccccctcggccgcattctcaaccgcttcacatctgacatctacttgctcgactggcgactcggctacgatatcggacatgttttgtacaaactgctcgagttagtgggtatattggttgcaggagtagccgtctcccctcttcttctgttccttgcttgcgtcttgctggccctctgcatgcgcctctgtagcgtgtaccttgctggcgtgcgtgaaataaaacgcctcgaaagtacagccaagtctcccgtgatggaaaaattcggctccagcctctctggcctctctacaatccgcgccttcaataaagcagagacgtatattgccgacatgcataccctcattactcgccacgcacaagcatcctggtacctctggctcttcaatcggtggttggggttctggatggcgcttgttggtgcgctcttctcgacactcactgcttcactgttggtttatatgcccggtgtctcggccgcactggcaggctttgcgatgagctttgcgctgcagtacaactacgccgtggcaatgggactgcggttctatgccaatgtggagattgatatgaatgctaccgagcgtgtgctggagtacgctaatatcgagacggagagtcaatccgggtacacgccccctgcatcatggccgacaaagggtcggatcgaggtcgaagacttggaagtcagctacgcgcctgacctgccgcctgtcctgaatggggtgtcgtttgtagtagataataaccagcgcatcggggtcgtgggacgcacaggcgcgggaaagtcctccctaacactcgcactgttccgcttcctcgaagcccgacgcggccggattatgatggacggcctggatatcggacatgtcaagctgtccgagctgagaagtcggctggcaatcattccacaggatcctgtcctcttctcggggactataaggtcgaatcttgatccgttcggggaacatagtgacttggaactattcaatgcgctggaacgggtacatctgctgcggtttgaggatacgtcgacgcttgcctccagctctgcttcggcgtcttgttcgggatcagaggcctatcctccgtcagatggtagtcggagtccaactacgacagctggtacaagcccaactgaccccatgagcgcgagcataactctcactgcttcctcaacctctacttcaaaagccaaagaaaccggctttttcgcatccctctcctctccagtaaccacgaatggcggcaatctatctcacggtcagcggcagctcctgtgtttagcccgcgccattctaacccgtcccaagatcatggttctggatgaagcgacttccgcggtggacatggagacagacgcattgattcagcaatccatccgcaccgaatttggaaggtccgactcgagtttactggttattgcacatagactgagcacgattgcggactttgacaagatcctggtcctggatgccggaagggttgttgagtcgggggctccgagagagcttctaaagactgaaggtggtatgtttagggccctggttgaaagaagtggggagagagaagttgttgagaagattattctgggtacgtccagagaagaatgatctttagagttgaaaattgatggttgtctggggcttagcgggagttcttgatgatctattctgggtggtatcgtgtattatatttgctacaaattgagacaacttgccctactcaagggcttgaacaatgcattttacagagcaaaaacttcgacgcctttggcctgactgcacttaatgatgataaaaccctctgctaacagtcactttgtttgtggtctagcttctctgtcccagaattgcatgaaatgagggtcagtatccgaatccatggatatcggtcgagctctgtggctaatccgttgttccggctgctaaacgtgcgagttcgggtctggcggcagatctaactacttgaggccctgatggaattgctctcaatcgtgaattgttcttatttccttttaattctctctgaagaataaagaaaacgtgactgagcagtggcagaggccgcgtgatccatcctcaagttcggggcaaaccggcgtgatatcgacacccgggtcctaagtataacaagccatcatgagccatcatccagcaataataaccagtaataaaaacatgcaactttaaggctccaacaaattcttgcgatatcagctatcatgagcagtctcctccaagccaagccccacctcacagcagccctctctttcctcgcattcggtggtaccatggcaattcgcctcagcaaac

SEQ ID NO: 12557 - DNA, 125 bp, Emericella nidulans
cagatatccggaaacaatcagtgcgattattatcggtaccagtatgcagtttgacacagagtgttcatcatagttcgtactttcaatcatacgtagcatactcctcctatcactagacttacttc

SEQ ID NO: 12558 - DNA, 245 bp, Emericella nidulans
ggtattgaggactatgagcagttaatgcagagaactagacatggtgtggttgggatgcgcgattcaatgcacattcactgaagcactttattagggtgtgattcattatcgacgctgcggtatctgtggctgacaaggttatcgtcactgtcgacagccactgtgggatcgtgatattcattgagggcctcgaggatcaagtcagtatccatgggagcgctcagagttagggcggtatggatgtg

SEQ ID NO: 12559 - DNA, 565 bp, Emericella nidulans
tacgcgcctagccttgttccgcgctatcgctggacacattcacatgcgcaacgcggctgccactcaagctcattttataccgaactctgccgccacaggctgctagatatatcttctcttcgataggaaacacagccagcgctcagccgcacattagcgctgcaagctactgacgtgcatctctcatacatcaccggatgagagaggaaccgtgccagagcaccaaccctggtcagacactcgccatctgcatgcgccccagctgcactgtgcgagccacaacctctatgattacgtaccttgaatctatgtccacggctctgcatgaacctgcagaactgatcaggtgcgaggcggctagcgctcatatggcatggctcggctctgcgcatattatagagagccttcggcagcagaacgcttgcaggacgaggttaaccgagactcttttggcatctgaatgaaatcgtctgcgtggattatcgctgtggcaagcatcttttgtaccgcggctcgatagaaatgccccagggcgcattcatgactactgaggtactcccggggt

SEQ ID NO: 12560 - DNA, 871 bp, Emericella nidulans
ggaaaactgttctgctagaacgcctaacggatttgtctcgatactgtcaacgccttgaatatgggttttttatataccgcgtatggtgcccacagtggtgccggtgagaaaccagaacgactactcatgcggagttagagaatgccaccggcctaacccagattaactgagacctttttgagctgctacgggacttggtggctcccggtatactgcttgctcaggatatcgcttgctcaggatatcactcttcgcactttctatctcagcaccaagaaacatttcagggttcaagatctctatccggggaacccctgtttatccagaactgaccgggatatgaatgtggagtgtggagatggagatattgcagcagaccatgccagactagtggcacggtatcggttcttcgcttcaatgactgcaaaggacatcctggagctaatagcttaatctggtctaatacacaccttgcgtgtcagatattctgcttggatacaaatttcctagggatattgactctgaactaataaccccttcactgtaattttggtttactatcgatggcgccccatcgccatggtattatgttaagtacctactgtccgtcttattgtttgcagatatcttcactcaaatctgtcctacgttttcctaccccaaatgctctttgagccctgagaccctactgtttctttgttgctgtcactcctatcgaattcccttcttcataatatgttcacacacccaatgtttttcctactctccattctttctacccacattgtatgctctgttctacgctatatagtttgcgttttctttcattttgcactttcatattatttactttacaatgcacttttaactt

SEQ ID NO: 12561 - DNA, 123 bp, Emericella nidulans
catcatacgccacgagataccaagagcatcttatggagccggccattacaagtaacacggtgtagatttgcaaatgtcgtgaattggatgggctctgggacacacgaatgtaggtccagtctt

SEQ ID NO: 12562 - DNA, 3877 bp, Emericella nidulans
gtgcagcttctacggaaggactcctcatctacagcctggatacggaattcctgttcgacccgtttgatctcgatatctctattaccccggcttccattctttccaccgtcgaaggtgcaaagaaggctgctgccaccggcgatgcgaacaacgacgacacttacttgaaggcgcttgtcatggcgttccgtctcaatgaagccaagctcatacgtgccgttcacgaagctatccctccctcagatattgcccatgttgtccgctctgtaccaaccgtatacctccctcgtcttctccgatacgtcgcccacgcttgcgaagagacgccgcatctcgaattcaatcttctgtggatcgagtctctgttcagtagccatggtcgatacttgaaggataacgcaggttcactgggtcctgagctccgtgctgttcagcgtgctcttgatgatatcaatgaaaatatcaaacgcctctcccagaagaacgtccataatctcaactaccttctcgctaagcctgtcctgactgggaggaaagcccccgccctccccaaagcgattgacactcttgatgcggccgccactaatggcgatgctacaatgagtgatgccggcaccgatgcggagggcgaatggcatggtttggaatgattgtatgtcagcttctctatacctttctcttctctgattctttgtgttggacatcctgcctcattctttgcatttgcgcttggcgtttcataccgtgatgctatataccttagaataaactgggacggctaaaagttctcctgccttttgtgtacatacgctatgtaataacagcacatcccactgggtattctcaatttctccatgtttattcaagtggttcttggacgtttcttcgatgaagcacaatttctcgattttaaaagctctaggtaagatgaaggcggcctcttccgatgctgttctcttgctggcttcaacacatagcaaccggtaggaatcaagctactgcatgttataatcatttccagctctactctgtcctctcggggcccaccgtcagtcatttcaacaaaggccatcctggtttgacttgcatggtgggtggtgaatggaacagtccacgctaaccctaaactgtgcatctgtaaacaggcctctatactcattcaccttcaacttcattatttcactccagctaaagaggtaatcaaggtatatagcagtcttcattgcttttcctctatctcttttcctctttttctctccacctgctccttccacgttcattctgtactgttcattctgtactgttatatccatagccgttggcctcttcccgcactatcaaagaatcgacttgggtagtgtcattctggtttgagattgttcacgatgtcccccatggtcctttgcacttcgttgctggtcttgcttgcctggcttctctcgaagtctcccactgacaccacccctgttaatgttcctactgtgacgctcggtcgttttgtcccttgttttgttgaccgtctgctgttctgcgccaagggaccgtttctcatatacgatggctataagaaggtaggatttgagttgcctttctgactttaccacgagcatactcacctgttgcgcttagtataagaacgttccgttccgagtccgcaaagtcgatacggatctcctcgtcctcccagcaaagtatctagaagagattcgtcatcttcctcacacgaggctcagtcttctggacgcacaatttgatgtgattggctgcttctatctgatacgttctcatgctaatcgttccacagagcgtttgtggcgactataccaatatcctaagtgatagttttctgcccgcacaaactgttgtgaagaagctgactccagcactcggtgagcaaccccattcctctctttatcatggaaatcctaactgacagtgcaaacaggtcgaattgtccctgatgtcattgacgagctcaagcatgccttcgatgtcgaggtgcctgagtgctacggtacggctgggtctttctaattgaacatcaccaagacgggtatctaatacaggattaatccacagacaaatgggtaactgtcaccatttattctatgatcctcaaattgatcaaccgttccacctcgcgtatcattgtcggtgactccctttgccgtagcgaagactggctcaatactgtgctagactacacatataatttgggcacaatcatctttcttctccgtccgctgcctcgttttcttcgccccttggttgcaggtcttcttccccaagtccgccacgcaagaaagatccttgatcacgtcaagaatgatatcatcgtccctatgatccttgagcgccgtcaaaaagaagccaacgattccaactaccggaagccggacgatttcatgcagtggatgatggatactgcagacaatgactatgataagcagcctggaaacatcgcacaaggtctcatgattatcatggctcttgctgttatccacacctcaactatcaccatcacgcaaagtctctacgatcttctcattcgtcccgaatacgtccagccccttcgtcaagagatcatcgatacactcaagcatggatgggcaaacgctaccagggcagactttgctactcaggtccgcctcgatagctttcttcgcgagtctcagcgcctcaaccctacccatgaagtcaacgtccagcgcatcgccaaagaaactctcgtctttaaagatggattcgttgttcccaagggcacgcacatctgtttcgcagctgggcccctttctcgcgatccagagctcatcgatgaccccgaaacctttgacggtttccgctggtgcaaggatagacagtacaacaagaaaggtcacaacaacagccttgtcgccctcagcaagctgaacctgcactttggatatggacgtcaggcctgccccggtcgattctttgctgaaaacacatccaaggcgatcctcagccgtcttcttgtcgagtacgatctcaagttcccagagggtaaggagggaaggaggccttggaacatccgcaatggggagcagattgtgccgaacgtctataccaaggtgctgatcaggaagcgcctggtcaatctctgatttctgatgacattactctgcgaagaatccacgactgatgaacctcttcgagtttttgtgtcatagtatttttgttttttatttctattagaagggaaacttgggataacatttatttagtgggaagtccgaatggagttcactgtgtggagtgaaaaatggttaagatttgggcattagtgcagacctttgagctgctgtggacatacgatttcctatatgcataccacttcttgcaaacaataggataggttcaccttaggttggccagagtaccttccgcttctgccaatatgcgactattagtcgcgactcagaggatagcaaccgcgttcggcggactcgctacacctccaggaacctgtgcatcagatgatcagcaattgcagcaaactacatagcccaaatcaaaataagagacaaataaaatataaaatgacaaaggtaaataacaaaccttaagcggaatactgctcaagaagaaactgccacctccccttctccctacaatattttgcaagctcttccagatcaaagtactccccgatcggcattccccacgcactcagacaccactgatgcagcgtcacctcatgtccaaccccctgctcgggcctaaacatcggcgccggttcaaaagctggactgtcactcgcgattgccgcacactggttctcccacaaccagcgcaatgtgttcttaccgttctcgacgcccgcacagtttggtgttggtcgcgcggcaatggctgc

SEQ ID NO: 12563 - DNA, 778 bp, Emericella nidulans
gcccattgccgtggtttattgccatttctgtacaaccactcctccacgcttgaactcgggcaggtcacccagcacggctgccttatcagtgagttctttgctagggaatgttgtcaaaagcacccacgggcgagcctggctctggggactagcagcggacacaaaatcataaacatcgccaattgtatgagtagtattgaaccgggaggtaagacgtgttccgtcgccgagtcgaatttgcaaagtgacaacaggctgggattcatccacatttggcttgggaggtccagagctggattgaggcgctggggctggttcggagggtgcaggtgctcgaatcccgggcgtcgggctacccagtcgctgtcccttgcccgcaaaaggctggtacttaggcttcggcctgacatatttttcgtcatgttgtttgatctcaacatccacatcctggccatgctgcgcgttcataatcgacagcggagcgcggccctgtcgaatgctattcagaatctcggcattctgaggatcgtcggagcgatatagttcaccatcgtcaacggaaaaaccatccgcccagaaatggagcgtccgccgcacacgtcgaggaatctgaggctgagcaggcccactcggagtatcaatcactctgcttggtgtgtcctcaccacctaatgtgcgggcggggccagtgaagtagtttcgtcttggttcgctgtcatcggatgccgggagctgagttctggaagcaatgagtatttgggtaattaatcacgataaa

SEQ ID NO: 12564 - DNA, 461 bp, Emericella nidulans
tgttacgcggccgtctactctagggccacaatgcccccgcgccactgggagcgtcctgctcacaacccgaggtatttccgaacgcccaggtgaaagacagcggccacgctccatgggagctcgtgggcaatggaggactgagcacccaatatctcgcgcgcacgcggcagcgcgcgcagcgcattcaccgtgcctatcaccacactacttgaggccgatatatccttgttgacaccgcacatgatccaagccaccatgacctccatacctggttacggccccaagaagcgcgagacatccgagctgatatccggcagctgccgaggccttgctcgctgccttttgggccccgaggccgaccttcgggacatgaaccgagcccgacgtacactgggtcgcccgcaggcgctgaggacatgagccagccgcagcggttcctgtgtggaaaggcaatgagcatg

SEQ ID NO: 12565 - DNA, 141 bp, Emericella nidulans
ttcctacgtttgcagtgcccgctgttggggattctgtaccattggatccatagacggtcgaagtgtatgagagtctagaggtttatggaaacatgaagctaagaaataaagtgagaaggaaagccaggagagcaaactgcg

SEQ ID NO: 12566 - DNA, 472 bp, Emericella nidulans
  unsure (1)..(472): unsure at all n locations
ttaacgggcatcactgctccaccgatctcacagcacgccctggtcagagcgcaagtctgaggacacgtggggatatgttcttaagggccgctgtccctatatgtgctctcacttcaattccacagggaccaataggctggtatggataccatacttgattgctggattgctgatgagtctgcatgcggcatgggacgacgagaacctcaccagactgtattggatctgaaccaccaggtgcatatggggcccattcaagacctgctatgattagatagacagtggcgatatgtgtgggattacaatgatgtcatacatgatcacagtcgtcttctgagcaactgctgtgttgtcgtgngaacaacagctatacgttgcttgctcaacactgctcagcttgacactaaagatacatggtgatggatggcgctatcatgtgatcttcggactaactaaaactaccaggttgctg

SEQ ID NO: 12567 - DNA, 576 bp, Emericella nidulans
cctggaccttctcgactctggacacggtgagacacagcactattgctggtggtagtagagggtacatttttaaagatgagtggtgcatctgattaaccccatctacgctcatgagcgctatatactatataggattcgagccatagtgctgcgaaatcgatacgtatttgcatggtcacagcacataagcccaggggagaaccaccagcgccaaagtgtaacgctaccgtacactgaaccgacgcattttctttcctagaaccagaaacggggaccgtaagacatacgcccgccctaccgataacaccgtttaacctgcatgctcacactcggccattgttccggatcagtcacacttctgtgtaagtacatccagcactccctgtatgcgcacacaagactgtactgttcaacttgtcttatgcaggatattctcgaccgcgaattgtccgactgtatcaacgctttttgacagtgaccaggagggcttccgaattaagcaaggctagactgtttggtgaaaacttgggctcagccacgcacaccgaccttgtctgagaacccacttgagctgga

SEQ ID NO: 12568 - DNA, 2451 bp, Emericella nidulans
gtcagtccacaaaggaactatttgtagtaatcaccaaacatacccgaggcttatcaagagtaaaaggctcgaatctggtctcaaacgtatccgcaagtacctagtccaagcgaaggtattagcattcagcttgtgcggcggttcgagaccacatacaacagcctgcaacgtctcctctacctcctcagtcgcgttcccacgcggtttattggagccgccgcctttctttggcgccatttgcaagcgatttctgtgagaacgaacagagaggtcgacaaaaaaaaagtcaccaccacttaggagtcatccatcatcccactttcaacggcgactcaccgcccggcagttttgcttgttttgtcttgtttgcttactgtcaaatcacatgattattgcccgtgtcgcaccgccacatgcaagtgcatggttcgttccagcctcaacgggtccagattcagctgaaggtctggaccctcgtggacttcaaggggattgagattcctggagctgggcgcaggtctagacctgtgttatctgcatggatcagatcagaatgttcatcgctggtggcccgggcttgaatctagggtccttgctcgccgatcccggttcgacaggtttgttgtttaatgtggtcataaggagattccacctgggcaacatagcagaatgagatatctgccattccaagattgtctgtctatcccagtgttgctttgtttgccgttgagctgtgtatctgcgtgatagaatagcatgccctatccctgaacattaagctctatctgttgtaaagatgaaatgaatatgtcatcattctggtaaagctatgtgtccagacgtcgcaaagaaaccaggtgactgggtcagataatagatcgccagatatctcacgggattattggccagaaaaatagagaaaagcatgcgtctgcaaaccaggcgttcaaaatattctgtacaaataaggcgcactaacaaacctcaatgccaggagccaacatctcagaacccctctaaaacaatatccccacacaaagcaataacggtatgtactctaaataaacacgacacgcagcctatgcaatatataatcccagaaacgccaattgtatcgagtgagtgcccactttcatggtagaatttaaaaaaaggatgcaaaaaagttgccacggatatcattagcagagaaggtaaattgcggcaaatgatcgattccaaaatgcgcttctgcgagagttaccgccgaaggggaaagatgagagggtatatatggtagcgacggtttctttaaaacggtacacaatcgggaacccgttttaatgagtgcgagttgcgggcatggagccaaccatgggctgagattgaggcgcatacatacgttgtcgtttcgcaaggttggggttatcgtttccgttgcctaattcagagatgtgccgacgtggctgcggtcgcacttgaccgggcccagcagcgcccatcgctaccgtaggcggtgctggatattgcataccattctgatccatagcataggcggttgtcgctgggtttgctggaacatattggccttgaacctgctgaagattggcaggaactgcagccatgggttgaaactgattcggggattgccaggcagtcatggcggctgcgggggactggctgggggaggatgtatcttccttgatggtgaccgactgcgcagccgagctttggcccgcgattgttaccggcgtcgtagcttgatgaccttccattccctgtggaacagttttgaggtgaactagatgtttctctagcatttccaaaagacttttccgcgtgaacggctttggaaggacatcatccattcctaataacagtcagcattgcacatttgactgaacaaattacggaagccgcgtaccatgctggaagtaaagctgaatatcatcgcttcggatgttggatgtcatagcaatgataggcgtccgatcaaattgacgaatgagatgacatgcagaaactccatccagattgggcattataatgtccataagaatcaggtcgtatttggagccgtcttgaaccttgttcacagcttccaaaccatcaagctgcaatatgtcaataacgacggccctggttactgggtgtgtccataacgtaccgctgtatctatttcgcaagagaaagaataaaggaacttcccgccgatttgacgacacgttgcgtcatcctcgacaagtagaattcgtgggctgcgcatccagcctgggtcaacatgattgctctttttcctgttttcagggaactgtcttcgatcgtccatatcctgcttagggggcactgtgtagggaacattgttgacatgctcgccgtacatcgggtctattccgtttgttgcgccgacgggatagacgacaggttccatctcaccattcatcttcggatagaccaaagccgggttggttg

SEQ ID NO: 12569 - DNA, 2162 bp, Emericella nidulans
ctgctacttcctaatccttatagcccatgaccgcttcctagcatgactctgcaggctcaatcactagtcattagtgtagccgctgcaggttacagggttttcataatcgttccaggctatcctcagactggcaagtttcaggggcagagaacacatcatcataatgggccttttcaaaatcctcgcaccatgcaccccggccttagctgcggctcctgagttccagcaagaggatatcatcacccgtgatggctgcatcttgagaggcggtgccaccggttcctacgctgccatgcagctggttgaacgagggcactcaatggcggtcctggacgatctcaggcgcatgggcgatgccggcacttacctgattaacaagaagcccgagtacgtcgcattcgattcgcgttggccggcctcgatcatggccccccagaagatgtgcgtgatggtttctatcgggagctctacgcattttagaacagcgcagcacatattacataggatatgccttttatacggattacacagctcagctccacatattatataggatatgccttttatgcggattacacagctcagctttggagctatacccgctccatcgtcgacgtgatgacggctgagctgggtagttcgactggtcggattaggagatatgaagccacctgttggtatgaaggcaccaatctttgggtctcgaatatgagtatcttttatgtagctgagctgaagctcttcccaagtttcccatttctgaacctagtccattgtttgtctcgcatactttgagttcactctgtaagtcacataacagaataaaatagaaaactatatttgcttcttccaagcaaacattcttaaagggccaagcctgattaaggttgaattaagattatcctttttttctcttggtgaatgaagtacagaggctgtaatgcctcaggcgtcaacaacaaaggcatataacatcttctctaattcttgaattttctgctctgccattcataacttgtcacactgagctcttcacatccctgctgggtggcaatgatggctctctatcttcacaccgcagctagctcaggcgcggcttgtgatggccttcaggcgccctcgatccccgacgccagagtgctctggatcacttcaaacaccgtccaaaacttcacctacccccccgtcactggacttaccggagagccaattgctggagccacaggggactcttctccgctgaccttttgcaacgtctcaatggttttgacccacccaggcgacaacgacaccgtcctcgtctccgtctggctgcctccccatgacacctggaacactcgctacactgcaacaggaggaggcggtcttggagccggctacgacttcaacatgatcagtccccttgctgctggatttgcagcctctgccactgacgcaggacttaccctcaacaacaccatcatggccgacacggggctctggggactcaaggaggacggcaccgtcaacgagccccttttcaagaatctcggttaccgctctatccatgacatggccgtggcttccaaagacgtgattaagcagttctacggcgtcgagcccaagtactcgtactgggccggctgctcgcagggaggacgccagggctacgccgctgccgcgaagtatcctaccgactttgacgggatccttgccgtcgctccaggactgggctttggccacgttggacttgcagctttctggcctgttgttgtgatgtacaatgagggtgagtacgtcccctcatgcattttcgacaagttcgaagcggcgcttcttgaatcctgcgatccggatgatggcctcgtagacggtctcattaccgattacgacctcctcatatcctgtccacgctcgttcaatacttctgctcttatagggcaaaccgtcacttgccgtgaagctgggaataccaacttcacgatcaccgagcgccaggcgatcattgtaagtaagatcctcaacgggccgagccacaatgggaaacagtactggtttgggacggtccctggtgcaaccttctccggtattgcagagactgttttcgacaatgccactggcaggtggctccccaaaccctttgctcctgcggccgggtggctcacgaacatcatcgtccgcag

SEQ ID NO: 12570 - DNA, 609 bp, Emericella nidulans
ggctacagcagactgtctatccaacgtgccaacagctgcatctggtgcgctccatagcccctttactagacagcagtttgtttcctagaccagcggtagctgctactaacggcttactcccaaacgccgcatgaacttatgccaatcgtcaccgctcattcattgacttactcacatgtagcaggcctagaacgaatctgtcaactcaatcatcttcggcaggctctgactacagaacgctgagtcatgcgccccctgtactctgtagatattccgcatagacagaagagggggatacactgagaacagtctgcctgaaaaagagatgactcccttgattctctacaaacaacaaccgagcctcccagctgcggctacttgaaatgacagacgcgccaaccctttccagggtcagcgacactccctataacgggactccaaagaagaagcaccgcaatggtcatttgttgcctgcaatggctctaggcgcgtgccaaaaattgcttatttacggccacatgagcattcagtaccaccagccatggtcgtcgagtgagaaactacctgctgccacaattgaaacaggggtcgctccaaaagccaaaagcc

SEQ ID NO: 12571 - DNA, 130 bp, Emericella nidulans
tattagtcagcataggccgaaaacctgggtaagaggcagtgtcagagcaccggccttaggatatgactacgatcagcgcgtctataatgcgtacgaactacgagaaagtgatgggcctatgctgcaaagt

SEQ ID NO: 12572 - DNA, 573 bp, Emericella nidulans
catgggcatcacgatgatgcatctccccgtggttcttaactctgctgtatagtatggtacccatactcggactggaaccattttgcgggtccggatggctggaggcacggcatttacacggccatatgaaggatataacccaagccctattggttgctgaccgacgagtcaaccggaaacgctaacaacgcaatacacacactgtgacacacttttatgctctctgtgatgcgatgccatgccgaataagggcattcccacaaaggaccgacaatcttcaagctaccgctagacctctaacggaatgagcctgatatatgcgcttaagacaatccaaggagctcgtgaggtacttagaaatcaggggagattttccaccttaatggccaaaaggatcctcactgtaggggcatgaagactcaatctacagcttatggagctggtagatactgtacgacgcgtgagaggctcactgcatattctgcagacgcctaggaaggctcatgcgactgtctaagagacggaattggctgcattttacgctcttggctatcattaattaggcactgttat

SEQ ID NO: 12573 - DNA, 654 bp, Emericella nidulans
ctcagggcgctactcctggaactgcccctcgctggtggccaacctctctcgagctgatgcgcgcgtccctttataccagtgacgacacctgaccgttccagcgcagcgcctgcaggcctgatgaagtgacttgcatgacagtgcatacccccataggctagtacagtggctgacactaggagcgcttcaagacattctggaggtccagtgtccaacagttcctgatgaggaccccatggcctccatccgagaccgggagactgaatcctgtcacctagggcgcagacttccagataaccactatcatgaaccatgaccagttgcacatcctggtgcgttgatgtagacatgatatacagttgtagctgccgctgagagactacactgagcgctcctgataatacacattctgaacgcacattttcgacacatgccatgatgctccaccccacgttccgtggcgagaggcagctcgctctgagcggtaaaccacagtgtgcccttccgaaagatcgcgatgcgaaccatcatgtccatcgcgcttgcaaggcgggttcgccttaggaatacccagtttccgtttccatacgggccaaaagtccttggcgcttggaaccggaagcatgacatgatgaacacaactgtcaaacgcta

SEQ ID NO: 12574 - DNA, 1478 bp, Emericella nidulans
cgtccataggcatcaggtgtaaggacggggttgttcttgcagtcgagaagatcatcaccagcaaactcctgaagcccggtgcgaacaagcgaatatctactgtcgatcgtcacgttggcattgtgagtcgtcaccgtttgtcaaagattattgagagacccaactgtttgtactaacacgggttcctgtaattgataggtctcatcgggattggctcccgatggtcgtcattttgtttcccgtgctcgcgatgaagcgtcctcatggcgtgggatttacaaaagtcctattcccgtttcggctctagcgaaccgtcttgggggctacgtgcaagcatacaccttgtactcaagcgttcgaccatttggtgttacttcaattgttgggggctgggactctgaggctgagcttgcagtcgatggtcaagtgggaagtggaccgcagtcaggttctggcgggaaagtcgaaggcgcgaaatcgggaggaccaggtttatatatgatcgaaccaagcggtctgtattgggtatgttatctcaaattgcattggatgttttacgcacgctgatatcgttccaggggtactatggggctgcaaccggtaaaggaaggcaggcggccaaagccgaacttgaaaagctagacctggcttcggagaaactcagcctgcaagatgctgtaaaggaggcggctaggattatctacgttgctcatgaagataacaaggacaaggaatttgagcttgaaatgagctggattagctcactgaatggtccaacaaaaggcagacacgaagaggtgccgaaagaactactcgaggaggcagaacgagcggctaagcgggcccttgaaggagacgacgaggaagaagaagatggttcgaaagcaaccggcaatgagggcgagaggatggaagagtgagccaacagtttcgggcaaggattcaaagaatcaaataaagtcaagaagttattttcgatttccttcctataccaagtttccttgagtattgcccatgataaaatatatcaatagtgtttgcgtttgcggttgtttattagggggcgggagctctcaagcaacctcgccctttgcccagcctcttctcctaacgccaagttcaacggccgcatttccccagtcttcaccgtgattgtgcattcccttagaacccaatccagctctctcaagaccttgctcttcagtcaaaagagtgagcacgccgaaaatgacaggaacaccggtatctagctgaacacgcatcaagccatgggtgaccgcgtctgcaatgtactcgaagtgcatcgtctcgcccttgatgagaaccccaatcgcaatgatcgcgtcgtagggtttcgaagcagcgcttgaggctgtcgatggcgtcttgctcacatccgccgtagaagacgagagtagatctgttgcgctgatgccttcccccgatgaccccgcgttggcggcttgtagttgcgaggc

SEQ ID NO: 12575 - DNA, 104 bp, Emericella nidulans
tatctcgccggtggaagtttgacagtagcggttagtgcgagaccaaatgcgtgaacagacggtgcatgactgagtaataggtacttagttctccagtcattgcc

SEQ ID NO: 12576 - DNA, 1797 bp, Emericella nidulans
caaaactgggtcatactttgcttgaccctttgctgaggaacgtgttcaagctagatttcgtccgaattcgcatgctaaccacaaacaagaccaatgccacaacccactcacaccacaaaatcggaaaggcccgatacagatgcgggttacacccgtccatccagttctgaagcaggagctcataaagagaatgtgccgggaatgcatacccgatacgatagaagcccggagacaggtcaaacggaccaatggtactggagacgttgagtatggtccaggtcaagacaaagaaaggtacgatgggcatcgggatgacagagatagcggagtcgatgaaaaggaaatggacatgcatggccagccagattgccatccaggttaaagcgaattggccggacgagacatcccgattttcgcggaacgcccaaatatatccagtcattacgaggggcggcaccgaatgtgtagcagactgatatggtgaatcggaggatagtgttctgtcttggggagtaggcgttgaagatgttggtttgggcagagatgcaccgaaagccattatgaagaactggataaggataggcataaccattgagactgtattgtagtagagccggacgccctggttcattggctgaatattaggtagatgagactggatcgagaacaattttcgcaatgtaggggtcggaggcgttgtctgcgtttagggctacggtaaggctcgtctgcttgtagatggcagcagcggcttgagagagctgagccagattcgagtacacgccttgcgcataggccgaacaaacggcacttttataaacataacctagggcctgggtgctatcgtacgctttcgcgctgtctgatgaagatagcgcgtcagttattcgcaaggaggcaccagggtcagaatatatagctctccagtagtcgcctttgcagtagcttcctggatgtcctgctctgttgggtactcctcttgcgtgtgttggtggatagttggaaatccagggcattgtatcatggtgtaggccgttgtgacggactggccaaccgcgcccccatcgtagtcgacatacaacaccttcattgtgctatatcgcaaggagccgcgatacgctgtgccgtacagatagctcatattgcaaggattagcaactgcaacgagactgttgcgccgacaacgccagtgaggaagggtttgaggaccgtcatggtgcctgccttccgtcgtagtttgccaaggtgtcaaaaaagagaagtgaggggttagaggtgcacgagtgctttgaggattgcggaatgcccattatacaagaagggatccgtatctataagtatgtgtcaacatgggaggtcgacaagcaagatgccaataatccctcacaccgagttcaatcttacttccgtaggaaggattttggctctggacccttcagtgaaactaaaaaaatcatcattggaatacgtatcgaaattgtgacactgatctccactcgcctggacataatactccgtagaacatccgatgctcgacgaccttccgatgaggtaagcggaaggacccattaatttcggcagcggcgctctccgtccggcctccgaagtatacccatgtcttcagtagatatagtaagaacactagcaaaccgatctaaccaccgaattcaggtaatgacccgagtgggcaggccgctgcagatcggcgcggtcgtctttccgcctgcaggctctttagaaggtatgaggctttttcatcggcctatatctcgagaatgtatgtataaaaagctgcac

SEQ ID NO: 12577 - DNA, 261 bp, Emericella nidulans
taacggccgccagttgtagtgtagcgctaaaggcgcaggacgtcaggtcattcgtccaaccggaccagcacaaggaggtgtctgatcggaaaacccgaaagagtcttgataccgaggaggtacggtcagctataatatctgaaaccaatgataacatttaatcaaacaagcgcataacccaccgaccggccctattatatgggatgcgcgtaatactggaatcagcatagaatctccgcagagtctcagtaacgacaacga

SEQ ID NO: 12578 - DNA, 898 bp, Emericella nidulans
tatgacatgacgctcctatggagagtattacagaaacgcccaatgacggaacgggtttttaacgctgtatttggttggatctgtcgcatgcgcacattgttggaggtatcgtaccggtactcagagaacacgctgcgtttgtctgtggtgccgaactgacttactatgacgtgtcagctcatgccctcagaggatgggcccgagcaacgccggtagactacaatcgactgttttctggggagcactcgatgttcacaccacattctctgtacagcgtgatctgtacctggcacactcattacgtacgtggatctcacagtgtaagcccatagctgaccatctgatcgtacttagcgagcgtacagattgtgtcgggactcagtgctgaccatacacctgccactgcaatcctaccgcctacatgtttgcaagctcatatgatgacccggctgagcaggttgcatacaattcattccatgttggctgttacattgaacgcgtacggagctgtgatcacaacctgatagagtgctgtgccctggagaatgcaaagcgaggatagcttataaatttgctacatattttcacggacgcagtttttttaggggaacccgcctaatgttggtcttgcaaaaattccagtttgggaattattcgcgttctaacagggtggtttttccatggctgtgtccctgtttgagactgccatccagagcccccaaggtggcactatttaaagcaaatgtctcctataattggaatcagcgtaataatcccctatggaagattgatatcgtcttcatcttggcaaacttgtaaaagggaaagggaataaatctctttttaaatccccacattttaatattaatatatggagttctttttccctttttttatg

SEQ ID NO: 12579 - DNA, 941 bp, Emericella nidulans
agttgatgactgggacccgaagactccacacggggctgccacatatcacggtcctgggacgcttggcttttaccagagaagccaccatgtgccaaactcatgatacgcatggctcttggtggaaagaggctcatagggcccccttggtcaccaggttcaacaaacgcagtggtttttggtgtgggtctgtcgtggatcgtgtgtgtgggtagtaaacatttgggcactttgcatggggaccctgggttactgggtgaatgcttatcatagggcgagcctactttttcatatacccgacgttaacagactgccgcctgtttgattcacattttcattattagaatggtctggaaccctgatgggtttatcagatcttgatgcaatcacgctcagagggacccctactgcagcatttctggttgaaccttgacactctttatggcaaatttctgcctttattaggttgatgtctacgttcgcatactcataaggaacgaatacactgaattatccattaccaccggagtaggtatttttaaagttttatgctctcacaattcctggtattgtgtccagtgtcccttccaggttcatggtgctatactaatgcttgaccttttcgttaggtatcccgtgttactggatgcggtcgatttttttttttttgtgcctatgttccgaagataatggtttttcacctggtacatgttgttctccgtgctgttctatggccagtaatttaaaaaaattgggtgggaacttgtaatttcaaggggccaaaaagtgcttggaattcctacctttactccttccttgccagttttctgttaaaaaatgattttatttggtaacattttgctatatttttttccttttcctataattaattttgagtgttgtttttattattttattattttttcattttctttatttttata

SEQ ID NO: 12580 - DNA, 113 bp, Emericella nidulans
gtgcaccaaaggagccacaacagccgcaaccatccaagatcagctatgtatcgcagagccgaccagccgaccgtagctactcagctatcccgaggcggcgagcatccacttgt

SEQ ID NO: 12581 - DNA, 448 bp, Emericella nidulans
gagcgccgtgcctcgccagagcgggttatgatgggggatttcagtttcgctacttcacgccacgtgttatcgcgcactcactgtgcttgctgtctaggtggccgctatcactatatctactctaaccgagtagcgcttatatactccgcattcctggtgcgtaacacagccgatcttcctcgtacttgattggcccatattacatccaatgcgaacagctggctatagacagctcacgaaccggcgaacggggacatcaggacgaacttgccctaatagtcccagcatccgggcatataccacatacatgcgtgaccaatagagtgcactacggatgattctagggcgcactatcatatcttacatggccctatgtacagaccagtcacgtcgcccagcgaacgatgtacagctgactgctgactcccgccaagactcaggtaaagct

SEQ ID NO: 12582 - DNA, 1619 bp, Emericella nidulans
gtatcctgtccatttccatcatggaacgggcgaagatcaagcggcgcagcttcagaactgtacagccaaatcgtgatgcttccctcgatcctgcggcatttgagatctcaacaccggtcggataccgtttccagaaatcgcgcaggccgacggcgactcctcccttcgttgcgccgccaaggtatgtcagcccatgggaccgcgtgcccccaggaacatggatccagccttgaccgggctttgtgcgcttctggatcgtgaatccatccggtgagagctgcgagagcttgtagtcgttccaggctgggatccattgcagtcggcttgtcacgcgagtgtcccaggtactctcgtcgggcagtttggtcccgttaaactgcgcattgcggacttcttcgcctgggtcccgacgcaagcctgtgattccttgcacggcctcgtggaggaacccgccgtcgacgccggggatgcgcacatggcgatcgtacaattcttctccagccagcggaacctggaattggattcccagaccagagataaaatcagactcggcatcgccatcaaagatgatactgtgcacgatgcgaattgcatcggaaccggcgtacaggtagaatcgcacaacgaaggacagccacgcatcatggtctccagaagtcgccgcatgcgtgccgcgcaccgtaaccaaagtgcgaacgctattctccttgctaacagtgacattggaaatcttgctctcgaaattgaagtaatcgatcgtcgtattcgcgcgcgaggcgatatcctccgcaacaccagactgcgtgtgcagaacgagctttccattttcgccgacagtctgtccagacgacgtcgttattgagccgataaggttgctccctgtcttcggaaacgtcacagtaatcttgccggtgttgacggacacttcgctgccgcgactcgtgacctcgatgctctcgctagtgttggccttggagccgcctgctcttccctttcgcacattcacggtatacccctcctcaacacttcccagcgcagggacggcatggcccgtccacttaatcgatccatctgcccaatacccattaacccaggactggagagggatctcgtctgctccgccagagatggagaacacagtgttattgaaggtgtatttcccgcgcggccaggggagaccgaatgtagtaccggcgacgtagtctggggtatcgcccagccagtggatagggattgcatcagaggcgctgttggtggtcgaacctgaaccggggagggagagagcaggtggtgtgagagtggtgaggatgaggccaagggccccaagagctgggaggcggagagaattggcggtggacctcatgatgaccaaccgcctctacaaaacccaattcaactcaaatctcagagtcgaaagggaggaaacgaggtgccttttaagcccttagccccttaatcacgtcaattgacgattcgtcttcatctccgacctccgcagaagacaccccgtcgtccgcaatctatagcccgatcacatcatattacataaggtactagtcttgtctccaagaaggaccaggatgagtctcggggtatgatatagcgaaagtagaagcaca

SEQ ID NO: 12583 - DNA, 283 bp, Emericella nidulans
cttgatcacatcccccctctagcatgcgacggtccatcgtgttctcgaccatcaagtttttgatcactccgattagtgcggccattgggtcgcgcattatgaacatcgccatgaaccacaacgacctctcaggcgccctatacggttgctgacgccgcgctcggacgacatattgcccgcatagatctttcctcaagccgtcctcatacgtacacatgatatagactgacattctgtcctacatggcctgcaggcaactacggtactacgcctctacctacgc

SEQ ID NO: 12584 - DNA, 1435 bp, Emericella nidulans
gcatacctctgacagggagtctctctagcagatctcttgtgctcgatctttcttcggaactctcgagatgctgtgagtgttttgaagaagccgattactgtgttgcgacggactgcttcctcccacgctgtaacttcgcccggcgtcgtaggaactcttcgagtctgagactcttgctgtcgctaatcacattataatgtgcgaggatcatgagacacgagtggaacgtaatgccgtacctcgggtccgcagacacgaggacttcttcgtagagctcgttaagtcgctttcgtcgttccctaacagtattgacaggggattttgcgaatgatcttggcgagcttgtcaaggtcaactccctcaacgactcttctgtgtgccagaagcgagtcgcgcttgtcgactctacattcgtcgaggatgcgcgggaccatgaaatcaccttggtatatgcgcacttcgaatatacccgtaagttcctgccactcgttagctttgtattagtagaactgcttggcctacgtacccttaacagccgtggaaactgctccttggtaatgtagcctgtgccttctgggtcgaattcagcccatgcctgcttgaaacggcgaagttcttcccggctgatgacataaagaccactgcttcgctgatagacgtaggagaaactctcgaagatcaacgagacaaatagggaaacgaaaatgtacatgctgatgatgttccacgagataaacaatgctcgggcccagcccttgcttccgcagtcgttcccgaagaacccatcggtgatggcggtacatagcggtggttccatcgttgcgaaatcttccatgagttcgttccagccctcgccgcaactcgtccggaaaagcaggatcaaagcccttgggatgtctctgaaattgatgtttccgttttcatttccgccaaacttggtaagtccaaaagcctggttcatcgcgatggcgtagaccaggaacataacaaaccaggtcgccagtaggtttccaatggacgtgaaactagccgctgcagtcttgaaaagttggtccagttggttgttgcgggggatgagaagtagtgtaatagcaaccaggaaaagcttgttcaacacctcaatcgtcttccgctgctcatatgacgtgaagttcaggatggacgtaatgacagtgctgggaacgacaagcaaggcatacatatcccaggagcttgtactgaatcggtgccaacccagtccgaccagacggaggagcacattcgcaatgtagacgaagttgaataagaagaataagccatctcgagccaagttccaaagatagttctccgggtaatattcaatgaccagcagtatgaggtgaagcacaaggaccgtggtaacacattttgcccaacgaccatgctttttataggccactcgataagcccactgctt

SEQ ID NO: 12585 - DNA, 1265 bp, Emericella nidulans
ttctatacatcgtaactaaggagggcaagtaccggtgggccaaccaaggacgggcagtattcgggaccacggcgtccacatcgggtgcatggaaaacatctaggatatgcaggctgactccactgaatgttgcaattcagtcccgaagtggagagtctcctattgcccacctcgaacgcaatcccgatgttcactcatttctcagggataatcggcaaggtcacgtaattctcgccgtgtccgaaattgatatgattctgactctgaaatttctcgggggacctaaatcgcaaccttagttatccctcctccagctcttcacgaagaggacggtacgtacctgtctgtcggctcattgtgcaggaaaattccactcccctgagtatccccagacgcgacctcaagaacaatctggccgcctttctcaacgacaacatttgtcggccagatctctacgtcaacggggtagacttctccaggaataacaggctggacgtccgtagagaagtagtcccggtgcgggaggtactccctgtgccgggcgtgtttgtcgttgaccttgcgcaaactcacacgtagccagcccttgcagagcggaacggggtccccagccgtccctgtgtagtaaacttcttttccttcaggggagatgtaccgtagggtcaggaaaagatctatatccgtgggggtaggagctccgggattagggctcatagagacattcaggtgcgcgacgatgtggcctgttatctctgtttcgtgctcgaatggtggagtcgtgaactgaataaacgacgggttctcgatgtttcccaaggcggcatagctgagcttgctgtatcccttctgttccggtggagtggtaagtagttcccgattcggggtgaggtagaaccttgtatactgcgtccgcgcaattggccactcgttttccacgcggcgagcgtacgtcttctcagcttcggcgttgttaaagcctacgtcacctttgcggaggacgaggtcgactttgggcgcggtcccagtcgaccatccagcgcggtcgtccccttttaggaatgcgtcgagaaagctcagctgaatgtcgacttcttctttgtagtagaatgggaggtcgtggcgtccagtgataaagcggaggtatttgagctgactaccggcttgggtgtacccttcaacgttgccccttagatgcaagaggatgccgccccagttggcaacagagaggagaggaacctgcactcgttaaacaggccatacgaaca

SEQ ID NO: 12586 - DNA, 179 bp, Emericella nidulans
atgagataattcatcatagcaagtggcaactacgagtgaaagttggatggagggatactgaccaggtatagttggcctgaatattgtgacggttcgtcacaggatcggtgaaatggatgaacaaattcccatagtgttgctgacagatggtacgtgcgagttcagggaatatcccacag

SEQ ID NO: 12587 - DNA, 2715 bp, Emericella nidulans
gaagtaagaatacatattaggcatcatgggaccggggatcgaagactcatcgatcaatccctagcgaggcaactttgccagcaaacctagctccagcgcttcctcttttatgcagtttctctcgctctttgttatctaacgaacttggtgcctgctcgttgctagctccgggccctcggagggtgggcagtgatcccagcgtatctgctggtgttacagcaggaacaggatggttgaaattagagagtcgtgcagttcgctggttaaggtataattgagcggcaggggaaagagggattggaggaggctgagacggaatctcggctccgttctggacaaggagttcagcgacggggaaagggatcaccttggtagatgtgctaggtcgagaggatatactcgacgtcatttgaccggggtgtgccgggtccgcggcagctaatgcgaggaagacggcgtgagtgctacgggagcgatcggcgacgttcacgttggcgcgaagggcgatgccgtaaaggacaccttgaatgtcatttctcttgattgaggcgagaagcgtttcgtctgccgtcgggaatcgcgacaatggagagggcagtggttgaacgaacgctttatccgcatatttggcggtgatgaacctcagccgatgttctcgagtggatgaggctaccggcttctgagcctgatctagagtagcctcccagatcatgttgctgacgcggtttccgatttgaagaaggatttccacaatatcgttcgaaaaagaatggacgtcgagtgtgagtgatcggattttagaaatatgtgtcccgagagatcggtgaatgccactgcactctatacacaagacgatccctaggtttatcgaaacccactcaaccttggaggtagagttacagtccgcacaccagtggttgccttgatctgcgtcgcgaactgcttgtaatagctttgagggattatcctcgaaaccctgtgagtcgccgcgaacatagctaggccgcgccccaactgtcgtgcgacgggtcacattgctcgaggcggatgaatggtgagagtggtgggaaactgaagagcttttccccgtcaatacagagccaatgtctcggcccatagatggcttgtccgcctccgacgagagtggaggtggatacatgctacgtccttcaacagcgctctgtaaagcgttgttgattgccctaatccagttgcccatatcttcctctgaagttgcttggtagatgcgcttgaattgcggggtgattacctcgaagcaaaaccgccgttctgcgttccgagcctctcttactgaggccatccgcaggtcgataggatccatgtgtaagtcaagcttttgtttccagttgctgtattctgacagtttaccctggtcgaggacaatccaaaatctgacgaagaatgatggtatcagtatctcctcaataatcacgataatatggtcttacttatgccaagcctgcttgttgattcctttggggtcaatatgagatcctggtcgagataacgcccaaagcagcccttctttcctttgctgacctgtggcaagagttagcgtcctgtaatactgaagaggttattcactagtacttcggagaacgtacagcttgagtttatggctgaggtcatggcagaggaaccggcggacggattgggagccgcggatgtctggattgatgtggttgaattgctgctagtgacactccgcaattgtgacccggtgctatcggcgcggcccaagtctccctctggtttctgattcccattaccgctagtaagtaacgtggacgctgcgcttgagctgacgggagcatcaggctcaaggtacgtgttgctgcttttctccagggctctccgtttctcttccctctccgtcctctgaaattgaaattccttatctgcttgattgacctcatggataagggcatcaagctgcggcaccatgtcatccacctgtttagccgcggcgaggaaggtcttcgcctgggtatccgcatatttagttagatgagaaaggacctcctgctccttgcggccaccgtgaaggtcctgcatgaacgaagaataatcgaaccgtctcagttcaaaatttcgacgtttcgcttggtacttagagtcactttctgctcgcttcttttccttcagtgagtcctgtcgctgtccgaggtatcgaccgacgtaagcataatagtcacggctttcttcttcaaattccttcttcttcgcctccgcttgcttgatgtcattagtatagagtttcaaaagcggttctatcaccagcttttggagctgtaaagcattgagtcgctcgtaattcaatatctgccgcgaaatcttctcaaaatagtggtctagtgctggctgaattgcgttcgcattggaggtagatgcatcacctaaagcagataaaaacgcttccacggcatcgttgcaagctgtctgggcttgatgcgcagcctcggccttcttcaaaactttcttgatcttagcgcgcatattgccggtcttctgctccagtgccttcatagtagcacggatagaggtccatcttcaaccacactcatgtccctcgcgggcttgaggggggaagatctaccttcacggagcccgagcccgagcccgaactgagccggggaggttgaggcgcatattagcttaaggggccgtttccgtccgacctgaccggacatttga

SEQ ID NO: 12588 - DNA, 129 bp, Emericella nidulans
  unsure (1)..(129): unsure at all n locations
aagcagccaccccggcgccgacgtccgccctgcgccaacgcaggtagcgggccncgtcatgaagctgtgagactcagccgcggcgagggacggagtacctggccgggacgtcataagctaaaagcccgt

SEQ ID NO: 12589 - DNA, 149 bp, Emericella nidulans
aatgcgtgtgcaggtggcaagcgagcgacccgcccgcggtgaccacgtgaattcccgctaagatgccgggtggccagatcgtgtgcagcacgtagcatatacgctcgctccggccgttaaaagtcccactcatagccacagtctcggac

SEQ ID NO: 12590 - DNA, 109 bp, Emericella nidulans
acttaccgctagcctgacggcatattccaatatatacttgggtacctcgtctcgaatcctaggctacatgcatgtgtgaagcaccaggtgtttaatcgcgttattagcc

SEQ ID NO: 12591 - DNA, 581 bp, Emericella nidulans
caggtccattgttagcgctaaggagctacaggctatggggacacaaccgcatggaacaccgataaggcgtatggtgaggtgctcggtgcaggggcactacaccgttgagtgtgacaagctcgttgccctgtttataggtatacatatttacccttcactaactcttttgcagatgttagttaacggattatagaaattgaagcggcccgagcccgagatcgggcagcgcataaaaggctgtgcattcttaaagcactgctaaacacatcatgtaccaagatgacagcttattactttaatgcatcgcgcacctatacaaaatctgagacataggctcaacaggcggcaaatgccacctgcaaatattgaaggttagtggaggctatgacaaagtgaatacttccaattgcttaaggaatgctacatagagctaacatctcaggtctgaccgagacacccgtccgacattctgcattctgagaacctgacgcggttcactatacaccactcgtaacggacgttagagatggaagagattaccttcaaacttgagcggcgcaggttagattgcaaatcatatc

SEQ ID NO: 12592 - DNA, 647 bp, Emericella nidulans
atacagaagccggggaactggaagggggtacggcagcaggtttggctgttgctactaggattatttatctgccctacatggatgctgctggctgctgtaatagatgtctagaatcgcagtgctcatacagcaggtattgcgaagaattgtagggaaaacaggagatggctttactccctctaatacttgaaacaccataaccgtatggactgctattagacatgtatctaggctctgctacttgaaccacttgaacctataagactgctagtctgtattagagtttgtaatgatttttaaagagatccatttttgttccataattcagttaaattttactgtacagttgtagagcgctttgttcttatccttcataagcttgattaatccttgtcttgattggttgtcatgttatttctacagattagccttaatattttcattatggatttttattatttattatatcctttagtactcagttaccatctctctcgctatatttaaacatacatagtctctccttataattattcctactttctatatgttttattttctttcttttctttatgaatttctttattttttattttatttttattatattttctctttttatattctcttttcttattttatatata

SEQ ID NO: 12593 - DNA, 2079 bp, Emericella nidulans
ctcccctctttggtttcgttgagtcatacatttccgtccacgtgacaacgaggctgcgctgcttggcaagataaatacctctttcttgtcgcattctccactcccgacttgcgaacacatctcatccattctgtcctgtatcttcccttctcgctctcgtctcgtcgctacctctgtgactgccaggtcagcgattcttctagcgtcttctgtcatctaatcggtgttttatctttcgccactgcttcgaatcgatacagttagtctggtagcgcgctctttacctatccagttgatatctgttgttgtcgttttctaaaccaatcccgataactgggcccggcttctgctacacgcctcgccgccgttagactttcgtattgcgctctcttgtgacgggagggcctggattatacctacaacctgatggcgacgccgcctcctgaggcaccctctgttctaaaagagggaaagcctcaactgccgccgtcgccaaatggagactcatcttctgacttcgatcgcgcagggtatgtgctcccgttattcttagagcgtgttgagccgcagttgtgttaacttcctccccagtgtacagcctccggtgactgactccattccgatcccgccgaccgacggagctaaaacaactgagaaagatgccaagaatattagtatgaatggtcatgcctctgggcaggagaatggtatcgtgaacaccgcttcccctcccaagtcacctgcgcctccagccacaaccaccagcatcgcacaagatggaccagttgctgggaactcagcggtagatgacaaaccagccactcctggcaacgtgccgaaacagccgaccaacggcgctggtgcagacgacaatagctccaaggccacacccttgtcgcaaagcatcccgcaagattcatccgctacaccagctggtgtgcagtcaccacaaagcactgctgcggtcaaaaccgagcttcctcatcatccccatgctgctgtgcagcccgaaaaaccttccaccgtagatgtttcctctgcagcaaacgcgcaaccttcgccagctattgaccaggagatgcgggatgcacccgcttcaccaacgaagctctcgagggagcgcgaggttgaaccgaacgatgaaccttccgcgaagcgtacgaagatcgatactcaaggatccgccgaactcaaggctccggaattaccaacaccagtcacagatacaccaatgactacgggaaatggtgacggccctctcacaagggtacagcataggttccttgtcaaagccattcaaagtctgaagcgtctgcacgacgcgcggttctacaaggagcccgttgatcccgtcaaaatggctattccgacttattttgacgtcatcaaggagccaatggatttgggtaccatcgaacagaaactgaagaacaatgtgtacacgtcaccgcagagcgttttcaacgattttgagcttatggttcggaatgcgcacgttttcaatggacccgatcacattgtctccgttgagggtaaaaggctccaagccacattcgagaagcagatgctgaatctgcccaaggctgacgaagtggaggaaaagaagcctaagaaagctgcgtcgtccaaaacctctaacgctcgtcgagatcctcggccgtcagctggatcgaatgcagtacgtccaacaggtggatcaccccaggctacaacttttgccttgggacccgagggactgcctcttattcggagagattctacgaatgccgatggccgccccaagcgttccatccaccctcccaagcgcgacctgccatattcaacaaagccaaaaaagaagaagttccaatgggagctaaagttttgtcgagaagtcctcgatgaattacataagaccaaacactactcgtatgctttcccgttttattaccctgtggacccggtcgccttgaacattcccacataccacagcatcattaagaagcccatggatctttccactgtcagctccaaacttaataccggtcagtatgagaatcgaaagagtttgagatggacatacgccagatcatgaagaat

SEQ ID NO: 12594 - DNA, 626 bp, Emericella nidulans
cggtggtgcgtgctgatggcggccccaggagcctgtatcggcgggggcgcgaggtctcaacgcagtatgtgttcgtgcggcatatgctaccgcgggggttgtgtattctgaaggggcctgaaaaactcttgcagcgtcagcccattattgggactgcgaacagagagctacactaattatgactgacgaaccatcagtaagtgcatcgagcgggaatggggagctcagaccgatggccgtcccatcggacaggggattggaacctatatgccattacatgataagcggcacaaacaggatgcgaccatcgttcaatcggcaaacctctgccctaagactgaaccagagcgagcggcgcctagaatgtcaccgtttccggctgggcgcctggtgactctgggcttggattcattcgggtgagagatctctgtacgagggccataccgaaagttctgggaggattagcccctcccgggttcgcaagcatcctgtgagggccttactatctttccgcggctcaagcacttgtccaacctctaaagtgctggtgctttgaaaggtcccgtcctgggatccaaatttttaggccacaacgtttaggtttttactcccgggcctcaacccac

SEQ ID NO: 12595 - DNA, 283 bp, Emericella nidulans
  unsure (1)..(283): unsure at all n locations
gggagccagagaactgagagggtccagagccactgagngtggaacgtaagggaaagcgtgcgcgagacgagatgaaaaggctccgaggcgacggcagacgaaaggcctcctccatgatctccaccagatcgtcgggtaggactatatgcggcgccggataggggtgcgaagccagtacgaannctcaagncctncgcgcctcagatgggtgaagcagatgggctcaccccaagagaggagcctcggccggacacattgagccgttgtgatccgtgcgataaag

SEQ ID NO: 12596 - DNA, 218 bp, Emericella nidulans
  unsure (1)..(218): unsure at all n locations
tgggtatggacgcgattcncagcatcaaaagctccgcagtcttgcacgccaagatggggatctaacgctctgcagcgtncnncagcgccaacccnacagntggcgccgtcagtgaagcncngtangangacgctgatgaggagtgtgcccccgcccagatancgatgaactccatgcgaaagataccacgttcgattccagccgccagttcttactgg

SEQ ID NO: 12597 - DNA, 197 bp, Emericella nidulans
acggtgcggaccgggaacagccgcaccgcacatgccggtcctggtggtgagtagagttcggctggtgctgtactggatgaggaggtcggcccgacagtcgacaccgcggcaagtcgcggcagacgccagggcccgaactggtgtatcccgatacggcgcagaatcataagacgcattccgtggagacgacgacgagt

SEQ ID NO: 12598 - DNA, 345 bp, Emericella nidulans
  unsure (1)..(345): unsure at all n locations
cccagaagtaagtgatccgcgggangtgtcaagctatacacgcaacaatcgtgagatggccnagaacgtcgccgtgggcatccgaatcgacctccttgcgcgncccgatgactctatcgacagggaggaagagacgagaataagtatcacgagatcgtgccntagaagcccgtgtaccaacaaagtactgcggcgccacgtgcgtganggaacacgtcaatacccgtcagcgccctaaacgagtagtagctctgagagaaagagtgcctgctgtcactgcgaacganaccgtagcataaacgcnntcggtcgttcaaggcaggcacctgcaagcaggacaagaaa

SEQ ID NO: 12599 - DNA, 478 bp, Emericella nidulans
cagcccgcctggcatgcgacactggtagggctcatgttggggctttttgtttctctgaacgaggcaccctgactcatggtgagctcatggacgcgagatagatgtcgagggccagggacccgtgggtggggattggttcgcataactaaggcatcgtggaggtcaggatcaacattaggtagtgaactgcagtttgggggagggaccaaggagatatgacgatgattataatctgtagcaaactggagcgtgaattgggaaccggctagcaggattgccatgcacgaaccccaaggggagggggcgcacttattaatagagcacctgtttagttccgtactaactgggacctcaatgatgggcgctgcacgtttgttcgtggctcgtaatgattcgacattcggaaaccattgggccggagttgggttagcactaatcaagtccgattgaattcaccggttggcttatactacctttc

SEQ ID NO: 12600 - DNA, 117 bp, Emericella nidulans
  unsure (1)..(117): unsure at all n locations
gaccgggccctatgtgtggagggnggggccctgtgacttgctncctggggcagtgataggttggcgcgttcacccaatacggtcgcccagatagggcagttggggcagtggcgctgg

SEQ ID NO: 12601 - DNA, 3800 bp, Emericella nidulans
ttctcttcaaaaagcccgaagatccgagggcaaggcatggcctgccattttgatcagcggcttcgtcgcattcgggggaattctattcgggtgagtacccagcgcttgcgaactccatgcacattacccaagctcacgattctcttgctagctatgacactggcacgatcagtggaatccttgccatgccgtactgggctcaaaccttttctacaggctaccgagacagcaccggccagttgaacgtaacctctagccagtcctctgccatcgtctcaatcctctcggccggaacattcttcggtgccctgggtgccgcgcctgtgggcgacatcatcggacgtcgttggggcctcattgcgtcaaacggtgtctttgtgctgggtgttgtcctacagacgattgccacctccatcccgccgttcctcgcaggtcgcttctttgccggattgggggttggtcttatatctgcgttgggtgagccacactgcctaattcactactacacatgcagagtactaatgaactcggccctcagttcccctctaccaatccgagaccgcaccgaaatggatccgcggattcatcgtgggctcctaccagttctccataaccatcggcctccttcttgcctcagttctcaacaacgcaacccaccaccgcaacgactcgggctcctaccgcatcccaatcgccgtacaatttgcctggtccatcatcctcgtcggaggcatgcttatcctccccgaaacccctcggtacctgatcaagcgcgacgacaccaaagccgctgctctttccctctcgaagctccgccgtctcccgcaagaccacgagtccatccgccaggaactgtcggagatccaagctaaccaccagttcgaagtcagcctgggcaagtccgggtacgccgagtgtttccgggggagcctcctgaagcgtttgctcacggggtgtggcctgcaagcgctgcagcagctgaccggtatcaatttcatcttctactacgggacgcagttcttcaagaactccggattcaagaacgagtttgtcatcacgcttatcacgaactgtgtgaatgtgggctcgacgatccccggtctgtacgccatcgataaatggggtaggaggcctgtgcttcttacgggggcgattgggatggctgtgtctcagttgcttgttgccgtcctgggaacgacgacgactggccaggatgctcaggggaatattattgtgcacaatgctgcggcgcaaaaggccgcgattgcgtttatctgtctctacatcttcttctttgcggcttcgtgggggccaattgcttggtacgtttctctcctacaccgagcctgatacagcacactcgtcgcaccaactaacaatggagttaatcgaacagggtcgtaacaggcgaaatcttccccctcaaaacccgcgcaaagtctctctccatgacgaccgccacaaactggctcctaaactgggcactgagcttcgcaaccccgtacttggtaaactacggtgacggaaacgcaaacctacagtccaagatcttcttcatctggttcggctgctgcttcctctgtattgggtttgtgtactttatgatctatgagacgaaggggcttacccttgaagaggtggatgagctttatcttgaggttaagagcgcgagggaaagcgtcacgtggagtccgaaggggacttttgcgagagttgcggagaaggggaatggtagtgcaggtattctagagcgcaccgagaagggggatgttggggggcatagggagattggcgcgcctgatggggtgtcggtctagtggtcagcgaaggtggatcctggcatagggttgggatgtctgggttgtggctgatatggtgcgcgccctgttgtttaagagactatggaggccttagtttctgtggtcgtggtattgacatgtgctattatgtgagtacgggggatggagatagtcgtgactgcaagctcgtgtgctcaggtagtcgtacatagaatagagcagtatttgctaagaatctcttcagattgctaataagtccatggacaagttatcgaaagcatatgccgtgttctactatgattgcaacagcggattccatgtgctgcccaaccgtggctggcaaaatctacggtattgctggctctgagatagtagcctaatctgtcgagtgtagaaatctgggcagacatggttttactccatcgtgataatgtacttttacccaagcaccaaccctctattccgtaccctatttgttattttagaagaggttactctatagttctatagttgaatatactaccaatttgatttcaagcctgatgacaagaactgtaagtggtgaagtatatcagaaagtgactcgcggagatcacaacagcatacaatatatctgccctgatttttgcactcgacatccggtggccgctcagtgtaggatggccaaatcaccatgctaaggtagctaggcaactatacagggtgcacctagtctagccagcccttgctgtgttatttggcgcatcctagtagtagcgttgcaagtacaattctttatacttcggctctcctacacaaaacatatggacctgcacgtaacgactattcacccacgccgagctgacgacgctggtggcgaatcaggaaatctatcgcatcatttagcgcaacagtgctgagcaagtgcaactccagggaggggcgactaagcactcacttcctccacatgaaccggaggctctgtctttgtttccgaagacccgcctctacgctgctcactcggtgcgcgaaagtgtcgaggcatggtcccgctcgcgtagagctcgtccatggcttcgaacgagatgccctacaataattgcatgtccgctaatgttgcctagcaggcctcgaagcacgtaccttagtctctggataaaggtacatccaccgacggctgcgatgagacccattcctaggaagatgaacccaacctggcgccgagatttcctgcgtttggatctgcaagccgggggatttaggcgtctatcacttggatctagcataactggagcgtaccatatacggaatcgtaaactgcataataagcccccatgccgcattggtaatcgtaacaagaccatgcgtcgtactccggagactttcagaggccaagataaacccaacagaaccaatagacagctggtagataatcgcctagatatagataaagacaatgatgccccaacttgcctttttctggttgggaacgcacccagaatctagattagcaagagcatgcagtatagcacaaactgcgggacaacaatcatcgttcgtcgaccaataatttccgtcagtgggaaggcggccatgctgtcgaggagcatcaaaacgtatagtatgatcgatgcatcgaagtagtctttcacaccgatcaggtcgaggaagtacgtcgtgtatccaataacgaagtcgcgccgatcatttgctggccactggcggcgaagatggccgttgggtgcgcttgcggctcgtgcggtcgaagcactcagcttcggccagagatcgaggcctaggaaagtgtggcggctgaactgagcgagactggcctggatggcaagtgcttgatggttctcggattctatgcgacggacttcgacaccgtagaaggcttcgttcttggatccgtacactcgttggagtgatcctccgggcttgcgatgtctttccgtctcgaatgagccagtacggagactcggggaagaggagccagccggccgtggaattgctgggaaagtg

SEQ ID NO: 12602 - DNA, 839 bp, Emericella nidulans
gaagattccttttgggtcggccattccgcttcctgctcagccagatacccagcagaccagcgcaccatcagacaatgcccatagtggtgtgctgcaaatcattatgaacccaaggcccgccccacctatgctccgtgaaagtgttgacacagccccatgccgcgatgaccagggaatcgaaaaactcctgactgcggccggttcggcgcaaccagtactgaccgacgagtaggaggatggtaagcaggataccgtacgcgatgaaggcgctgcccataatgaagtgagccaggcattgtccgagatggtcatcgcggcagaaacccaacgaagtgatccctccaaacaacatctgcacccagctcaaaatcggcattaacttgcctaggatgccgtgcagaagaacgaggattttgcggaaattcccaagaattcccttctcgatatgtaacttgagataaaccccaagaatgacctgtgcggccaagaagaacatgagccaattcgcgaacgagggttggacgtttttggcgaactggcgacctttggcgcatggtccacaaagtttgcaacaacgggaacgcggttcctatacctggacggaacctgcaattgggcccgttgatcaatgtgggaaggcccagggtcttactggtttggtgggatcgtcgattggagactccccaagccctacccaggtaggttttccatggctcttccctgaataatcaatctatgtccctccaccactcggctttattcctttatctacttcttggctgctaattcatacggtcctatataaattcgtcaaacactttcctcttttcttgagtatc

SEQ ID NO: 12603 - DNA, 566 bp, Emericella nidulans
ggtctttctaggcgtcggctcccgtctcaaattggtcttttggtctttcggtctttttgtcggagtttagtcagttcagtcggcgcatccttgtttggtccaaactcctttggcgcttggttctcgttcactttctcgttccgctcctacgaaccacaagttatcggccttattcatcttcgttacattcaattaagattccccacagcgcctctcgacttcgatcctcgtccgcttcgttacgggtctggccttcttgtttagatctgggttgggtccggtctggattgggctggctgcgtgctttcgtttgcttgtctggatttcccatattctgcttcactgggttgctacctgatgcttgtttgtttttgcgttcatgaaccgctgcatactgcatagatacatttcaagtagaggatatgtatcttattcgagaaacagagacggaggggggcgagaaaggggatgcgtccctgctgtgtacatatcaaccaccgatgagatttgggagctaggggtagccactcaatggataagatatcagaacaatacaattttctact

SEQ ID NO: 12604 - DNA, 540 bp, Emericella nidulans
tgggaacactctgctacggaacctgtgccggcggtttacgatactctaacagacgattatacgaccgctacacatgacggtgttttggatgcaaagatcgttaacatgtaggatccagctacaacactgcgtggacaggccacgtacgcctggtacagagcttccactgtggaagtccgaagaccatattacgcaaggaggcaaaccgacggtcacatggttcccacgacacatctatctaccaataccattaatatgagaacgactctgacgctcgcgatacctgtgagaaggactgtcttctagattagagccacagtctatatccgactaactgtcacgtgctaggagctatgctacacagctgggacggactccatgagcagtcaaccttcatcaaactggccaatactgagcgcgagtggatcgggcccagcaccctctttgacgccgtgtagtggactatatgatcatacgatgaagatgcgtggcttagcgccaggagcgacccaggatctggtacccggctacattgatctg

SEQ ID NO: 12605 - DNA, 245 bp, Emericella nidulans
  unsure (1)..(245): unsure at all n locations
acttgttcatgctcggcaaagtagctgcgggtgtagctggttaggtgtcatcttgcccttcggggttattggtacgtattccgctgggacaatcnngtgtattgncgtaaaggntgaagctttagcgcaacatgtcctttgcggcttggatnggctcgngtaagctgtccggactagtaatagcggtgcganggtgcagaaataagggggaccttaccnctcacgtaggggatcggtcatcctca

SEQ ID NO: 12606 - DNA, 283 bp, Emericella nidulans
  unsure (1)..(283): unsure at all n locations
gagtacagcctccatcggccaacccggactccgtcgtgagagggacctgctcaatcaatgtcangcgcgcaacgagctgtgacgctttcacgcagctttccgctcaagtanaggagcgtgccgctctagggtgttggaaagcacgagtcagtgtcgggcatagtctatgccacagtagcgctgagtangncctgtaacncgcctaacgcactgatgccgtctaaagagcaccgcgaggagaagcgtaggncaaataaccctcttaccaatcaattcaggtgca

SEQ ID NO: 12607 - DNA, 976 bp, Emericella nidulans
  unsure (1)..(976): unsure at all n locations
gcacacggagacaacgggcngtccccatgcaaacaacgaataaaaccaccccaaaaaccaaacggatgggacccgggggacggaccggccgacccgcaggcggaggcgccgcngcacacgacgggaaggcacgcggccacgagacccggccccggggcgcccaacccggagggggcgaggacgggcgcggagaggaccgcgcggagaccggaggaggcgcccgggaaacgaacgaccggcaaggaagagaagcgcgaggcacaggaagacgagcggccgaaggagcgcccccgcgggcaggggaaacgaaacgccgaaacccccagaagcccggaagggcaaaccaagaggaagcaccgcgcaacaagaaagggccagcccccccagccgggagcccccacccccgaaggccccgaggaaccagccggcccaggcccccaaagggaaggaaagcccaaagcccaacgggcacgacaagacagcgaaacccaaagggagaaaaacagacaaaggcaacaagaaaaaaccaaaaccccncccaacccggaggaaacccccaaaccccaacaaaacccaaaagacgcacccgaacaacccacccaacaagccacccccccccccaagagccccccgcagccaaacaccggacacaccccccccccccagccagcacaagggccaaacaccccccaccgccgaaacagacaaaacacgggggcggacaccaacccccccaggggggcaaacgggacacccgcccccccaaaaaagagggagggaaggagagaggaaaagaaaaagcccgggggagggggccccccccccccanccccccacaccaccgcgggggggggaggggggaccccaacccaccccaccaaacaccaaccacaccacaccaccaacaccaaacaccgccgacgaccacgaccacccacacaaaccccacgacccccaaaaacgcacacccacccca

SEQ ID NO: 12608 - DNA, 213 bp, Emericella nidulans
aaaaaaaaaaaaaaaaaaaaaaaaaccaggggtgggcccaaacgggggccctacccttaagagggcacccccattccgtccccggggaaaacagggggaaaaccccccccggggggtcccaacgggtgggaataccagctccccaaaatataccggctcggatacccgggggccctaaaaaaaaggttccgggaagggaaaaggtggggaagg

SEQ ID NO: 12609 - DNA, 289 bp, Emericella nidulans
  unsure (1)..(289): unsure at all n locations
gaggctgggagagaggacgatggngatcgacagggaccggcgatatgcgattggacgagacgcctctatcatgcgaagcggcacaggtagcgccagtnnctagcacngtcacncncgggtncnntcacagcgncagtagtccnccttagaanccttgccagactcatgacgataccatagtgagtaatagtgagagcgncgtaacccgtctgtgattaaatgttggangcctaggatactaccggacgagacacgctgagtatgtnccngactcagaaggcccaggcca

SEQ ID NO: 12610 - DNA, 1456 bp, Emericella nidulans
gtgcaggcgtccattcgtttcgcttcgctatgctcagaaagcaagctcaccaaacgtagacgccggataggagcggaagagagcgaataatattcgctgcgcgaccttagaatggcgcgcgttggtattccagtcccggagccgaagaacgaggacgtagaggttggcggggtcaagagtttggaggacctcgtcaatagacgggttcccggtgaaactgtttgcacgatcttcgccttggttgtcagtattgtgaggatcgtccgcagcgtcgatggcggcgctgaagagggacaggaggcgcgcggggtggttgagctgtagggcgagggtgattgcctcacggtacgcgcctgctacgatgtaattttgtaactgctggtcttgttctatgcgggcagagttggcgttgacggcggcagtgtaggttgcggaggttgtgtcggtccagaaggtgactgtagaatctgcggagccggatgcaatggcgtagggggaggtagatttggttgcggaggaattgacgtcgtcacgcgtcccggatggtgtagggctggctagcgcccagactcgatcggtgtggttgtcaagggttgtttccagttcgcctgtgtagggggaccagatcttcaccagcccatctgcggctgcggaagcaacaagaggtcggagctgaatagagttgggctttgatgctgctgcatcctcatcttcctcatcttcggtcttactggacatgtcgggtggtgggagccagagcaccttgagtacgctattcgtgtggccttcgaacgtaagaagacagctatagtcggacaaactccagagcttcacagtcttgtcacctgagcccgttacaatcatgcctctgttagtgctgcttttggcatctgcactaaggatcggtgtgcccttgggggaaaaacgcgccgaccaaactcctctcttgtgaccgcgcaagacacccacgacggacccgtcgtctgcagaccagattttgacggttcggtcttgtgaggctgaagcaaacaatgccgatgacggactcacgtccagagcgttgatgtccttgtcgtgagccttgcgagtgaacagcgctttcggtgtatggggcttattgccaatggtagggcctagctttccgacgttccatcgcttgactgtacgatcctgggaacccgtgatgacgaacggagggggatgatttactggagccttgtacgctggcgtatcaggagggtggtgagtcccgtggaaaactgatggctcctagagactctgcgtgacccgttaggagggcgaaacatgtgtatgacgaattctgcgggtctaggcgccataaacgtgccgtattatcctttgcacctgtagcaagccagtgaccagaccagtccacatcgatgcagatatgatgtcgtcgtgccatccagtgagcgatatagcaccgaaatactct

SEQ ID NO: 12611 - DNA, 1308 bp, Emericella nidulans
  unsure (1)..(1308): unsure at all n locations
tgtgtctagcggagttattaccaaagtggacgcggacctgcggcagacagtgttctgggctgcgtatacagttgaccagtgagtttattcatgactagtctcgacaaccctcgcctgacaagattccagccagctaggattttatctcggccggccgttccggacaaatatggatgatgtaaccgttggcaagcttaccgccagggcacgccaagaggaacaaaatagatggatgccatatacatcagcagggcctgtatgtgccgaaattggtgtgccagacaatatggaagccgtatgcgaagaacaaatcaatctctgcgagataatggcgccaattggagacttcctgtgagcctttcctgcctatacacatttcaaccaatataccactgaccgtatcccagatatgggacctcaagtatttccaaagctgtcctccaacaaattaacgaaaagattgtcacgaagctcttttcctggaaagctaacctcccatcaccccttcaaatcaaattagatgaccagacaacaccatatacaccgcaagtcctcctcctgcagtaagtcaaccaacatcacaatcttacactgccagctcctgcaagacttatgaagatagtgctagcaactaataaaacaccactgaaaagcatgcaatactaccaaaacatgatctacgcccaccgcccctggatgtccaaatccagtctccagccgcaacccccgcaaggtcctggttacggccacgcccgcgaaatgtgtatccagtctgctctagcaatcgccaggattcttgtcatgtacgagtgccggtatacgcttcgccgaatccataccaaggctgtggccattacatcctctgctgtgctcttgctgctctttgcagctgtgacgcagtatcgcccatgcaatggagatatcggtggtaaacatggcggtattggtgatggtattacaaaacacttgagtacatgtttccgcgcgctggatgaattctccatctcgtggccaagtgcggcaagagcgaaggatttgctgctgaggttgcagcggcgttgggaaattcggacgcgttctactcaggggaggaaagacgggactgaaggttccttcgcagaattggggcagtcatctgcttccgatgagcttcatggcctaatcagcaggacctctggtacatcaaggaaagaacccagagccgcaggcgatcatggtncgacgtcgatcttgattggatgcttattcccgatagcacatcttttttggacagcccggccttaagacctctactaatggttttttaac

SEQ ID NO: 12612 - DNA, 1729 bp, Emericella nidulans
cggtaatgtctttcgagatgggggcgccgagttgatctgtagatttatgattagaggttggcctctaaaggtgcaacaggaaaaatggcttaccatctcgattgcctgcatcataggggtcagtcacagttcccttgccctgaattccggacataggctcgtcgccatgttgttgttgttgctgaggaactcgctgttcagtctgagcctgctggccacctctaagggcatcgacctcgttccagagggcattggatgcgctttgaacagcctgagtaatggtctccatggtcgtgagatagaagcaatgccaagtaatagtgaagtggagaatatgaacaagtcaaagttgaaccaaatactagtgttttgtattctgcgaatatattgcctctggccaagggcctagtgtacaatggttatatagatcgatgctgcgacggctgaggccgtgcttgcacgaaatacgtcagtgaaattcgagcccaaaccggctgcttaacgtcatattttcgacggtgatgatccatgatgttcggattggttcatgctcgacttgttagtgcactataaggcagtgacgtaagtgacgtcaatttagatcacgtggctgatatcaggtggagacagcagcaaacaatggaatgtagcagccaaagtaaaatgagataatgcttatgacgattggatatctagtctatttttttgtcctatcaggatagccagctgcccgattgatgtctcccggttaatatcgggatacgcgccacctagcgaattggtaaggaaattttgtttagcttcttcttgatctcttccacaagatcctctcgtgagattaaagtgccgtctttttctgggtggccttcgggcagtccaagttcctttagcttgaccttgcccgctgctaactcgtcctccccaagaatgacagcaagcggaataccaccggcttcagccagcttgaattgttgcggcagcttcggcttaacagtctgggcgaattcagccttgatgcctgccttccatagctgattggcaacagacatgcgctcgaggagaaggccattgaagcccttaccaccgaaagccatgacgaagacatccacttcgctggcgcgcatggaggcattgccctctttggcctcgttctcaaggcgctgcttcatgattgtgaagattcgatcgacaccgaacgagataccaacacaggggatttgacgcttcttggcaaacatgttaaccaggtcgtgatagcgtccacctgcagcaatactgccaacgccaatgttctggtcctgtccgattgatttcgattttgactttttctgggactgagcgaacccttctgcggaggacagtggtgtaacaacttcgtaaatgagaccggtatagtaatccaagcctcgggcaagggagaggtcgaaggagatcttatctaaaacgtcgaaagcctcgagatatttgaaaagaagctccatgtcctcaacgccgttataacgttctcattggtgcttagtagatcgtcggatctatggtgtccagaatatcacggccaccgttcagtttacatacttgccaactttgtcgcgacttttggtgccaacccctttttttcattttaatttgacttgctccatggagctagcctgtcagtggttagtggcagtagacctacatactatagctgtcacgatactatgacgatctatccagacacaacgtcaca

SEQ ID NO: 12613 - DNA, 2725 bp, Emericella nidulans
ggaggtcgcgcgtgcgattagtgtcgtacaaacagtccttgaacccctggttcttcggcgtactaaatcgatgaaaactcctgaaggagagccattggtcccgctaccgaagcggacgatacgtatcgaaaaagtcgagcttatagagcaagaacgggaaatctataatcacatttatacccgggcgaagcaaacgttcaacagcaacgtggcagccggaacactacttaagtcgtactcaaccatctttgcacaactcctacgtctccgccagacatgctgccacccaattctcacgcgcaacaaggcaattgtcgcagacgaagaagacgccgcggccgcggctgaccaggacagtgacctcaaggacgatatggacctccaagaactcatcaacaggttcaccgcaacgacttcagatgccgagtcctccaacgaacctcccgatccctctatgaaattcactgcccacgccctccgtcaaatccagaccgaatccgccggtgaatgccccatctgctcagaagaacccatgatcgaccccgccgtcacagcctgctggcacagcgcttgtaagggatgtctcaaggattatatccagcaccaaagggacaagggcgttcagcccgttgtttctcttgccgcgcggacttgaacccgcaggatatcttcgaggtcgtccgctaccaatctccaaataccacgcctactgaacaaacgctctcatctatagggggcgacaacgtatatagcagctcgcaaccaccaccaccaccacgcatctctctgagaagaatcaacccgctctccccgtcagcacatacatcagccataatccatgcgcttctcgcgcacctcgtgcgcgtcccggccggcaccaaatccgtcgtcttctcccagttcacatctttcttagacctcataggtccgcagctgacgaaagccgggatctcgttcgtccggcttgatggaacaatggctcaaaaggctcgcgccgaagtcctggcccagttcacgaagtttgaaacatttacgcaggaagagctggaccaggccgaatcgacgtcagcgccgtagggactcaccccaacaccgaaaacacccaagcagtcttcttccccatcctcgccgacagtactactgatatctctcaaggcacgcgcgcgtcggcctcaatctcactgctgcttctaacgtcttcatgatggatccgtggtggtcttttgccatcgaggcgcaagctattgaccgcgttcatagaatgggccagctgcgtgatgtcaatgtcgtgcggttcattgtcaaggactcgattgaggagaggatgctgcgggttcaggagaggaagatggggattgctgggtcgctgggacttatgggagagggcaatgaggaggagaggaggaaagagaggatcgaggaattgaggttgttgtttgagtagtgttactcactcgactgtacattcatatttgtgaaccaatttatgggtatggctgttgtttcgttttgaatataataatagatttttgagagatatctcattcaatggcaataattatagtaatacatgttcgatgaaaaaagacccccgctgcgtaccaaaaagcattatattcactgtccatttgaaccggcttatgtttccagtattaccaaagcaaaaactaagaacgtttcgaaaagagattttgtttagtgatggtggagaaccttgttcaatttctccttcatactcgaatggtgtttctctttcttgtcatctaaatcgagcttgtcagtagaactaagacgtgaagtgaaacacgattactaaccatttttggttgtcttaggcagatcgtcctttttcttctgggattcggcaccttgcatctgcctttcgtaggacttgcgaggaggtgggacactgggaccgcggagagcctccttactgacaccgtgcttctcagcaacctcctcggtagatggaacaagcttctcggcggagccggaatcagtggtctcagcatcagctcctgcgccggtgccggcattagaaggttccttgcgctcatccttactcacgctcgttggagcggcacccgtaccagtagtggtaggtccagagctattctctgtcacttgcctgggagcttggggtgcactgagatcggtagcagaaggctccttggacttgctctgacttacgctcttggcagtaccggcgacggaagtggagggccctttgtcattgggctggctcacgctctgagcgtgagaaaatgagatgttgccccgttgctcagagcgaggctgggcagcaggtgccactgcagcacctgaaagtgatccagctccagcgccggcggcgataccagacccaaggccagcgctggggccagccgcgtttaccttctttgcagtggtttcggcgtcgtcggtagagcgtgtgttgtaggttgtggcaggctcgtcaggcttcgggcgagaggtgagaccctcatccttcagggtgcttttgtgcgtactgagaggctcatccttaagtgtgctcttgcccgcgggcccagaggtgtgctgcttgccaataacagggtcagggtgttgaaaggatgggtttgaggggccgatattagaggtgaccagggcggctttgccgtctttgtttgcgctagaatcctggtacttgtcatggaaagtgccggggtctgtagagagtggctctgtcatagcggcggagtgt

SEQ ID NO: 12614 - DNA, 1849 bp, Emericella nidulans
cggcgaccgtgacgctgtgccgtcgagagagagagacctcgttcgcccgagggcacaatcagcccgacgataaagacactcagcacatagaacagaaacacccggacgaacgtcttcctcatcgcgcgggggatgaccgtttgcgggttcccggtctctgagcccgatatcgccgcgacctggatgttcccgtaactgaacgcggctgtgagcaagaccttccagaaggcgaggaaccgacttgcatcatcactcgtaacgtaagtatcgaacgcgcctggcgtcgtccagtactgggaccctatatactcgccgtctggaccgccgccagcattgatcacaatacccccgataatgaggcctacaatgagcatgatcttcagactggagaagatcacttcagattcgccgtacattctggcgccgcagaaattgatcacgaggatgaacagcgcgaacacgttaatctagactgcgatgctgacgtcgacgtgccaatattgaactagtgttgcggctgcggtcacttccgctggcgccgtgatggacattgtataccctgtagtccattcatgtcaacatatagctccctgaacggccgcggggaaggggaggggaagtgaatgtagaagtgtagaagtgatagtaggagtgcgacttaagtgaggcagtgcgtacaaaaattccaccccgtcgcagccccaagcgcaggctcaacgaacttcgtcgcgtgccggacaaacccgcctgtgctgggcatgaaagccgtgatttcgcccgccgcgtatgcgacgccggctgtaacgaggcccatggctaggtacgcgaggaaagcgccggcggggccggcgatggagatgacttgtccagagctgaggaagaggcctgttccctggaagggggcactattagagaatgcactcaggattgaaaatgtggcatggtgtccagaggttgcctacgatcatcccggcaatggcgatcatgttgatgtggcgggattggaggttgcgttaatatgctcgacttgtccatgttgggcttgggctgtgtacatctcgacatctgcctctgctttcgtgtctgtctagtcttctcgccagtgtgagagtccgaggtcatcatggtggaaggtgttagggttttgcaatggtgctcagggaacgcgaacgtatgcgcgcagttattcaggaacactccaaacggttacaatatgccagacacaaacaggagcttccctttcttagtaaagggtgagtcaggtagatagcggtttcaatcgtctccaacacacgcaccttaccccaatttcttgcgcacaccatatgcacgaaggagtggctagtggcgtcggtgtccgagtgcgcagataagactgggctaaagactggaacttatagaccggtctttcttcaataactctgtcattttaaggatagcctaacagctaacaagcttctccttcaaactgcataaaatcaaaggaaagaaaagtgctgtccagcagatccagttgcccagaataacaatacgacggcaataccatccgacgacgcgtttcccctctacgacctttgcgttgaagtgattgtcccagaggggaaacgtattctctgtggaaccaaaaagggcgactacttcacgctcattggggagatgatgttcctgcctgatgggcaagggatcagtatatacagcctaggtactcatctgagctccctacctgtcctggtgcccatgagcgcaactaacacgatccttgggactacattcgcatctgtgctcccgcttcttgctgcgaaacagcgcatgacgcacgagcacgactagatgacgacggactcgagta

SEQ ID NO: 12615 - DNA, 622 bp, Emericella nidulans
gaccttttgcatggtcttggtctccgggtcaagataccagcgctggtagggccccgggataaactttcccttcgagtcccatccagcaacataggtgtatccgtcgtcaagctggaaaaacaggagtttctcggtcttgcctccgtccagggtgacggtatgccagcggcatcgctcgttgacttcgtcctcaaataggtaccggtgcaggatgcggcagtagaccacagggaccggaactttctcgtcgtagtcgctaccgtcgcggcagacgagatgccatccctgactggggatgtatttgtaaatgccaggcactggggagtcccagtgctcttcgcggctgatcgagccctgaatgcgctgtccacgctggaaccagtacgtgggacagaagacggtgcgcaggcaaaggaagagattgggcgccatggcgagtgcagaggaatgaaaagctaccggtagctttcaaaccacggaatcaaaagagaaatagtatatggaggggtatcgtaggtgcgcaacaagaaagaaaacgctcacttttcggaaaatagatcaaaaacgagggagagctcgacggttatatgtggatgtccatcttgaaggatatggaatgaag

SEQ ID NO: 12616 - DNA, 948 bp, Emericella nidulans
  unsure (1)..(948): unsure at all n locations
gcacanggacgccaacgagccgccacccatgcaacccacgcatacaaaccaccccagacgaccaaccggatgtccacccgaggggacggacggccngaccccgcaggcggaggagccgccagaaacgacgggaaggccagcggccccgagacaaggcccaggggcgcccaaccaggagggggcgaggaagggcgcggagaggaacgcgcggagcccggaggaggcgccagggaaacgaacgcaaggcaaggacgagaagcgcgaggcaacggaagacgagcggacgaaggagcgcccctgcgggccggggaaacgacccgccgaaccccccgaagcccgaaagggcaaccccatgaggaagcactgcgcaacacgaaaggcaaagacaacaagccgggagccaaaacgcccgacggccccgaggcacgagccgggcccacgacccacaaaggggacgaaaggccagagacccaacggccacacaggacaaggcacccccaagggagaaaacaagaccaagcgcacaagaaagacaaaacccccccaaacccggaggcaacccaaacacccacaaaacccagcagacccaacaaccagccagcccaaaaagccacaccacccacacatgagcgccccggagccaaaccagggcagcaaccccaccaccgagccagaacagggccagaacaacccacgcccaggaaacgaagaccaacggggccgaaccaaaacccccaaagagctcacacggaacccccgacccccaaaaaggaaggccagaaccgccaccaagcaagagaaaagccaccggaagggcccagcaccacccaccacacccagacacccagaaccacaaacaccaagacgcagaacaaccaaacaacaaaaatagagagaaaaggaagaaaaacggccccccccccccccccccccaacacacaaaacaca

SEQ ID NO: 12617 - DNA, 181 bp, Emericella nidulans
  unsure (1)..(181): unsure at all n locations
tgcccgcctgggtgcgtctngagaccgatgngaatgagccacatacgaaggggcagtacatcagcatgggtnaagancaggagatannagatgggtgtacgtgaaaatctgagccaggcggatcgcagcatgcccagtcagccagtcagggcatgcgactatggcctctcgggaccgctgc

SEQ ID NO: 12618 - DNA, 433 bp, Emericella nidulans
atgccggggatgcgcaggctgtcttggctgcccgtatgactgtccatgttcttcctctgccagcgattgcatgagattgggctcattcgtctgacgatgggtcgtatctgctggcatatttgacgcaaacatgatcttcaggccgtggggcggatctacaggaaatatatgatgaggatggtctatctgctgtggatgcacctccctcagggacatgttgcctttgatcccagcgtcatgtgccttatactccatctctagcaacttctggcgctcacggtcctgacgaagggcggatggagctggggtacgcgttcttaagacacccgtgaccacttagacgaagtatggtaactcaatgtcacgtttaagaaagaaaagcttcaagtctcgagcgttatctgaaaagtgggcgtggttgtgatcccttgga

SEQ ID NO: 12619 - DNA, 149 bp, Emericella nidulans
  unsure (1)..(149): unsure at all n locations
caagcctgatgttaggcttnaancgttgcagagggcggcctgataaaacatgaggatgtatatgagcaggtttacgatcggcagaagctaaagtagnctgtgcccggtaaggtcctaccggacgaacatttgnatcgggggtgtccaga

SEQ ID NO: 12620 - DNA, 116 bp, Emericella nidulans
tgaaagcgcgcatagtatatcggcagattcccggggtatcacaagcaggcaggctgcacgatgtacggaccgacattcgcagacgatctctatctgatcggagctccaatgacagc

SEQ ID NO: 12621 - DNA, 757 bp, Emericella nidulans
tgttcctcagcgtagtctggttgttgagcttccagccattgcatactggacgccgatggagctcgagggtcgggttgttttggtcaaagtggccgaacgggctgcgaacggcgagcgcgaagacattggagcggatgttgagacctgttatcccgaagcaacggtgacggttcaaaaatgaactgtctgaatgagctgttcctggcttacactgacgcccttgtaatgctgcttctccagatgatattgcgacgtggggcctcattatgggacaaacaccttcatccttgaggatgatcccgccaggagcccaagaactattaatattggcgtttcgtgttccataagtggcgagccgaaagacattttattcagcttaaccggaagagttgcttgctaacccttccagtttatttgccacactggctttgctatggtaaaatcttccccgccggaggaaagcactgttaactgggggtcacacccagccctagggagtatttcaaatgttggagtgggggaacttccgggctgtgccatttaaacataggtaaagttctcaacgcggcttgggcgactttcacccctttcaggccaaggcggtggcctttcctcttcgtttcaacactgcccttcaaattttgaacttttacccccttatttgccatcatacttctcctcacgtatacccttgctccgggcatttttgcatacaaccctcctacaaccgttgaaccttgtaccaagtcccgcccag

SEQ ID NO: 12622 - DNA, 150 bp, Emericella nidulans
cgctgccgcacttgtattcagtgttaacgtgggagttaccgccaagcgctgccgcgttggtcgctgttttgccctatgaatgctgggttgcaaccccccatacgcacttattgctgcctttgagctgtttaaacgttcgctatggtgatt

SEQ ID NO: 12623 - DNA, 224 bp, Emericella nidulans
  unsure (1)..(224): unsure at all n locations
tatgttatactgtgtctgcctagtttgttgcttcttataatgtatgtgttttttattgtattctgttctctatctgtctcttttgtgtgtcttgtgtatattctgtgtcttctctgtgttgtctctgtgtctgctatctgtgtcttatcgtgtgtatgtctattctgtctttcttttctatgtagtattatttgtgtttatatgtatgtgttnctgtatatgtc

SEQ ID NO: 12624 - DNA, 275 bp, Emericella nidulans
  unsure (1)..(275): unsure at all n locations
atgtatctgtgtctatgtctatgtgtgtgtatatgtatatatgtgtgtgtctctatgtatatatatatctgtatgtgtgtttgtgtcttctctgtctctatctctgtgtctatgtgtgtctgtgtgttgtttgtagtgttttttctgtctgtctgtatatctgtgtttctctatctatctctatctatagtctgtgtctctctgtgtntatagtcttgtatctatatgtgtatatctctctgtgtatgtatctctgtgtgtctctctatgtctgt

SEQ ID NO: 12625 - DNA, 180 bp, Emericella nidulans
  unsure (1)..(180): unsure at all n locations
tatatgtgtatactatgtgtgtcctcctcnttatctgtgtcttctctatattagatctctgtacttcttcgtgttatctactttgttgtctcctatgttgtattctattgtcctcttctctattcctctattgtgatgtgttgtgtattgtacttcgccttctctctatgtgtctgtgta

SEQ ID NO: 12626 - DNA, 5556 bp, Emericella nidulans
catttagcgggccatgaagccatatcccgttgcaaaaccgctccttataaggtgagcccccgagcatttgtgtgattgtccacgaagatcctttgattgtcgctgttgactcggccgtgatccgatgcatctctacgaacttgaaatccgcggtgctcgttactaccatgctatccgcaatgccctcaataggccgtcgactaggcttgacctgccgcgcgaagaactcgttgaacgtcttccatcctccgtggggctcgatatagtcatcgatgcggtaggcagggtttgacctgaacgtgtccagctttgctgcagaagccggtgtatccatacacctgccgaactgattgctgaagctaactatccaccgtgaaagccaggtaagacccggcgacggctcgttgtaagcgccgatcataggccggttcgagccctggtactgaactaccgacggctggtcgagtacgaaccacattgtcgccgtgtgcaagagaaggtctctgggtcggaccgcctcagctgggacccagcgaagaagatcgttaatgacctgtaaatagtcgtctagactctctaagcgctgcatctctgggacattataggactgtgccgttcggattgcggtatcgaaactctgcttgcgggctaggtctgaggtgacccatatttcgagtgctcgcacgagaggctcgtagtcattcgcagccccttgaaggtcgggtacgaactgggcttgtgcaggctcattcactccgggcgcgtgagcaattagggcaccagtcatgttgatgcgagggctataggtaaagggtcgcagactagaggatgacgggcgctatgactcttggtctcagcttctcttatttcattaaatatttcatgaaagcagggattgtctgtcaactgatatattgctttttgctgccaaataggagctgaatgcgagttggtacgctcatcctggccagctgaacaatagcatctgcactacggccagtagatggctgcaccttcccagcactctgccttttgccagctgtacgattatatctgtttgatccagttggccacgagcgacatggcagtctgcattatcggggatagggtcggcttttgctttttttctatcttacttttgtttctttcggctccgccataactccgccgggtccggtgagggttcaaggcaatgatgagaggtgcaagttactctaaccacccagtgcttgcgccttaatctctatattgcttcctgtgcctttcaaccttggccaagcttgcttgcagtagaaataatgtccaatcagtcgacgtgactcgcatgaggttccgcttgacgctggttctcctagtagcgtttgcccagtttatgtcggatacgtgcttttcaaagaaaagcctggattttcgaatccctcaagcaattaaaaccatgcaccgtaccccccttcatcctactctactagacttccctcacatccccatttgagggcagtctcatccgcccagcacgacttggccagtgcttcgatggcaaatcttcatttccatattcttccactgctcatccacattcttccctccggctcattgggcactccggtacgcaataaatctctgagcagagaaccgggatatctatcacgtcctgccttcatcattgctcttcagcagtatcagcgatgcactgatgtggtaagaggggtgtatagaacgttgaaagaatctgctgcttgttactcatcactagaatctggcgatccccggagtctgtacagcatgaggccgctacatgaacatctcgtgcggtgcgctgaacatctagcacttcataacagactctgttctgctgcaggagtattacaaggcaatcgattccatcatctcgtgttgtcttgacctgccaccagtccagccgaaaccttgtgtctttgtgtcgatgccttaacgccgtccagatctttgcgtacctatgtcgtggagctacatcaagctcttcttctttctttctccttccctcagacccatcccgaagttagaaccgggaaatcgggcgattgactggcaagctctaaagatgggcggggatgcaaaaaatgagaccgaagctcatcgctggagaagtcgacttggttaattcgggaggcgaggtagcttgctgatttgaagtggaaaaggccgatttgcggttaagctggctactcgtctttgatagtgacctccgcagcccgacttcgccagtactgccccgttgccttccctaatcttaacaaggccgttggctagcttcatgttctgggagactaccgttcgcccgtgtcattcttcacagtgtaactgtcacttaccgatattgcgggtcgcggttacgagttgccgaaatctattatccgtcgaaaatatatatgcctggatctcggggtttgaatcaccgagattccgacggcattcagatttgggctgtcgaatgcatggtaatacatgagcaatcgatatatgctatgcgaacaatacgttacaagtaactggttaattacagacggtaccaaacggcctggaatggccgtcacctgcccttctcggtgccttcgttatccccgaaccccgacctccagatcaggccacccacggggcgctgccgctaggaactagggactgggctgggacaggactggtgacgcatgcgaggccgaacagatattactcaattactcatatttttcatataagcatgctgcaccactgagaaagcacaaaggtctctggcgatctacccccaactgcgtaatcctgaaatcgagatgtcgcactcattcaccaccatcaccaacagagcccacgagctgatcgcgagatcgcccatcctctccaacctgcaccaacgcagctataatcgctctcatcttctcaagattgctctcgaagcaacgatccttgctttgctcatcccggccgcctaccgcgactatcaagcgtatctggcgctcgggcctgggggcccgccatataatgtcgtcgggtggctgtgtgtaaaattattcttcaacccgctgaggcgggagatgttcggcaccagaatctacgaccagaagatcgcaggcggcgatgatagcgggttcctggcggagcaggagctgccgccgcgcaaaggagagcgaccggcgatggcggaattcgccgtgccccagaggcagatcaatcaggtgcccggcagagcaattcaagaggtactcagggctttacaggaaaatctctactttgagtgacaagggctgacctggaggtagaaattgatggctgaatacgccgcgttcctggatcgcaatgcccacctcgtcgatcgggtaccctcaatcctcgagagatataccgatgccgcgcatgtatgcggccgtatccagctcacgccgattgcgcgagaaatgaggcgagagatctgtcatgtccacgggacaagcgatcactcggtgcatgttactctgtctccagctgactgtacgcaggcgccaggcgcccctttatccccacattacttatccccggcacttatgatgaagttcggatgaactgatgaaggcaggtaaacgagtcatcgacgctggctggggccagagattcccgctcgccggctcaagcatcctcaggaatgtcaccttcgggaggctgggaatcctgcctaccgagtatttgttcatttatgcgcccagaaacgaaaaggagatcgaggtggtgttgaggattattaaggcgagtgtgcagtatgtgacgggagcccgcgatgtgcggtagttttgtattggcagtaaaaagaaagaggcactgtttgccgtctctcgactcagtgtacaagtagagcgaacggacatcttccctcatccgaatatagccgtgcaatgcctgaccggacggataaatgcggtaactacagtagcgagtacaaatgcactgctccattatttcctttcgtttctctttctcttcttctacactcagatagaggtggcggttgcattagttggattcaacttcttccgtctataatatacatcgggtgtctatttgccaagagtgttacccaattcggccgcgcgggaagtagccgccttcacagccttatccacaacctggtcaaagtgctgcgcattgaaggtctccagagcggcgtgcgtcgttccgttcgggctggtcacgttcttgcgcagctgcgtagggctgtcggacgattcggtcagcatctttccggctccgagacaggtctgggccgccaggcgcgtggcttgctcggccggcaggccgagcgcggtggcactggcgatcaggtgctcgaccatggcgaagaagtatgcaggtccggaccctggtcttgtcagtacgacgatggaccagactagaggtaaaagcaaaaacaacataccggaaagaccagtgacgacatcgatcaattcctccttgtccacccattccgtagccttgctgacgctgccgagaagcgcgttgacaagctccttctcctccgcagtcacgtccgcgctggcgaacaggcccgatgcaccctctccgacaagcgcaggtgtgttcggcatgacgcgaaccagatgcgtggtcctgccgtcagatgtcttgagccactgctgtagactacccagagtgataccggcagcaatgctgactaccaccggcagtgtctcacgcttggaccaggcgtcggccagctcttcgcacacagcctttgtgacctgcggtttgaccgcgataatgaccaggtctgcttcacccccggcaacgacgttggaagtggtagttttgacacccaggtcggcgatcttgttgcgattgacctcccatggctcagacacggtgatgttctgcttgttgatcccttggctgaggagaccgccgatgattgccgacgccatgttgccaccgccaatgaaggcgagcttgctcgattgaagtgccggcatggtgaggaactgttaccaattgaaggttaggatagttagaaaagacgatcctcgatcgtgacgcggggtatcgaccagttcgagaagtctttggagacgagtgggcgggtggggtgctgagtcacgtgaatattattttgacctgaattactaggtgtcaacctatcatttttcaggcagtaacaccgcaacatgtagatcggctccattatcaacttcaaaacagtgacaacggtcaatcagtccatgcgagtctgggcccattctattagtcaatactgcaggacctggccgttcccctcacagccaccccggcattacttctccaacgccccaattggctgctgatcccgcactctcctcatccccccagccctgggtgcaatcccggggtctctctgacagcagattggaccagtaggatgccagacaaaccatcacatgtagctagctccccgcccctcgaccggggatttggtctccccagttgtctgtgttgcggggttgtatagtgtggtataaagtgcggggtcggctgcctgtcacacccccttccaccttcccttcccataatctcttcgaccgcttg

SEQ ID NO: 12627 - DNA, 795 bp, Emericella nidulans
ccgggggagaaaccttcgtgcagtggaaatcgcaaccatcggttctgtaccgctgagcgccgaactgggcgggttaattgagaaactctatctccgcccaggcgtcacggacaagcaggggtggggaacgacggaggcgacgcgctcgattacgggatacgctccagaagaggaggaccacggccggccaaacggttgggttgaatccaaactgcgctgctcaaaactacgaaggaggaaaggatggggctttagagcgtgttgccccccggaccagagaaagttgagctctcaaagatcatggttcaacgagcccaaatggtacgaaaaggcgcaacaccaaggaactccgacattcggacgaaaccgatacgttctgggaccaaaaagcatagggtcttaagaacggcttgaaaaactggggacactcgggacatctccgcatccaagctggggggcttttgattaatgccctaccccatcaacagggttcactccctagtgcgcctcaccccccaggatcataccacgaatttgtcactcgattcgcggcaccaatccatgttcataggcactccaaccctacaactatctacttaccgcaattactccttactccaatccaccatccttcataaactatccaacacgctatcgattttaacttttccaataaggtctccctccatagggacatattcttctctaatttcatctctaaacactcacctatcatgttatctatccacacataatacagtcgctctccctccggacgcacactcttcctcctta

SEQ ID NO: 12628 - DNA, 340 bp, Emericella nidulans
  unsure (1)..(340): unsure at all n locations
tatgctatgtatgctgtgtctctctatctcgtatatttgtgtatctgtgtctatgtatctttgtatatgtgtctgtatatatatatgtctatgtctgtgtatatgtatgtgntcttctgtgtatatgtatatgtatatatgtatgtctatgtgtatgtctgtctgtctatctgtgtgtatatctgtgtgtatgtctctctgtatgtgtatatagttctatgtatctgtctatgtatgtatatctgtgtgtctatgtatctatgtgtgtgttnttgtgtgtgtatgtgtgtatgtgtatgtatgtgtctgtgtttntgtctatgtatgtgtctctgtgtgt

SEQ ID NO: 12629 - DNA, 134 bp, Emericella nidulans
tatgtgtactcgctatctctgtatctagttatgtgtctgtgtgtgtatatgtgtgtgtatctatgtatctgtcttctatgtgtgtatgtatgtgtatgtatctatatgtctgtatgtgtatatctatatatgta

SEQ ID NO: 12630 - DNA, 541 bp, Emericella nidulans
  unsure (1)..(541): unsure at all n locations
ctacgacagtttatagaagaaacacgcaagcatctagtttgttatacccttgtcgagcagttcaaggtcatttgacccaatcaaagttttacgaaacaatgggggacgttattgagactgtttggaaaaggagtaaccctgctttacaacaatacgaagatgtctggcataggtatcgttgaacagaaaccttaccttatcttcttacctgattataagtatcctccaaacgacgattccagctgaagaagcattcactaatgtacatacttaccccagggccagtgtacagaccaatatgggtcataacatgagaaaggacatgagaaaagaaaaatagaaagcgaaaccggaaattggaggtatgcacggtgtcggcgaggccatatttaaaccgtatggtagacagaaccgaccacgaagcacagattctggaactgagtttgatcgagcgggctccgtttgctggcatatgaagagtatcgggaatgaagntgcgtttcggcttgtgtaagaattgatccggagtagcccgtggcgt

SEQ ID NO: 12631 - DNA, 192 bp, Emericella nidulans
atgtctatatgtctatttgtgtctctctctggttctatgtagttctgtagtctattagttctgtatctctatgtatgtatctgtctatgtatgtgtctatgtgtatatgtctatgtctagttgtatctctctgtatgtgtatatgtatctgtctgtctctatgtctagttcgtatgttctatatttatatgt

SEQ ID NO: 12632 - DNA, 680 bp, Emericella nidulans
gctcgtgtgcagcgggctgttgtccgcgacaagacctgtccgcaagcgtgacgagaagaccatccaggtcaggactccgatggcgttctccggctctcatatcgacaagcggtggtggggagcattcaaggactggctgaggaagctcgtatgtgtctctacccttcccccagggccccttctgatcggtttcctgaccacctatagactaccgtgaccaagtccagtattggcgtcatccccttaggcttcagccacacaatcaacctcttccgggcccagtggggatgccccggacagacctactcggccaacctgcggatggatctggaggcagacctcgcgatggacgcgacgtatgcctattacctctctgcgacctttatcccgcctggcaagccggaaacctttgcttactttggcatggagcccactgcctatctcgggcttcacattgaaggcaacgcccaaatgcagaccaccacgggcaggaagaagattatcgacacgctgtcctatcccggattggccgtgaaggggatcgcagccgttgggccgacgctggacatctacggagaggcgggtttcccccatcctacccattggtaaccgccccctttactgacctccaacttagattcgaggtaagattacattgcatggccaagtcgatgccgggg

SEQ ID NO: 12633 - DNA, 3088 bp, Emericella nidulans
cgcgtgcaggattcaacagaatctcaccctttgaggcggaagggtcgccagactcattacccggatcacctggtcggtgcatcggacccgtatattctcctcgtgcaccaagggatgttggaggacgtgctgatcgatgaccttgcggagcgaggcgtcactgttacgcggaatagttcatttctgtcttgttcgagaaatccatctaaaaaattagatgtcgtctacgaagatcagagcacgggtacaaagaaggtgatccagacagaatacctcgttggttgtgacggcgcgcgatcgagcgtgcgggagttcatccctgatgcgcagctggagggtgagatgacaaatgccagctggggagttcttgacggtttgttggcattcattccccttaacctgccgtatgcgaccattgctgaagcagttactaggcgtcattgagaccgactttcccgatttatggagcaaagttgccgtgcgcacccataccgtcggctccctcttgtggattccgcgagaacgaggcatgacgaggttgtacgttgagttgagcgcgacagccggagaacgcattgataaggctaaggcaacaccgcaatatgtcatggagcgcgcaaaggaggcaatgaagccgtttagtctggagtggaaatcgatcggtgcgcttacgacctcactttaattaggttgtcagtatagatatgagacttgacgctgacaaaaactgtaaagaatggttcggaaactacgtcgttgggcagcgcgtggcgagacatttctctgatcctgattaccagatcttcattgctggcgatgcacgtccccttccgtctgacctctttctcagtttgtctaacaggttctttaggccggtcactgccactctgcgctcgccgcccaaggtgcaaacaccagtatgcacgactctttcaacctggcatggaagctgaacctagtggcgcgtggcctagcctctccgtctctgctggagacttacgaaactgagcggcgcaagatcgcaaacgacctcattgcctttgacgccgagcactgtgctgcatttgaggcaggcgaagccgcccttgccaggaactttgatgagaatatccggttcatctctggggtcggagcggagtatgacgctagcattttgacgcaaaccaaagtatcagacgctgggaagggatccagaagattgaagccaggggcgctcttaatcccagccaaagcgacgcggtacatcgatgcgaatccggtcgatatccagcttgatgtcccacttttgggtcaattcagactgtatttcctcattccgaatgttagcgcagcgaaggagaaaggattccttgaggtagtctgccagattctcagcagcccgacgtccattctagcaatttctgccgagaaagcaaaagaatcctacacctctcgctcgcgaggctggtctgcaaccgacgcttaccaggttccagaacggtacactactgtttctgagataataacgctctctctcatttcgggctcgaagagggaggtcttcgagatagcggatctcccgcttgcgttgcagaagagccggtggactgtgtatctggatgatgtggaagggtgtattgagaagtgggttggggagctgccagaaacacaggctgggattgtgctagtgaggccagacgggtatgttgcgggccttagggtttgggatctcggtgagggtgaggtggcaagacggtgggtggaggagtattttggattcttcttgtgaagatttctgccatttccaagcgactttctttatcaaaggtccagctatatcaggttaacaggattaatgacatatcaatatgggatttattgtagtttattgtagcaaaggccttatcatcactgtatagactagatagacttccaatgactagggtttctatcataatttaccagcaattacccccgcacgccgaatgcataaactgagaacaataagtcctggtccgttgcattttggttcttgcagggtgaagatactctcaatgatttcaaaaagggtggtagtgctgtatgcattgatcatccaagccacgtagctgggcgggtttcatatctgtttgcgctaccaacacagctcacgctatggttggctcatgtgatttgtccacaccttcagagtaaagcagagcaatgaaggacggaattgaatcattgaccatgtaaagactggaagtatacgagttctcaaagggctgattcctactacgtcagtaatggtaggattaagtcactccgctatttcgtctctgaaagcccagcacattcgccataacaaaaccagtaaccaagatcgaggaccacctgcaagcagatagcagtctgtcatccgctatggagctcccaggctagacttggcatctcaaataataccttcgcttattgagaccgagtcatgatagcaagaagaacgaaacaggaagaagagaaacaagactattcatgtccaccatagactgacgggccaaagcaacttccacccctctcaatcttgtgatggtacgccgaatgcgctttagtgggagcgtgacgcgctttctatccctcctcgtcgttcgagggacccgctaaattctggggggcgtccatggttcagaatttcgcccggcacgtactccacggcgggtacctagtctgatctagaaaatagtatagaggtcaccattacgatttggacaatgatattgacgcggatggatcttttagggttatggtgcagtttgtaggcgagggaaactggtctaggtggtgggcgtaattgtgctgcatatcttttacatatcttcgtgcactattcatgcataattgcgctaaatataagctgcactaaacgctcacctcgacgtcgagtcccaccacaactatcaggacgggtatctcagcctcacaacttcaccttcgcaattgcgtcactcatgatcgcagctcacatcctaaggggtagctttgcctgaagtatcggcgatccgcttgcagataatcacgaacctagcgacaccgaccgaacccaatcgcctgcgaccacacagcacacaaaatg

SEQ ID NO: 12634 - DNA, 120 bp, Emericella nidulans
ttatatatgttttctgctgtatttgtgtatgttgtgtgttctattgtgctactattatttatcttgtcttctctcttcttactctgtgtaggtttgctctactgtattattatgtattgt

SEQ ID NO: 12635 - DNA, 590 bp, Emericella nidulans
  unsure (1)..(590): unsure at all n locations
cgccaaaaccctttacccgattgtagcttggaactaatgttttttcgctaaaaaaaattatgcacgaggagcaaagttgaggagtaagctgaagcggtcatgtcaggtccagaatactaactcgtgcgagcctcttctttttcttcttgtctttctttaaccctcccgggtctgtgcagggtgcctcgacctcatcgtctgaagctctttgatctatactccaatatccgtcgtgtatggtgattgactcagcatgggttggaacattgctattaagggtagcagcatcagtaacgcccgggcaggttccttcgaaatgagtgttctctttactgggaatcttcttcttgccgaggggcgatgtctggtgtttcgagttagggtcttcgatagggtcttccaagacgtcttggctgaaagtcatattttcggcagcgctttctaaaatctttgttttcgttcttgacttccanggaaagtcttcgggcattctcttaaacgtggtcattgcaagataaattgcgccttcagaagcgcatatcagcaatgccgcttttccacgcttgttgttaggacttggctttacgttc

SEQ ID NO: 12636 - DNA, 260 bp, Emericella nidulans
  unsure (1)..(260): unsure at all n locations
gtgttaatgtatatattgtataatgtgtatgtatttataatatgatatttttatgtggtactgattngattgtgctaatattgtaattgttgtttttgttgtattgttttgtattgtattctgttgtattgtattgtattgtaattgtgtgtctgttgttgtgtgtttgttgtagtgttatgatgattatgtgttattcttgtgtatatgtctgtttgtattgttctcttgtatgttgtatgtgtgttttatatgttgta

SEQ ID NO: 12637 - DNA, 125 bp, Emericella nidulans
taataacaatgataatatttatatgacaatactcattatctctagaaagtagctaggcttatgatcagtagctaccgtagtagtagttccatatatagtacttctattagactaggagcaggctc

SEQ ID NO: 12638 - DNA, 601 bp, Emericella nidulans
tctttggtggaatctctgacgcgagtaagacctcgtcgtcagctgcagctgcatcgccccttataagctcctgcctggatccaatcacgtgactgtgatcgatttcgtgaccttcatgactttggcgactttcggtcactgaaccttgagaaagtaaaaatgaagccgagattttcgttgaggtcggagttcaggtcgctagttgaggttgcgcgctccggtgtatgtactctagatactccggagtagagtcgtgcatttggagtatgacagcggccaatcggtcattgctgatcggctcaatgatgctacgatcatcaatcacgagtcatcaactctcccgcatcttgcttatccttttgacaccccaacctctagaaatccgacgcaaacttgggcacattatctgcgcctgattgtgatgagttactctagcgtaaagtgatcaacgtttgccctccgggatcggaggtctgttataagcttgacttatcgcaagcaagtttgaggtaagcctgcttatctatgtatacgtactacagggctagatggaatatgggtattagtataaggccgcaagtggggggattggtaaaggaag

SEQ ID NO: 12639 - DNA, 551 bp, Emericella nidulans
gcaaacgatataaagcatcatgtcctctcaagcagctcttttttttgcttgagtagttctctatttacttaagcctggaacctcaggccacatctccgcttcttggcggccatgctgatccaggtcgatctgcccagtgccagatgcgactccttcaggatttagactggaggtttactttgtatttgttacaagaacggtacttcaatatcattcatgtctactccgtactgggtaccggggaggggtacaaaatataggtgctgttactcaaatggcattgatactgctataataccactatccacacaaacggagtgatccccggctgtatggctggtattaagattaccgctggctttgatcattcgtgacgatactccagctcctgcctgtcttgtaaatatttggaaggattgagcaacaactttcgtacatactggcttgattattggctctacttactccatctctctcttctggatgtggagcttctccgccttgattccagagcggaaatttgttgccccgtctacaaccacattgggaat

SEQ ID NO: 12640 - DNA, 164 bp, Emericella nidulans
acaacgaacagcatagctccgctatcgcgactgggcgacgatgatcgcaatggcgtccattcccgttaacctgccacggtgttcgccgttcaacgcccacgcatggccgctctcgttttcacacactggatatgacgcatggctggaaacatgccgctcgattc

SEQ ID NO: 12641 - DNA, 597 bp, Emericella nidulans
  unsure (1)..(597): unsure at all n locations
atttcgtgcgagagaagantgaggccccgtccagctgcaagagtctccgcacttctcaccgactaggcgacttggtcaagctgtagcaatcgcggagaatgggacatggaaggcttgactcgccttgcagaagatacaggaggggagaacagtgatcctagcgcgagagatcggtaatctgacctgacggcacgagtggaaccaagtattccgcgtgaatgtagttaccacaccagtctgcaagtgtattctttagtagacgttacagtagtgcgacggtgattcaagtcgacgttgaggcaacagacagaattgagggccttgaattagaatatattaataccctcttcaggctgcgcatgaactacgaaaagacagctgcatttcaagtgaagatgcctttttctcacgatgaacacaatgtccttcccaaaacgcctgggctctctccaccggttcgagcccttatgacatcgcgcagcaatggacaacccaggtggatgcacagttgagaagcgacccgcccgaactctcttgtctacttcaccaggattcatggtggcgagacatgcttgctattgactgggacttggacac

SEQ ID NO: 12642 - DNA, 653 bp, Emericella nidulans
  unsure (1)..(653): unsure at all n locations
cgatatacggaactgcgacgaacaccggcctttagactcagggtcaatgacgtcttccgaaaatcttccgggcgagctccgtgaattaagacaaggagatttacttcgtaatttacttttggcagcccatgtggccactcactgcagaatccagctaggggcgtttcagggaagaacagcggtatctgcacgtgacttataccacgtgatggcaatctccgatcttccttccccactggcccacactgcactttttgggattccctattgcgacgagtgtgagatgaccgggatgaaggagttgagggctaacactggcgcaccggaagaacggaaaaactgtgagcgccaaggggtcacccaatctgccttgctatagcgaatggagtaatattcccaagtcatacgacgccctggcagccttgaaagagatcctgaagtcaacagagggcgaaccactcaaccttggaagccagccgaccggtaccgccgttccaacggacgnnaatggagatctgtgtgtggcctccataattgatccatactttgaccgttctacgctgaccacaatatgtcatgtatccttccagaaggaagtttgcctgagttggccgtctgtcgcgggcaagctgcattcaagcgaccgctgcaca

SEQ ID NO: 12643 - DNA, 461 bp, Emericella nidulans
tatattgtacaacaactatgcccatgcctgtcccggggaattcacattggcttgtgtggtaggagtccttcatgatacatctttaagggcggcccgtgcgggcttctattgcaaggggttgatgtgctggacggctatctcctaatatgaccgcaaaagggcgagccagtcatcgtatgagcggactgcctgagcaggcttgatgtgcgccacttagagcactttgttgcctggatctggctagatgacacaaatcccctttccttttgatttgaggaaacacgtacatgtgcccattagagtctggagagctacgattgaatgatgacataccaacttcccaacccgactgatatatgcaacacatgtgatgcttgcacagcccacaaattatactagcatgatctgattcgcttgcaacaactcgacccacatctacacaatgcccaaaagcagcgtct

SEQ ID NO: 12644 - DNA, 4605 bp, Emericella nidulans
ttactagaccctaaaccagtaagcctcataaaataagctgctaaatttacaggcatgggctgcttgggtgcagaacagagggtgtgacatagggcaataggacgtaccagcgaaacatcttatcggtatattgtgcgaacttttgactacaataaccctgaactgaacacctgtgatcgatctatggcgtggcagcacatatccaatcctcagttcaggactcggcctcgacttggaccatttctgtggttgctagtccgcagagagccgagaacggataaacccctctcctcattcctatcccaagaaatcccagaggaaacttaaatgagtggctagtaagatggggtcaaattgtcaagggactacccgttctgggtggagaggctaactgcgcgagcgtatgcgtatctcgagataacgactgtgtgcggcgattctacaaactactggccgcaatagtctagaccccagtcctgcagtccttacagtagcctcggctttgaggctaaagtccctgcgttagcgtaatctcaatctgaacgcctaccatataaggagaagatctggagaaaataggcgaactgcgtatcgggaccgatatttgcgaggtatggcaccgtatccgaggacaaacggagaactcagtggcaataacgggaaacgtcttgatggtaccataacaaataccaagaggtgtagcgttcggcgttctccgatacccagctgccatctttagtggctatattagggaagtagggcaaatctcggccagctcggacaaccggggccctttgagcgggtagcctcttgccggatagcctcttacaggtagatcccaggttgaggccaggtagatccagtagaccctggtagaccctggagaggtattccggtagacctaggaagaccttcgggagaccctaccgagtctaccgtgcctaccgtgcctaccgtgcctaagcgagaatgcagtggcgagggaagtggctgaacagccaaacatggtatgagccctgtaccccgagcgatcagggccgcaaaacctcggccagagctgggtggaattggaacgctctggaggtagatcccaaccttcctaggttggcgataggaatttgacggtaggatccagaggatgctaggacgggggcgagcactgagcgctatgaaagcagttagggagaccctgggagagaggagggggcagaaagcagaagcagggaacggtggcaagtggagatgattcggggtttgatcgcagtgggtcggggaggtctgggcagttggacagtgcgtgagctgcagctgtcagcctgtcaggatcgaggttctcttgctttaattggttttaactggcgttaattggcgagtagagtgccagtcctgccagtcctgccagtcaaagagcggccgtgctaatgatcttgaaagagagccattgcagattcgtaagagtcagacgacgatattcagaacggctccagaacataagaagtaagcaagagcagcatcaaagaccatgattacaaaaaagggtctgaagaatgggaacgaagggccaaaggtgtagccagagctaccccaggcctagacttgcatggctgttctgtgtcgtgcgtcgaaaaccttaacactgtcaggcccatggatactcagtagagaaccacactcgaaaggcaggagccaaccttggatggcccgcctctcaacctcgccaggcgaccatttaacttgctcctgtcactttctgcagcgcctcttcagccttcttcatcccagctatcatctttcactctactacggcctccctatcctccaggcatgtctcccagaccaccaagtatcgattacggccagagccagggccgaacgaaggaggagaaccaagaacggtgagccgactcttcatgaagacggtcgtgcagagctagcagagctaattggagtagggcctttatcgcggcgtctaggcggaaagatcgcagcttagatgctcggatcgagtctgcgaatcgagcgtcgatgctgcacaagaagcgcaccggcagggccctgttgatcaaccgcgaggtggttgagaatgagtctatgtacgaggagatcgacgacacttaccgtgccaagatgctccagtatatgcgcgtccataatgcgcagttgaaccacgactttgataatacgcttctcgccgggctgcctacaacgtcgcagggactgcagatgccgagttctttgcatacggggccttcttacagtctggggcagtcttcacactcgattctgcagatgcccagtgcttctcacagtccgctgcccagcccttcacattcatcccacgggtcgacttcgcaaagcccgcaaatccccagcgcttcacaaaatccgcgcgtacagaaccggcctatctccagccgtcgaaacagccaccagcgcgcatccagcgtcgcgcccactgggccgatccatggcgcccgcaagctgaccatcgacctgtcccagctgcgcaataaccttcccggaccaagcaccgaaccgagaagggcgagctccaacgggttcccgaccccgggagcgaacttctcgccgacctacttgagtcctggccaggcccactctcaagcccaggtgccatcctaccttgcagcagaacccagctccgctattcgcccacagttgcagcagcaacaacagcggcaacaacagcaacagcaacagcagcagcagcagttgctgcagacctggcaaagtctcttcccccgccattccatatctgattcaacatcccttggtggcctacctgccataggagaggtgccaggccaatatcgcgatcgcattgcgtccgctcccacttttcccatccaagacccggttcatatccaagctcaagcccagactcgggctcaggcggctgccactgcagctccacttcagaatgccaccccagcaccaggccccgtcgctgcccatgggacgagccagcatcaccgagtccggtcggaaccaggacccgcccccattgctgtctccaccacaattccatcctcttcgtcctcagtctctcttcatacagggttctatccaaccagtgcttcgtcactgtccgaccccagctcctctgctgagcttctgcctacaccgcgaagcatgtcgccacacactcctgccccttcccaagcttctcacccgcgcatgagctttggagcgggcatcggcgaactcaacatgaatgaagcggaaccattcaagcacactctgttcgaactacagggttttgatccagatctccagcttggtctagagatgtcgggacaagggcctgaaagcgcggaccaggatttccttgattttagccagtttgcctctacgcttgaccagaaccatcatcaggctatgtttccgtcccattggcagatgcccgttggctctggcgatatgccggcagattctggcttttctggcggcttggatatgaaagagtacatcactaacttgtgagctgttacttattagctttcttgctcggggcgacgagctgtatgccttcatgccttctaccgtgtcttaccaataccaaagtgtgcaacatttgttttgagcttttcttcacctcatgtaccagattctgcaaaactacccacattagcctttatgttaaactgtagacgccgcaaatggagtgcaagtttgcagtgtacccactatgatcggcaattaataatgcagatctcccgacgtcgcaatgaggtattatacagtctgaccgtatgaagagagtatcccatatcctgaatagccctggtccatcctagactgacctatgaatgaggtaaggaactggtgttggccgcaaacgggggaacctaaagccaagagagcgtggagatattctgcctatccgataagctgattagttcgaggtaacaagctcgcggatgggcccgtaacaggtagatgcaacattccagtcaggaaaaggaatgcgcctgcttctcaagctccagattgcgatctgagtaaccccagttcagagccagcgtactttctatcctaccgactaagctccctactacgtgcgcgatattaagtgaccttgggtagctttgtcttccaaaccttcctactctggagttctttctgaaccggaactggctgagtacgcggggagcccgagcgtcaaaagtggatctgcaatgtgagcttattgcccacgcagtggggcacgggtaactcaatatagctagcgtgaccctctttaagaatcaaagctcgtttactgtcgatcgcgtttccgctaacctgatctggttagtgctctgtctcatccccccattactccaacacgggacctaatgtacagtggtacgtactgggtaatccgtcacattcgcatccatggttaacatatacctctgccctgaaatggagagactgaaccagaaacgatggaaaaaagtgctaccggtggctttcaatgtaacgttgccaaggcttgcgcgtgctctagctgtatcgcctccggttaatgtttacttatttggccgtgaaggttcagggctcagattgaattttattatggctcttgtcaaattaagacgcgta

SEQ ID NO: 12645 - DNA, 781 bp, Emericella nidulans
gacctccccatcctagaaaaaacctcgcgacaagtaacccgcaaatgagtctgtcgctccacaaccaataaggcagactgcataccatcagaaccacctttacatttcttcatgttactcgatcgcgactgtaactcaccagtgaatacaaggccactagatacaaagatcggccgtctgccattgatttctgaaaatggggcaaggaccattggcgcgatcccaaatccaaggcaaaagagcgtaatccctaggttgtagacgaccctatccacattccactttgcagtgagctcatcggctgggggcgtgtattcaccagcggcgtacgcactcattgcggtcacaccgcatgatatccaggtgatcacggacttgcgtggcttactccagagaaacggcgaagcatactttgatagatctggatatggcggtggagctgggcggccgggacgcggggaagaaagacccacgggcacaggtagaggagtatcaaaagtgagatatagatgttcgactgggatttgcgaaatctcgccgctctgtgtgaggtgcgtatgttgacctcggttatccatggctgttatgacgtcgaagtcgctcctgttggctgagactggggtctgtccgatctctaaccaagaagcctcctgcgcgtaacgcgtcgcgattgcctctgcgtctctcattgagaagagagagagcagagccgagggctgggagattttaaagctgccccaggttggagtaaagccgactcagccgactaataccacatttt

SEQ ID NO: 12646 - DNA, 836 bp, Emericella nidulans
tgccccacgcacatgtggacgacatctacgcgtcgcttattctttacgccatgtgaatattttctggtgcgagtgttatccgacctggtgaaattctcactctcatcgccgcttggcattgataaccccggcgttttcttttggcgtctaatctcagtttccacccgctcaaagtctcgcatcgacgcgaatgaccatgaatccacttaacgcgtcagaagccccatcaacggcctgggagaaaggatcaggcctgcggttgcgattcaaggcggctagataaagttacattttgacttcctggcttctctttggtcatggcctgtgtccccggcggttgcacctttttttcttgagaaggcatacatttgactgaaaataggatatcctcactcgtattcttctagcgatgagtccacgacggaaatagtttggttatagcagcaactaaagtaatcaagagggaacataatacatagattcatcgcccaatgctttttttgcgactattaccctttattggcatgctagattgcgaaactttcggaagaacccttttggcttaacctgaaaagggcaatattggaaggaactttcaatcaaaacgccctttaataacaaagggggcttctccttggcaccccaaggattgagcccctcggggctttctttaaagttgggcacagggagcccctccaattctccttttttgccctttctctttggggtatccccggggctggtaccctggtcacccgggacactccttatccccctcctttgggtcaccaccctactctttttgttcccccaccccgcctttttcctctctatac

SEQ ID NO: 12647 - DNA, 874 bp, Emericella nidulans
gcattgggactgatgcaccgacacgcgccgcattctgcgctgagaaatctgtatacggctaccacgagaattcagcgagggagccagagtgccaggaaacggttaatgaggggtttaagttgagtttggtgcaggctatcagtgcggcgaccaggaatgcggcgtatagttgttctgcggacgatgtgaccggggcgctggaggtggggaagaaggctgcttttgcggcactttatctggattcttactgtgtccattttttgccataaatgggttccttagtcctaattgttctggaaggtttttcttttcttcccctcttttaccaggtgttatatcgttcatttctgtattatctctgtctctttaatatctgtatctcactatttccttctccttttcttttcccgtcactttttttacatgtcctccttatcccattgacttttttttcctcttcataatatctctgcttcttttcttagtttttagtttcgaatttctttatttcttgctctttattctgtcgttctttttcttttgattctttttcctcttcatctttcctctctattcattttttttcttcctcagttctctctttcctttcttccactttctcctccatgtctattctctattactttccacttttctttttatctatttttctaattatttattctctcctttccttttcttttcctccttcttttttcttttcttactttctttttcctattcatctttatattcttatatcctgtttttccctcacttttattacttttttctctttccatatttattcccatcaattctctattcttctttcttctttgcattaactatttattctttcctctccctctca

SEQ ID NO: 12648 - DNA, 876 bp, Emericella nidulans
cttggtgtacttgatcctggcatattaatggcggatgcgactgtgaactgaggagaaaatagaggatgacttatgaagaagaacaacgagcccggggggggcattagtactgaagacaccagtagcccgcaagtccatggattaggccacctttacctcgcgaaactgggatttaatggttaaggttggggggggtaaaattttaagaaacctaaagttatcgagtatggccaagaaaggagccgtgaacccggggggaaaggatgtttaagggaaaaaagcagattaataaaattcgatagagtctggccatacttggggaacactttgaaaaccttggggttttagggcccgatatctttccgcggctttcggggtttttctgaaaaaaaaatcataatcgtttcgggggtggtggtctcctgttaacaacaaatggggacgttattaactctcctctttttccttagaaaaggggattttggggggaaacctggtttcaaactttaattactctttttgggggagggacccaaagggcttttagaaccttggcgccttcctaaatgtccagaagggggggtttttggacaacgccttgggggagcttttggaaattttgggtgggttgttccggctattttttgggatattagggctaatttgggccctgaagggccggttttgccaaaagcagggttttttggggccaataaattaattttttcaaaaaggggctaattccccttccaaagagtttttctctaaaaactcccaaggggggtgggcgaattttttcggtttttttttttaaaacaaaaaaacgccccttttttttttttttcctttctggggggtgtctttttttccacatac

SEQ ID NO: 12649 - DNA, 5563 bp, Emericella nidulans
ggtttcagttttggcagtttgcctgacattcttccggttttttcagttagcctccacaagagcacagacaataacgcggtgaactatacgactgttggctcaacctcaaccaccgcggcctcggtgcatcagatatgcgctcttggcgctggattcatgagcaaactcttttgactttttgacttttcaattccttgttcttatattcaccaggcaactgccgcgaatattatcatgtctgggccatccccttgaaaccacactccacatgtgcacagcgatgccacactgttgagctcatcctgctccatatcaggcctagaggctctcgggcgcactttcctaggtacctgaatggactcccgttcttttttttggggtgtgcggaatttatatcctggcccagttggcgacgggttgagttccactcgtaccagaatgatattgcaacctaacagctactccatggcagggtcttggtgcactactgctggtggcgtagctcgcgtgcactttttttttccttttttttttttttttactttccggtttcaaaggccacaatgacaaactactgctgctaagccgggacagaagaaaaggctggcggcgcctgcatcaactagccaaaccagggcaacaagaagggcatagccaggtgcaccgagggctacccttgcaagtcactgcatgaccagtgatggtcgaaacagccgttcatcctcagagtaacgtataataatagacttgttctgactggccgttgaaagtcaaattaagctcctagttcggatatttcgtgttccccgcacagttaagtgtgagattgtggtcacatagcatcgcagcaggtgaacttattattactgttcggccacacacaagccagaagcttgcgttggctttttagctttttggctttttggctttcttgaaccatggtgtgcagctgttctacgttgtgaccataatccaaagtggattctctgcgtggtcgttaacagttattttctttcaatcatgccatagtccatcaaacagcatcgtcaccctgccatgcaacataacaattatgtgcctcgcggagtactgcacataaacggcgctcgaagcccgacgattgaattggtaatcctgccggttcgagaccaccctcaaaggattcacgcaagcgatccgtaatcaaacgccaagcattggctgataagtcacagcacacccggattaagcggccgcgctgggcttgacctgaatcctttcggcttcaaaggggaggggtccgttgtcttattggacagcttgcgctcataatccgcaactccacattatttgagtcgagattgacggtaagagacgggcgagggatcacattcgaatgttgcattcgtgtggccgtcgacctttgtacgcggctcgtacgcgacatgcggaggactatccgacgatactggtgattatgtaacagtcatccactggttacgtagagcgggtatcgtgccgggctgaaccgccgggcctatatttttgtgttcactacattcaccgtctgaccctttcagcttcggcgcatacctgccgagattgatgagtctccacgcggttcccagcggtgttaacagttgatgagccggtccggcgccggccgtggtcgcggtcagctgcgtcacagcgttgtgaatcaattgagtagtatagtccacactgccatcactcgagtcaggatactgtttactgagccgcagcccagaagccgggtcaagccacactgcgagcccttgtgcactttgcagcgctagaggcaattatacaattaaccaacagagttgagaccacggagtatcccggcagaaacgggggtgctattattatcacattttattattattgccctacaggaacataggagagatccaaccaaccccactgcaatcaaacagatcctcgatggtgcctcggcttcttttccgattctcaactcctgactcgcgtgaatccgcatgctgcattcattatcattgcctttggtcgcggctcggcgccccttcccgtcatcttctcactgtgtactccgtttttggactctgcggtggtcaatcgagccaggtatctgcatcctcctgttcaagctgcctgagtttttctgtgtgcttcgaacatccatgcgcgcatccgaacaacttccgaggcctgcggttcccattctacgttgctggctgcctgtgactctgtccaaccggagttcatgccttgcagcgctagagcgggagggcccatcttcggaagttcgggttcttggtcgttgaaggtttaggccgctgtgggtgcagtggagtggcacgggcacctcgcagtccttgactttacgggctatcgatcacgggcacggattctcggttaatccgttagagctctaatgcaatctttgtaccagtgctcggatcaccgtgtactttatcacttccactacaataaagacaaattcgtattagcaggtttggcttcacagcagcgaggtctccgttgagtgtagattataataaaaggtcacctatcgtaatagcagacgccctgctttacaaaaacgcagctctttccgcctgtcgtcaagtttaccgattcgagctgatcagggctgggttgatcgtctttggaagtgtcagacaacccctggttgtggtggctagtcaccgtttgggagaccggccaaatgtgccggtaaattcatcggcaatcctccgcgctgcggccaccaccggcgcaacaagcgacaaaaatatcgtatctggctagcctctcaactcggtacgtaggtagccggatacggctacctacctatcccgggcttcccactttgtcatgactttatccacaatacttgttaacccctccatttcctcctcagctagcagaccgagagcgatagggtcgatgctgcacccgaggtagacaggaacgcccatgcgccgagtcaaaatcttagctacgcgcgtagcatattcctctgttgaggcggtggtgtacagtattgtagagatgacggagcgagatgtgcgctacaatagatatgcatatcagctgactgtcaaaatatataagtgtgccttgacgaacgagcgatatattgaccatagacagaacaattaagcacttacgtctggcatcgcatagatgaaactgcccataggtttcgtgctccctgttgagtcaccggccgttgaagttgccaggaaaaccatgacacaggtatccagcaatgtaaggtggatatgcgctgttgtgtgtagcgctttgggaagggggaatgatagctccgtcgaggctcgagctggagctggagcttgaatatcgaccatattatctgatttcaccgcgcggtggttttgtcggcgatcagaggcagtattttgaggctgcaattgctggaaacgagaatgctgaatgtctatggctatgagagttgagcttaaggcaaactgaggttcgagatgtcgcggtgattccccaccgaaagtcaaaccagattcgactcattcgagcgggccccgcacgcacttctgcttcaagagccaacacagcaccactgccatctattactattcctgcccatcgcgagttatcagcaagtgctacgcttcttatatatcgtctgatttcctgtcaatccacaatttacctcttagttatctcgtccgtgcaattgatgcctcttcggtttctccttcgtctgcatgtcttcatccctcgatatggcctcgacataccctgaccagtccgaggaaactcggagctgggctggggattttgacccattgggtgaagaaagtgaacggaaggttctcttctcagctttcgattcattcatgtaggtagatagagtctggacatcaaggtatttggatacctgccacttctgtttttcggatacgagaccgaaagtcgaccattactcttgcctcttttcaattaaataacaaagtaaagcaagttgctaacaaatcactaacaggcaatatcgaagaagcgcacacttgaacaccacacaccggcggcgccaggcgttctacgccctcccaacgaagcactggcagatgcttgcagaaccgcctttctcactcctggataactttaacaaagttgacgatgccattgacgcgaacgccgatatcgcagatgccattatcgggacgggcctcaaatcatttggtcttcccgagcaacccgacccatcgaatccgttgcagaattggcgtggagttgcgaattctgctgatatcaacaaggctcactctacgatcaggcagttttatcgagactggagtgcagagggccaagctgagcgggaggcatgctatattcctgtattaagggatttggacctcgaattccccgacaaactggaacgggaggagtttgttaaggttcttgtccccggagctggactggggagattggtgtttgagatctgccgggccgggtttgccgctgaaggtaatgaaatctcctaccatcagttactggcaagcagttgggtcttgaatcacaccgagggcgctcagcgtcatgcgctgtacccgttcgcgctacatttctcaaatatactgtctagagagcagcagctacgcaaagtcatgatccccgatgtacatcctgcgactgcgatgctggaggcgcaagctagcggtacaccgtttgggacgatgagcatgtccgctgctgattttgtcgtcctgtacagcagtccgtctcagacggatgcctttgacgccgttgcaactgtttttttcatcgacaccgcccctaaccttattcggtacattgaggcggtcaggaactgcctgaagtcaaacgggatttggatcaacgtcggaccactgctctggcactttgaagacggccaccagcgcacccgcagcggagatgggagctccagccgcgatggcggtgatagccagggcatcggagagccagggaacgtcgaattgaccgaggaagaagtttttcttctcatcgaacgcatggggtttaagattgagaaagtcgaggccgtggaggagcgggtagaatgcggctacatccaggaccccaacagcatgctccgctccttataccggccatcacattggattgcacggaaactcaagaattgagattgctctaatccagaacaaacaatgatccccagtccagagtcagcaatcaaacaaaaatagaaacgagcgagtctgccttgctgtgtggtaagaaaagttctgtaaccgtatgtatgattcactgtacccgcgagatcggcggtacagccttcagccgcagtctaacaaaggaacccacaattcacggggatgctctggtcggcgcagggcttagcgggcgcggctgggttgggcgatttctttggccgcagtgcatggttccatgggatttttggccaggaacgacgagaatagaatcagaagcagccatcacctggtggctggggacaatgacccgcaggttttgcatcacgaattcgtcatgtacgagcagaggaacaggaatcaccagaaattctccctgcccttcccgt

SEQ ID NO: 12650 - DNA, 5415 bp, Emericella nidulans
ccacatggagcatgcggtaggtcagcaactaatcatagagcgttacttgggagcaatagccatggtcagttgggagcaaaattaaacacagtgtccatcggccgtgctgcttttccaataaacacggcttgatcgtcgaaaacggcggcggagatggtgtaatgggtcgcgcaacttggtcctctcccttctcagggaggctgaatagctgacatacttgctcatcagagtagtcgctccactccaacatcatctccctgctcggtacaaggtccatgatttcatccgaagccacccttgctggagatccagatgaaccttccctatgacttttggcacccctgatttgtcttccgccgcattgagaacagattcttgaggatgggcaatatctgtagtcaggatatcgttgcttatgctgtcttttttcctcctgtaagtccttttagcgtgcttaaatattcctgttgatcctgatatctacctctgcaagttctttccattcggctttggctgattctggaaggtccctccattgtctcccaaggatctttgcaacagtggtactaggcagaggtgagacctcggcggatgcgacaacagctttgtagtgggcctctcggtacagaaagaatgctgaaaaatgttagagagttatctctggtagtgagaggtaaggtggcgagggcataccattccgtggccgagggattctgggctttggttgacaagaacataatgagtccattgctgatatggaacaacaaagtccccaggaggacaatccctttctgaggtctgtctttatagagttccggacaaaataaattaaattcaaatctgaataagaattaccaatgttttgtactgtattttaccaggttataaatatccttattaaattaacccgaagttgggtgcctattggattcactacaaaatggatcggcttctggtagagctgcttgaaatcattattttgtttactctacaagcttctctgaagcatctattgagcgtgaacaggctattccgggccctctgtattccttcactctttcagtctgttcaggtcggagttaccttcgcgcaactggagggtttgctgcagatatcaaagtcttcatttgctccatttgtgagagctatacgatatgaggcaaatgcccttctcgatcccagtatgtgcccagttagtatctaaagatgaccgaactaagttaccagtggcgcctatgattctaccgccatgtggaagcattttacatccatcttttatgcaatcacgcatggcagaaaaggaaaagatcttatggacaagtcaggatatactgtgcatgtcccttcgcgaccttcccaatctgcacactcttgagattaatctcgtgaacagaatcaaagaccaattcggccatgcttcaggctgtatgcttccatatcatgattactatctcggtcccttggagaaacttctgacagccgctgtgatggctcgaaaaaacagtgtgatgattcgagcattccacataagtggtttctaccatcaggctgccatagaggactgttttttgcaggcgctggcttccaaagcgttgcctgatgtggaggagatatgcattacatctacatccccgatgttgccttttcttaacaagctcccgcttttgaagcttcagcatcttgagcttatagatatttggctgtctcttccagctctggaaaacttcattcgccaggcggtgcatctcaagtcgctatatctggaggatgtctggctagttgacgagttagcagcccatccgggtggtgagtttggtatatcaaagggccttgcaactactatcattgaagtcctgacacgactaagccggccacttgagatgaccataacacattgcggaaatacacggcagtttgggagtaacagcaccacagtctttcaatcctagtatctcatgcaagtcctggatttaagcacgaatgaatgcatgtaagggctgcgggtcatgatatccgggacttgcgtcccagcagagaatacgtccaatttactgtttcggccacgcaaggctgcaaacataggcaatagagatcgaacttcaagcaataaacaaatgtagtaatcgtctgcgataccagaacacataataattagggaaataatcttttcccatttcatcaaggaaagcagggtacttagcaacaaagaactgtcattggtcggggcaagtaggacttagtctcccgtttaatctgaagagcaaccaatcagacgactggcaggcggggggttctttgttgaccccaaacccgagttagtggcgaataaagtttgcaccaaaggctatgcttatttgcacttttgtaaatccgtacagcaagaactactgcacagggattactgcccaatcaacatcggcaaccaactctgaatgtgcagcacacagcccacatctttgcatactttgggggactgtgtgagcctaattgctttgtaccgctgttgccgtggagaagccaggtttttcttcacgacaatccacggaactatgtgtgctccaaaaagttataacccaaaatccagagatcctgatcctgcaaatgtcgctctcatagcccgagaatgaatgtttgccctccacggagccatggctcgcccctcgtggccttccttccctctgcaggttatatttagcaacgacaagagtcttgtgatattctgccactactgcgaggctgagggaatcgctgggctgagcgcattgaattgacggtgggaccactgctagactgaaaggctgagacacaacctggtaacgaatggcaccgtttcattgagacggtagtgctggcaagcaatgcgaaattatttcgaacatcatgtcagacacagcccggggataccagttaatggtgcactgtgtgtcatggaagactttatttttaggctggtgtatttgcactggcgccagacgcagcgccaaaggctgttcttcctccaattgttgcctattatcgacaaggttccaaagcttcttgagtatttcggccctcccagagagaaactctacgttgttgctcgggctttgcaaggctgctggggcggaaaccactgtttcatcagcacgggtcgataagccctctcccgagccccttcatcacaatccagacctcatttatatctgtacagcgcatggagtctgaaatttaaagcatctactatctctacatgcgttggttgcaggcgctccgtttccccaaggacactgctattcatgccacgcacgtctgttgaaagtctccaagcatatcctgcatattcatttcggtctaattatggcgaccaatcccggctcaattcccgtggagactcaccagcctagcctgctgtgtgtagccaaagacccaaaacccgaaaagcacgatgaagcaaaagcaatcgacattgtggccgttcatggtctgcgtccggctgccaacattgatgcatggaaaatagctgatggctccctgtggctaaagaagctgctcccgagggatgtgaaaggtgtcagggtgttcacattcagctacaatgcgcttgcagtcttttcaggagctgaccacaagttgactgatgcggctatggatatgcttttgaaaatcacgggctgctcgagcccaagttccgcttgaccgtcctcttgtgtttatctgccatggttttggtagcttcgttgttgaatgcgtatgttctcgtgctttccaaatctattccatggccggtaaaaaaaacgaaccttcaatgacaattctaggcactgaatcgcgcacttagctgcccctcattgtacccaaatcttgagggctgcgtcaggggggtaattttcctgagctcaccccagagcgcaccactcgaggtcccattttcggctttgttaatcgactccgcaaccgacagtattatgactgagaatgggatctcgacgactatgattaggtggctggagagcaatgcggacattctgcaagccattccccgggatttcaagcggattgcctccaggatgaaaatcaaggtctactcctgctacgaagaattccccgtggtgccacataatcagcctgtaaatcttccctggtcctaacggaatgaatatactaattgcaacagacgctgaacgagtattccgcagccgtgggtttgaaattggagaatctccgtatgatgtctggctgcaatcatcactcgcttgctacattctcagacagggagtgcgacaactacaagtttattgtctctgcgattaagaaggtccggaatgctgcacgcaaggcgagagaactcgaccctaaagtaattcctgagcttgggtacgaacagccaactttaggatcacgagatgaccactatcagcagggtaagatacgaccataactatcaaatggatgtcgttgttaacgtaccgcgaagacgcaggccctagcagccccgagtatcaaagaatatcgctccctcgcatcctgccattgcagatggataacccgtcatgtgcggtcaatgcgtcacagaaagatgtattccaacagccaaaaaaaccaaacttgcccagttttcaagcaccagcaacgttttcggcctcgtctgttgccctcgttccgccctctcaaccagcaggtcctgatcagctcaagattccgatgcgtccagtgggttcaaatcccggcaggtcgccgccaggaaatacacccgctccatctgtcaggtcattgtccatgacctcgagcaattttgatggctttatgccagcatcttcccaagtggccatcgacaggatagaagcaatccttcccactggaaacgcaacgactcccgttacatcggcacaacaatctgctagatcgccgtctactgcttcaagtcattcaatgggttttatctcgaagcagccacagcctttgccagataaatcaaatgcatatactgcgcattattctgcacctggcatggtcggacaaaggctgccagagcagggatgtctcatcagtcgcagttatccaacccaagatgcctggggaaatacccggtggtgtttcgaaggcacaattacaaccacaaaatatagatgttggagaggggctgccggatgcaaaacgttgtttgcctccccagagtcttacagacaacgcatcaacaactctacgtacgactccaacatcctggggacccaagtactcggcaactactcaaccttctccctctggtctaattccacaccccccgcaggttatgcactcgaatcaggtctcctacgccccgttcaacactcctatcaagcagccaccgaggccacagcgacccggacactcccagacctcatcagccgtgttgtcaattccaatgaataattcgaaagtaccggcgcctctccctac

SEQ ID NO: 12651 - DNA, 262 bp, Emericella nidulans
aaagaagagcagaagaagagggggaaagaagccccgagtggacttaccttgagcgcatccctcacagagggctgagtgtggttggtgttgtgctcgtcgtggcagaggggggtttgttgatgatgttgggggaaagagatgtgatacaaacccgggtctgggaaccatgtggatgcgctgtgaccacggaaacagcaagttaggctagcctacttagaatagtctcccagggccaggcggtgaccatggcgatcctgctagg

SEQ ID NO: 12652 - DNA, 3503 bp, Emericella nidulans
taccaaacacaaaggtggcatggagagactacattggccgtcgaagtccgagtgtcgagagcaacgcgccatcctcaacactggagtacaatgatcactcgcccttctcccgcgatggtcgccgtaagggtgggacaactccccagtatgacgatctatccagccttccaagtcggtcaaaccgagggagctacgatcagagcgttgtttcggatatggaaggtgaattctccacggacgaatctctgccgtcacgattattcagcgtccgcgaagcgacgccgccgtacttggaggccactcggtctggcacgaaacgaagggcatcgtccccaccgcgggagcctataggcaatgacaagcattcgctccacaccacaacaagcaatggcgatctttctcagcggagaaccactgggcaccctttcaccaataacctgtcggtaaacagtggctatactcatagttacgggagtctatcggccgcttcatccgtgagcatgcggactactgcctcatattcgtccgccgccccctccataggcagcagcattactaccgcatcgacgtacgaccgttcacccacaggactgtcgccaaagtctgatcttgacgcatttcacgaaaaggcaacgatcaacccgggctcgaccgcaagtttatctgctcaattggctgcgcaaattacacaagataacggtcttgactcgtctagttcgaacccttcaagaaagatgtcgttccagacaaatctaaatgtttccaacccatcgacagcgaagattggtggattatatatctgtgattgctgccccaagaagccaaagaaatttgacaagcctgaagagcttcggtgagttcatcttcatgcctttctattattaccccagcctaacaatagcagtgcccatgccttggagaaacaatactcttgtctctactgtaataacaggttcaagaacaagaacgagccgagcgccaccagaactctctccatctccggcgccattcatggtcctgtgccgcgctcccagggtttcaagcagcattccatccatcaccgtcgtcacaatcaggctctagtgcacgttcgcacgatagctgcggttactgcggtgaagagttcccaaattatccccagcccgattgggactcccggtttgagcatctcactgccgtccataaattcggtgaatgtaataactcgaagaagtttttccgtgcggaccactttaggcagcatctcaaacatagccatgcggggactagtggcaaatggactaacatcttggaaaacgcctgcatgaaagaggaggcgcctcctgagcctatcaatgcgccgccgaaataagaacaccagtcatattatctgggtttgcgcgcattcggcatacatcagaaagtaagaagagcacattgaaatagggccgccttcagcagtccatcctcttgtcctgaaccccacttcctccgcatctgccacgtggaaacgaaaggtcgacagtctaacaggagtaccatgctaggtgctgtggattctatatacacggcatggaatcggagacacgtctcaggaatacatggaaggctccgacaggaatttcccttgaaacagtgacgcgacacgacccatcccctctatatctccttacctttttccctctcccttctctacttacttatttacttatccaaccatccatttgctattttctggagcgcttctctcctcttaagtgacttgacggccaaaaggagtctggtaacatgatagtctgtttcgtttggtttttttcttttctttttttaacttcactattctggcttgggaaaggcaacaatgtcaatgaatgcgcgggggtgtcaggcaaaagtgaagctactgctacagggtatttctggttggttgtattaactgctgggttaggatattatctgttattgggtggttggtagggtagactattgtggtctgttatgcatatagacggatcggacgaagagcttcgaagaacttcgaagaactcttgatatacccagcatacagggaatcaaaagactttaatggcgtactttaattttccgtcgtaattttagactagataagatcaatgacgagcagtaatcatggaaactccgaatgagaaaatcaacgccagcaatgcagtgcagatacacgtgtaccggttatgacttttctgtttgaagccataactttgtacaaatctccaggttcaccaatgtatagtccaagtaaatgtgaaatgagattgtattcaatatcctttaggcccgaagtaggtgagtcaagtctctcactcctcatcaaaccccgcagcccccttcgccaacctcaattccttccctacaagcccaacatccttaaagtaaggactaaacgcggtcaaaagactcttcagtgaagctctaagcgaatcaataatgagctcgacatcaggaaccctccttgcagcagcctgggcagcagggtcatttgacggcggaaacgcagcatctgtccagtgcacatctaactctacatgggcgtaggtgtctagcgtggtgagtgtttcagtgaagaggctgacgatggcagggacgtcggcttggactttgccgtaagggtcctcgttgagggaggcgatgaggaggcgggtgatggactcgatggcatcgattatggaggagagagaggcagtgggggtgccgagcacaatacccgacaaacggcgggcgaagggttggcggataagaaggccgatgggggagcggagaagctgggcgaggaaggggtggatgctctcgggtctggtggatgaagcaccggtgaggagtttgaagtcctgggatgaagagagaagtttttgtttgcgttctgggctgagaacagcagacgaggcgcggtcaaacacgtcgcgggctcgggcgcgggccttgggtgtccagtccggagattctccaagtgatctcaacgtgctactgaatccctcaccgagtctaccgtttgtggtagtggatctcggagaagcggcgaagatgttgccctctttaacaggatcggtgagtcggggcagggtgcgaagggtgggctcggatttggtttcagctggcgatggcttagatttcgcagggcccaacttttgctcatttatccggcttgtgatgccttggattacctccgtggctgattgcataatttgggtccaagcagatccaccttcgcggtcgatgtcgttgaatatcgcctttcgtcggtcagggaactgctggctaatgaagcacaattcccaaaaggcaaacgcgcgaacagtttccttcttcgctttcaaaccgttcagcaagcttccggttgggtctttggcccccgaggtcaatggctggccccgcttcacaggttcctggcttagaaacatagaaaagaacaggttggtggtctgccaacatagaaccaggagtgcgccagagaaaattgtccgcgcaatcaggggtggcttgacaggaag

SEQ ID NO: 12653 - DNA, 719 bp, Emericella nidulans
ctaggtcggtcctgaggctcttgtagttgattccctgatgaatagccacctaattttgtctctacggccacgctcctagaggtgcttttgttggaatagcggaccaacatgctcgcactatgggtgacttgccaaagcgaccctgccgctgcgagggtgacatacctagagaactagactacacatggagcctctaaacggtaatgcctacgcgaattgatatagctctctactggaagcctcgacgaagcgctagaataaggaccagctggactccagcggatttgaaaatgcacgcttgctcgatagtggtctaaactagctccttgggatccaccaatgagcatgctggcaagcgcacgtatctcagtgctgaggtggcagcgtattagggacggatgaggaccaagaaaacgggttatcggtgccgcgctctgactgaaggagactccaccgacgaccatggctaaggcccccttcgtcgggaatagtcacgcgaatgcgagatagcaaccgagggggtggcagccagtggccgagcgtgatccaaggatccgtgctactgactccagcagcggggcaccgacttgctgcttgctcgtgagcatggcgacagggctgacaacagcaaaccaggatcgttgtatgcccccgcggttcttcatcattgaggaggccagtagctatgccctctcaagatattccgctttacatggaag

SEQ ID NO: 12654 - DNA, 1009 bp, Emericella nidulans
gcgagaaacatcgatcagttttgacttgaatcgcgaattgggagaggtacgctaccagatatatagctcagaaacttgacgcaggaacgaggggcaagcatggaaacccagtgatattgccctccagaggttggagccctaagtggcgagtttagtcttctccgtccacaatacgcaggggacacccatacatcgatgccaattccgataaaaccacaaagacgcaggctgtgcctagccaaacgaagaggaaaccatagacagctccagcaggaccgccacttttgcattgtcagtgagacatcttttcaaagagagacggaagggctaacttggtcaatggctgaaggaataagctgcgacaattagtcaattattttttcttttttgagctatcagatagtcgtcaagggcttcgagacataccaagtaaaaccctcccaagtgacgagaatcgtacagctgaaaccgagcatagagagcatgccaaagttccgctaaaacatgttgtcagcgataaataatcagcgagcgaccatcttattctgacccgtaaaacctgcttcttccctaacctcgcaagatgcacatcatcagaagtcttttctcttcccgatccattgagttcgcgggggtcggcgtgtaggcccttcatctcgcgcgctgacattgcgagagtaagcactgtgaattcgcagaccgaacgccagataagtgacaatccaggggccaaaaaattcaacgcgcgtgccggttgcacagttttggcgcaaacagggatttaaaagagcaagctggcagaggagagataaacctccgtcgtttagagaccaactaacgggggccattaattacatcccctcattcgaggcgagggagaatagattaacggccgtttcaacccgaatcctcgcccatagaaagaaggaactttggccacgattgcgaagcgagtccgcgcgcaacgtcgcattcgctggccgtagagcattcgatccctgatcgtgcc

SEQ ID NO: 12655 - DNA, 551 bp, Emericella nidulans
ctgggacttcttctgtggtaactcgacacccagactattcttctcatagctcgaaagttgacaggaagactggtatgaatacaacgcaagttttgctaatgtcagcgcatgacttgcgcgtaaaggatgtgcttcatagggataaacttggggatcaatgcgagtgaccctgagtgcggagttgaagaaggcttggtcgaattttcctgtggagatatcagagacaatcttttcgtctaggattgagatgaagggttgtttggtttttggcaggtcgtgcgagacagatgatttggtgacatctacaagtttctgctcatccgtgacgcaggagctagcccgagactcttctaggagcgcataggcttctcttgcagcagcgcctgcttcgccagttggctctgggtccttcgcgcataagcacttcgcgcaattgcaggtgaaaaagtatctctcctgcagctctttctgccggatacgggttggatatgtggtgtcaatgtaggatatgaagatctgctcgcctgtggcaattgggcggattgctttca

SEQ ID NO: 12656 - DNA, 1594 bp, Emericella nidulans
tgcggcatgccattgtcggtccgcgggttcgcacatccgggcttagggtgttggccgcgattaactcccctctcgcggattccactcagcgaagcactcccgctgacgtagcgcaaccaagaataccagggtgaattaacccgccgaaccgcacatgggggatgtgtctagaggagcaaaacatgccctcaaagtcccagatagcttttgcactgcgcacgtcaggtacgaacacaagattgcaagataaccactcacggctctgggtagatctcatcaagaaacccgccgccattctcccgcgcgaagacacccgtgaatccccacggttgatcctcaaagggctggacatcctgaatctcgacgagaaggacatctccaggctcggctgtttcaatgtcgaacgggccggagaggtagtggatctgtgttaggtcgacgttcttaatgtcgtctgcggagtcgtcgttcttgatttgtccgccggtccagtccaggcattcaatcttgacgacttcgttgttggcgattgtgccgtagctagggacttgaagtttgtcagatttgttgcgtagaatggaaagtagattggagacgcatactatctggatgccatcgattctatagcagtggttagtggagtgtggagagaaaggcgtgcaatacatacatggaggcccttttgttcacgggctggtttgttcaggtctaccttgacagcagtgcgaatagccttggtacccatgatgaatgttttgaaggcagtgtaggatcgcgagtgaagacaggtataacataagtataagtactgataggtgacccctctccactgcagtttcccctccttccgtaccaatcattgctcgatatccgtacgcttatcggttactaccaggtcgcttatctgcggcatttgctttaaatcccgagaaaaaaaaagttggattaagagatggggcaggatctgattctatggacagtatcagattaagcgaatttccggccaggagttgcgggcttcggagagggttgctcgtgcgctgccacattgagcttatcaatgttgtctagggacagcctcaagaagtcgtgcttattcttccaagtaacctgtgtctctgcaaaaccctcactctccgcggggctgggtggggggtcggtgattttggttataagatacgccgttgaggcctcggctatgccatacatgagtactccaatgattgggatcttcaagacaaacgtaaatgcgaaagcgaaaccgaagaggaccccttcacggtccttgaaccaacggcttttttgctccgaggtgaacgggatacgggagaagtacggctcgagctgttgcaatgttagtgagtcacgctaccccggtgaggattaccaaacgtaccaattctcgcatcaaactgcgagaagcaaaatagctgtgcaaaaaggttaccaggtatcgctttgggagcagaataccagtcccaaagatgacggctgctggcgtggttccgacggctctgtggaaggtatagaacgaggctgccggcatcacgaagcggcccacaacaggcacaagcgaaacgaggtagatcccaag

SEQ ID NO: 12657 - DNA, 111 bp, Emericella nidulans
gcatatgatctaagatgcttgcggtggcataatgtatagtatagtgtgtagatgagatgattcatttagataagcatgtgtctaccgtatctagagctataatctggattc

SEQ ID NO: 12658 - DNA, 332 bp, Emericella nidulans
ttactcttcttatacatatttttcatatacattcatttaactcgcccatatttcttcgcacatcatatctcagcttcgagctccttcgtttcattatttggagcgcctcttatgcacatccatggcggctatctgataccttctcttccttattaggctagacgcactttttaaagctacgtcactgtttatattccaacttatctatagcttcagctgcttactcttagatacataaactgcatacatactatcaatcgtacgcacttctctatcatattctttgatattaagctccgtccagattataagcagaattcaagagcgactcg

SEQ ID NO: 12659 - DNA, 456 bp, Emericella nidulans
tttattcaatcaccgtttcccccttggcttagttatccctgaaatcatccaacgtcggcctttactacttctctccttcgcactctcctctttgtcttctgtccatgtccgtctgatagtcctaacgtcatactatgattcccgcattgttctgccgcattatcagaatgggacttcgcaaccgccactactgctaagcttcctagcgagtttttacatcttgacttctagttgacaggctgcgatacggatcgtggatcgttctgcggtcggaccggatttcatcgtctgtacggacggagggttatgcctctgtgtcgttaggacctagtgacgccgctcttgcttgcaccaatcgtttcgaagagtctacctatctacgatacagcgaaccgaaaatggagggtgtcgagactgttgatgtgagctggctccatcattctcagaaaggtacat

SEQ ID NO: 12660 - DNA, 371 bp, Emericella nidulans
  unsure (1)..(371): unsure at all n locations
acctaaattagaatatattaaacctatacctaataaaataaaacaagaagataaaccacctaataagaagtaagttaaactagctgaagttgatgannnnnnnnnnnnnnnnnnnnnnnnnnnnnnnnnnnnnnnnnnnnnnnnnnnnnnnnnnnnnnnnnnnnnnnnnnnnnnnnnnnnnnnnnnnnnnnnnnnnnnnnnnnnnnnnnnnnnnnnnnnnnnnnnnnnnnnnnnnnnnnnnnnnnnnnnnnnnnnnnnnnnnnnnnnnnnnnnnnnnnnnnnnnnnnnnnnnnnnnnnnnnnnnnnnnnnnnnnnnnnnnnnnnnnnnnnnnnnnnnnnnnnnnnnnnnnnnnnnattctaggataaaatc

SEQ ID NO: 12661 - DNA, 411 bp, Emericella nidulans
ccggcgaactcttggcagggcgcggaggaacttcagggccttttgttacgccaccgcggctgcaccacatgccggcgcctggatcgtaacgggcttgcgttgccacacacggtgcacgagggcgcctcggacacggaacgtctgtctgcctactggtcgactaaccccagtacagctgccgatgacatgcaacctatacccactttaatgctgatagacggcaatagagtctgggcttctaccaccaagaactgcactagggcccggtcgtccggggatgacccggacaggtaccagaaggagggccacacttgcctatctggggcagccgtacccttaccgcgacggatatgcatgtgtaacacgctggagacgcatgcactttaaggggtagtggatatcatccgagag

SEQ ID NO: 12662 - DNA, 129 bp, Emericella nidulans
gacgtgctctggtacggtttagagacgtgatatgcagcaggctctccccgtctacgtgattgaaagcatacccaaagtttaagtgaccactataccaagatagctgtggcggcaatgactcaatcatga

SEQ ID NO: 12663 - DNA, 621 bp, Emericella nidulans
  unsure (1)..(621): unsure at all n locations
gcggatagatctagtggaatcccccgggcgtgcggtgggggcgggaaatgccacatgaaccatcaacggctctttggctaccgagcacatgagtaattatgattaacctgagcgctacaacgggctttttacataaacagaataactacacccgtcctgaggcatatgctactagcatcgatttgctctaggactaccacaaatatccacatggatacggactaacatgggaacaattactgttttaatgagccattccaatcatcacagacactatagcttatgcttagaatgcatgggttcacacattgagacaatgaaacaactacaggcagagtcagccatagacctacatactagaggacttaaccaaactgcgctgactgtacccatgactcttcccaccataaagccttctaagcgtcctaatgcacatacatgtttactctccactgcgaaagacgagataacaccgttgcagggattacaagaatataccggtaggggactagcactgttcatgtgctcgcagtgtaagtgcaccaggtgcattccattactcatgatacgttcgcttcacagcgagcgaacatctgtngtattcaggcctagtacgaatga

SEQ ID NO: 12664 - DNA, 451 bp, Emericella nidulans
gatatattttctatgctcctgtccaagatccgatgtgacactatcacgctgcgcgtgtgttaagatttacgctagcagcgactaccacctccctggtgcctggtggatttactacatggtcaagcatgattcggtacatatgatgccgtccaagtgactgcatgtactattctatgcgctcttcaacgtagcgatactcatgttcaggcgcaccatcaatcgtctataattccatggaggcagacgcgtaatcccgctagtctgtctaccatgtgtactgcatgtcagcgcgttctagtctgttgacagcgtatctgcactgccttcattgctagatcaccgctgtttaccctgattatgaagtactgactagaccttgaactgttgctgactgttccatcaagaggaaacctacattcgcagagtgtaacagcgtatcgactttaccata

SEQ ID NO: 12665 - DNA, 297 bp, Emericella nidulans
gcccaatccggagctctgtcggattctgattccccctcccctcatttagggcactagaccgatctcgtgttgtgaaacccgaacacggcgggggttgagatggaacgaccggatgcttatgtggccgacgcaccatacactgacaccatacattatcggacattgactatgcataactgtgagcactggttcggctcgctccagacacatatagaggtgtatagaaaagatcaagctaggataacaggcctctaaggatgctaagtatgcggatcttgcaatcggtctgagtttctt

SEQ ID NO: 12666 - DNA, 207 bp, Emericella nidulans
gaaaagtcggacgagcccactgtcgcgcaatatgaggtgcttgctcagggcgttttgagcctgataaacgacaagtactgacggtgcattatggctgctggaagccggggcgggctctaacgcaggacggccgtgctctgaccggccgactcggtcgaggcacgcgcggtatacaaactgcaggctctcgacgtagtccgtgggctg

SEQ ID NO: 12667 - DNA, 203 bp, Emericella nidulans
ccggaggcccagagaaggagcaacttagcaagacgaagaggttgttacaggcgagaggaccagcgaacaacggggggatatagaaggagagcggacgagcaaccacccaaacaccaggaaacaggccagcccaggaaacctgggacgatgaactagagcaaaaccaagacaacaaaaaacagaagaaacgccacctcacagac

SEQ ID NO: 12668 - DNA, 192 bp, Emericella nidulans
ggacaagtcagggctaacttaaagcggtcccaagggttttttttagcaaaggacgagcgcggaacaggggggaattttagcggaagggcccggaaccaagcgacccccaattaagacgcccacactagtgagccttgagcgctggactctagcacgtcagacgcagacacaaccatcggactggacaccaca

SEQ ID NO: 12669 - DNA, 145 bp, Emericella nidulans
actgaagcaatactaggtactagtagagtgtaggctttcgaaaggacgcttcagaatggagtctctgcatggtgaagcgagaagactcggaataggcggtgtcattagaggagtgagagctgatggtctgcgatcctgactccgg

SEQ ID NO: 12670 - DNA, 193 bp, Emericella nidulans
gcacgcgcagaggagagcgaactaaacaagatggccagggagtttttgacccaagaaccagagcgaaaccgggggggatacaagcagaggggagcggaagcgacccaaaaaaaaggaagcaggccgaaccagaaagcaaaggagaaagaggaacaagtacaacaaagtaccgcaagaaccacaagagaaccca

SEQ ID NO: 12671 - DNA, 101 bp, Emericella nidulans
ttcaggttttgcacgagctcgtcaagttgagatctgatgtcgtgtacaaaccggccctagaatacgtacgtctcctttcccccagcttccacacaacatga

SEQ ID NO: 12672 - DNA, 1862 bp, Emericella nidulans
aaatgacaggaacattgtggcgcacatttgacctgcaggagttatgccaggtcatggagcagaggcaagaggctattcaagatcctgaatgtctcggaaattatggaaaggctggaagatgcacacagtgacccagccttgtccccaaaacaaaggttgaatacgatggcaaagccactagcaagtaaaaactggtcacgctgcttctgattgctcggcgtgtagtgttgataatgaaacgaccataaatacacctcgtattgctgtgctggagccgcaatatcgtcgtctttgaccaaccacagacgagagatcgtcgcgaaaaaatgctgggatacgaggaccctcgctgaggcttgcatgcgctgagagtttaccagaggcccccttgagggtacaaatgggggttctcaatgtaccagagtcattcagtcccttttgtccctcttgactgcgttttgcttgccgtttcttcgctgccatcgctgtctctgaagtagcccaccatgtcctccttttcgctggacgactacctcgacgacctgtcggactacggcttcgattactccgactttggtcttgacgatgaggacttcgactactccgactacctgaacgatgatgacttcgactactccgactatggcctcgacgacgaagactttgattttgactactccgactatctcccctcatcgaccagctcggcttcataccctacctcgaccagctacgattggctgtccggtggtgacagcggtgatgatggcgacatcacgacccccagctcatctgactacgacatgaacctggacgggacccctcctaacggagagggcagcaccaacggcctgccctcaagcttgggcggcgcgttcgggtctgacttctccaaccagcaggtcagcgactcgtgcgtctcggaggtcgcattcaagaccacagcgccaaaggtagatctcgcatttgacgtgatcttccttgttctctttatcgcactcgctgtctttactgtaatccgcctcttcaagatcaagaggaacggtggcggcatggtgaattgggttctgtttccgatctctctattcttcactatcctgtaaggccctatttcagagtcaaaaagaggaacatgactgatttatacggtataggtacctcttcctcgacacgataactctcatcctctcagaatgcgtcatgatgcgcggcgacaaatactgggatgcccaaacagctgttcagtggttcagcaggctcgccatcttcctgctgattgtcatcatcatgctccccatctgccgcaagctccaacaaggaggcggcatattcgccactctgaccctggttcttcactctctctggatagccctcacaggcatcttcctcatcgtcagcctagcactcaccacccgcgtccgtgtcggcgaccgagacggcttcaaattggaaaaggcctccaatggcgtgacaatggcgtactccgttttcttgtttattgctgcgttgctggccctggtgaacatgggcattgcgctagtgaagaaggcgaatcttcggaagggagtatgtttcctcccctcttttggacaataaaccatagtacatgagctaatccgcttcgcgctacagcttaccctcattaccattccagttctcgccctctcaaccttgatccttaccctgattctgatgggcgggttcgcggacaatgtctacggtagtaagaaccgctccgccaaatacttccaacaatctggtgatgcacagaccttcctcgcgagactttatatatgccgtttctttcgtcagtgcacttttcgttgccggtgcgaataccgcaaatgatgacactgcccaat

SEQ ID NO: 12673 - DNA, 197 bp, Emericella nidulans
  unsure (1)..(197): unsure at all n locations
cacgcagcanccgagcgtctggacatgaaaaagaaaatgatttgagcaacacacgcagcaaaacaccgggggaatacaaaaggccgagagccaaagacgccccacgcacagaacaaggagaccgacccgccacggagcaggccagcaaaaaggcaaagacaaaccaccaaggagccagaacgcaagacgccacagac

SEQ ID NO: 12674 - DNA, 574 bp, Emericella nidulans
  unsure (1)..(574): unsure at all n locations
aaaatggaccaaacagaacagattatacgggaaaacgggggagggaggggggagggggaggggcccataccgtgatttgcgtatttactgcccgctagccgctcagtgtgctgtatgctaaattgttgttgtttaccggtcccgtacggtgttgcttgtacttgtttaaggcgatgccccaggataccgtatgtattattatcgttgccgtgaagggggcgagggggangacagcatacccccgggtagttagcgggccgttaccgtgccgngtgatcaagaggttgcgagttggccgccagattagtttggttgcacgtgtgctttaaaccacgtgacccaggataccagcncgacgtttaggtagtttttacgttaaaaccggtgggaaagggagtggtagggggtgtaggccgtcgtacgcgtgtgaaatggtatacgttgccgtttttggaaacccagccgtactttgggccgcaacgtttgggaatgttctgctagcttctacgttgcgcgctgtgtgcttgcatgttttggacttgcgcggcatagccccgctatgtacagctttatg

SEQ ID NO: 12675 - DNA, 564 bp, Emericella nidulans
agcattgtgacatcagcatctcgcaaaagacccagccggtagcgcagtcccagtcacacagccagctctacctgcgaaagaaaggggtgaacagaatcaaggtcaaagccaaagccaaaacgcgcaagaaccgcgtgcctgtcactgatttcggatgagacggggctggatctggacgacttgaccggcgaagtgtcctttgcggacttgggcgtggattctctcatgtcactggcgctatcggccaagatacgcgcagagttaggaattgacgttcagtcgtccatcttcctggagtgtcctactgtacaggacttagtgacgtggttgagcaagtgataggattctacctaaccatagaaatatcatgctgttatattgcgagaaagctctgcaggagtagtgtaggacatgcaattctacaggggtgagatccgtctatcaatggaataacacggatgcccaatgcagcaaaagagtgacctagcaacctgttgtttcgtcgcgctcaagtacagtctgcttcgtgaagtacacaagacgcccaaagaacttatattgtgg

SEQ ID NO: 12676 - DNA, 192 bp, Emericella nidulans
gggggaggacgacattcgatagtacaatgactttttattttaccgaaccaggaggccaccacggggggattttccggcgtttcgtcatttgcaacgggcacccacagtttcagattccagcgaacttgtcaaagtgtctcgggagaggcagctcccaacgcccacaaccgcccggcacttaccgactaatgt

SEQ ID NO: 12677 - DNA, 196 bp, Emericella nidulans
ccgacagcgagagaggaccagatctataagtcggagagggttatatattcgcaaggggcagagtgaagcaggggggatcttaagaagaatggacggtgaaacactgactcactaacaacgacaccggaccttaggttctagggaggcaccactttctgagaccagttctgcagacaccaacttggccagacagacc

SEQ ID NO: 12678 - DNA, 464 bp, Emericella nidulans
gcgcgccagagggataattagcttagcgggtggccacgtatacactgtgtaatagaggcgcaacctgatgggcgtaaaagtagcagccagttgtaggcaaaatcaactaggtaactagctgttgcgagcataaaaagccgcaacccagttccttaccacacgtgttaccatggataaccatcgccttagtcaaggtcgttagttatgcgcgggtaaccggttcccgagcaaatcttgagcgtacccaacgtggtttcccaatgggttacggtggtgcttgtagccgtgggatataaatatacataaaggttattgcctattgcgggggccatgccgttaacgcgtggttgagatgcgtgtttatcgcggttgcggcaaaaataaccgatggggtatgccgtgctacagtacagtacgtgcccgttacacgggaagccctaatgccataattgacggaattttaa

SEQ ID NO: 12679 - DNA, 187 bp, Emericella nidulans
ggcgcagaggaggacgaacgaaacaagcaggccagggagttttagaggcaaggaacagagcgaaacagggggggactgaaggggagcggaccggaagccgcccaaacacaaggaagcaagccagccaggtaagcaaagggggcgaggaacaagccaggcagggagacacaggaacggaagaccacac

SEQ ID NO: 12680 - DNA, 206 bp, Emericella nidulans
cccgagctacgctaacgagagtatgctctagatgcgcacaaggattatattgggggagggcccagaccgaacaagggggcattattaacggaacaggcttgcaggccttaaaccacaccgagacagttagggatcgaactgtttagaccgagtgaatagacccataacgcaagccagtgcaaggtgacgccaatctaataggacga

SEQ ID NO: 12681 - DNA, 1173 bp, Emericella nidulans
cctaacgttatcaacagtcagtactaattcgcgtagttgctttaccggctccgggcaacagatgcgcaagatcccacacgtacacgacatgtctaccagcagggcgatgatgataattattgagggttaccttatgaattcatggctatctctaaacccattgtctcctgcacgtttctatgttgcatcgctaaccagatatggtggcagatagtcttaacggccatgcccgtacataatgcaaaatatggtgacagaagtctgcaaacatgcccaatgtctgtagctcaaaccagtcggcgtaggttgtgatcagttatattagatagacaaatgaaagaagactactatcgggctcatcctgttattgtaaactcggtctagattcgtagtcttcgtcaagtctcggcaaactgataaaacaccgaacctccgactgcaacgccgaacttcatttcccagtagagctgcagcagtaacaccagccatccctccctacgtcagccctgcgcttctgattattgagctagtggcattccttttcttggcctatgaccagcatgatcaatgaatcgcaaaaggcatagcagaaccgccgattcgcctggtgaagccgtgaaacgaaggaagatagttgcgtacgttgatctacgttctccgggatgaagcctcttactgacatgaagcctgctcgtcaatttagatgcgaaagatgccattctcataagatcaaatgttctggtgaccagccctgtacgaaatgtcgctccgtcggatgtgctgatgagtgccaatacccggcacgcgaccgtcaagtcaaagtcagcgaaaggtagactgtccagtataggcattctgtgtccaggtaggtctaggctaatattgtcaacagttatttagaacaagttctggccgagaatcaacgccttcgagcgcaatcggcctcctcggcaaatacccccgaggcacgtcctggggccgagcccagccactcccgtctttgtgcggacggctcagacgaggttgaaagtgaggacgagggcaacaccggcgtccgaaaccccataattggagaccgggcctggtttcatgcctatgacccctcagcaccgccaatttttgtgggcgaggcggcctgtacggcgttcgcaacccgctttcgcagttcctgac

SEQ ID NO: 12682 - DNA, 201 bp, Emericella nidulans
aggcgcaagcgaaggataatcttgttaggctcgcaaggatgttttttttgcaaggaccagagcgaaccagggggggtttttagaagggcggactggctggtgcccacacacagggatgccaaccagactatgaaatcctggggggtagggacttagttctgctaattctctgaggaacgcaggtctagacactgtaagatg

SEQ ID NO: 12683 - DNA, 201 bp, Emericella nidulans
ggagacgcaaacgcgaacaaacccagagcgccccccaggacgttttacaagaacaggccagacaggaggcgggggagccaaaaggaggacagaccacaaggcgccgacccacgcggacagacaacaggcaagaaagaaaagggcccgaaaaacgaagaccgcacacgccaaagaaaacgcaagagaacaccacggcacgac

SEQ ID NO: 12684 - DNA, 197 bp, Emericella nidulans
ttggacgaggtgggggtggcactttcacatagggcgctggctatgattccaccactcaacaaggacaaccggggggtatttggcacgagtgagtggtacaaagatacggacgggatgactgactagaccagtcaggcgagggttgggggagcgaccggacgtgggaattcagaagtcgttcttgtgaccttccaaag

SEQ ID NO: 12685 - DNA, 1570 bp, Emericella nidulans
cgctctctgtccaggtcagcagacaatacttatcctgtcagatttctccaccaatccctaccggctaggtaagaggctaaataggtagattacccaaactagatcgttatcgtaccatctcgactacgtgctgcctgcaactagacctcttaagcagctgcagtgaatgagcatatcctcattggttactagccgaattactcatggcctacgctcgtgaaggaatcacaacacgaaccggataagacgagaagggcgagagaaagagccgctcagagagccccaggtaaacatccgtccttcaccttcagcttgcccaaggattccacctagccagaggaaggcaggtgcggctttggccatgggtttgaccagggccgttgctgacgctgcacgtgggacgagggatgctgaacgagagaggaggaccgggcccgacatattggtgtgcctgcagggtgttgcctaccaaccggttccttcacataggacggagtctactagagaaccctgctacagcgctcgagccctgacacaataggcttatcatctcaggcaagccgtaccgcgcgaaaagtgagctgcatggtgacggacagggaggcaccaacatgtggacggtgcaggggtgcgacgcctgggactcattgacgagatgaggagttgctgaggatgaccgtagctgtctttgtaatatagatactgttagtacggttgaccaatggatgacaagacgagatgttggtaaacacaagcgccaggccaagagtgtagtgcgagcagtcgctattcggaggatttaccccgcttgacgtggacaccacggacttgactctcgctttcatggacaatccttttgaaccttcgagatcaagtcttcgagccgggctggagtgcagttgaaagtgttagcgcgtctttgacgcccatttagagcctagttcacgctcacgcaatgcttcgcatatgtacctttcacgagagatcgggcgaccctctcctcccttttccctgacagtcctgacgacaacaagggaagtctacctcgaccactgttatgttcctgcaatgatcctgcaatctgcgaggatcgaacacggggggcaccatgcgctcgtcccagcctagaaacacccaaaaaggtcgaaagaccgtaaatttaggatgtttcttttatggatatccgccataaatagagctcctttgttcttttttttaggccagaccctgtcgatagtaacgaatagcgaacggtcgcgagtaactagcgaggagaatgtgccgtggctgcaggaagtgtgccttgggctgcgtattcacaccaacgggcgcttaagaaacggtggacccccaccctgactgggtgccgctagcttgatccgggtttcatttgctggtcgaatcaatggattttgctttcttaggacgaggtcagcattatattcccttaaagaaggccgaaagttttttgtatgccttcccttacccagagggagccttcttgggggaggttttatgatccgccctttggcgtccctgcaaattgttggactcccctttaatttctaac

SEQ ID NO: 12686 - DNA, 198 bp, Emericella nidulans
actgtgactatgagagaggaacactccagtctaatacgccacatttttcggacccgctctacagggggcccaggagcattctagaggcaacgtcggatggcccgacataccggataataggatagcaagagaatccccaacacgaaaaccggacccagctgccaacggactccgaatgaagtgagaccctacaagaac

SEQ ID NO: 12687 - DNA, 194 bp, Emericella nidulans
cccgcccgagagcgacgcaccggaaagcgacgccgggccgttttaaccccacggccaacaggcgaccaaggggcagccgaagagacagaaagaacaaacagcccagccccacggaaaacacaagaacgacaaagacgaggcgccgagaaaacacaccggccaaaacggaccggaaccccgcacaacaaagggac

SEQ ID NO: 12688 - DNA, 4344 bp, Emericella nidulans
cgcagatgagtatgtttccgccaacctgtttcgtatgttcccgttcttggcgctgataggtctttcatattaggttcaaagcagaccttgcattaaaacaccgcaaagcggctgccgcgaagaagaaggaagcagagaagcgggaaattgaagcctcgagtcgaaaaaaccttgccggcgtccgtgttgtgcagaagaacctcgtctacgtgattggtctcaaccctacaatacgcgacgaaagccaactgcttcaaactctgcgcggaaaagattacttcggccagtatggggaaattgagaagatcgtcgtcagtaaggctaagcctggcggtaacccgaaccaaggtataggcgtctacgttacgtatgctaagaagagcgatgctgcgacctgcattgctgcggtggatggttcagggaacggtgacaggattctaaggtatgctctacttgtattaatcctagtattgcggtttgctgacatggttagggcgcaatatggaaccactaaatattgctcgtccttcctgcgcaatgagcaatgtcataataggaactgcacatttttgcacgaaacaggcgaagacagcgatagctacagtcgccaagatctttcgtcaatgaattcactcccgagtcaacaacggtcgaacggtaccgccggcccaagctctgccacccctccgtacattgcacggtcttcggcacaaccaatctcgcaaacattacgacgacaaccaagcaaagacgacgctggtgggactgcgcttccatcatctgctagttgggcaaacaaaagattgggcgatcaatcgaacacgacgtgccagcctgacaggtagccaagcttctcaaagcccacgatccgtctcgcgacagttgccacgccctcggacgatactaagcgcgttgaaaaacaacaaacgcaacaagatcgtcctcagactactcagactccctcaccggaggcgccatcatcaagtcctccccggccaccgtcggcacagacccccgccgataaaggcacgccgcttttagataacctgttgaaagctgtcaattctccgtgcttcaaatttattttctccgcggctggtctcccaccagacgaacttgctctcatcgataatcatccgtcgctcatcgacccatacggtggcgtaaaacgtcgcgctatgcgtgagaaggctgagcaggaacgcaccaagcgagaacaggaacttctacagtctgtaccggccgctactgccgaagatgagggtcgtgagagtggcagtctccagctcggtggtgaaccagacgatactaatcctccgcgaggtcgtgcgggtcgcgagtctcatggtgctattcagcccccatcacaacaaggcacaactacaagttcagctgttggctctcccgtgtccgctgctagccatcacttccagggcatcaacctaagtaaccgcagtttgacaccattgcaacagcagcaacttatgcttctcaagtccgctggtaatcaacaggcaggccttgtcgatcccatgcagtcaggggtcggttctaatgcgttggatcatgccgcgcaagctcggcagagcctgctgcaaagccaagctgcccagcttaatgctctccagcaagcccagagaggccagaattcgcggttctcatttgcagacgccaatgccaagaacctggccaatacccggatgctgaaccaagcctcattgatgcagtccggtacacctaatccgcttgccgcccctagtccacagcatagtcttgccagcaattactacaccagtggcgttcaaggacctcctccaggcctgaagacagcgggtactcctcctgttagtggtggcggtatgtttgcacaaggtcacggtttcacatcaaatgtcaatctgttgggtggcaaacaggaagccaaccccgagttaatgcgcgagctgctgcgcggccgcagcggtaccaatgcaagtggtttaccggatcaagatagtaagcgtgagttattatttccttccctcctccagcaccaaactccccctcccctgactcctgtcaatggccttctcagctctgtctatggcgctcaggcggggaatacctccgactctgggtcacagaagcagaggaagaaggggaagaagcaaagaaatgctaacacttcctctgctggaggcggtgtagtacatcttgcagacccgagtatcctgcaggcgaggatgcaccaggtcggtgcgaatgctgttgctggtcaaggactgtatgggagtcagggtcaaggtgggtacgccatgatgtatggcagcggtttcaaccgttggtgattgttgtttccctctgcacctccttggatcacatcttcacgtttcatgttctctgtttaatgatgactaccctttttgcatctggtttacttttgctctggttcgccttcattcttacattctctttgttacgacatgatatcatatctattctagacggctgtggaacatgttttttttcctccacgtacgcgtttaattcgatgtccaaaattttctcctgcaacgttttctaccctgcaatgaagcattagcaacggctctccaaaaacaagagattggggcggggtgtgcgtttggcgtctatgtttatgggatcaagtgtgtcttttctgtttcttctcgaccccaccgcggtccgcgataacgggaggttcattgcattcatggacatggtgttttcccatcatcttgtcttggtggtcgtcacatttgctcgttgcgcagccaagctgggttgagccatcagcatctttgcggccgttggtctgagcatggttttatgtacgttaacctccctggcccggattaaagcaaagctgggttttctacatgaaaccaatttctcacaagaattgttcatatagacgtggcggcatgagtccgcctggccagttcgaccacggtgttttctgtaattatctgcctgccctttcgtatccgaccgctgtctattgtcaatggtcttatttcgtttttctttctgtttcatcagtcataccttggaaacatctattaacagatcgggacttcgtgcactcttactttgacttcgagatgctgaccaaagacttcttagttgacgaggaattcccacttctcggtacgacaccaaaggacaaacgctcggttgacagctttggttccctgatgagatcacagcttatgagtgactctcaaccactgggacgttctgggaccccgagtctcccaccaggcctgcctcttccccaaggccactccatttctgccctgttccaggatcagttcaagtcttcaagcccggtatcatccgtttctggtccaccacccgggctggaggtgccttctccttcattagcagccgcatcccggagctccgaggatgatgcgacggcgctcgcggcgaaaccaaccacggataacaggcagctgcctaacagggccacgagtgctgccgacgtttcgttgggttcccctgtagcgaagtctgccactagagtccgttcccagccaaaagaggaatcaatgcctgctgctgaaaaaaggggcaatcagccaaaacccgcgggtccagcgaaggcaaagtatcttctgctaaggtcaagccgatgaagctggatctgagcttcaatactcctctggcccctgagcctgtccaaaaggctgaacctccctcaatccagctctcagctgcccctgccaccgctgttaattctcgacccaatacgccactaactggcgcctcgcgggtttcggattcaccggcgcctcgtcagcctcgtgtacttcgcgtagtcgacacaccaaaggcagagactccgcctccgatgtctgccactcagtcagtcgcatctttctcattaacaagcaaggtccgctcaagacggccaagtgcttcttctcagagccgctccgatacccctggtgatattgggtccgaggcggatctttatacttctacttcagcttcgcgcgcgaactcccctcccgcatcatcgaggataggttctgcgccagtgaggtctatcaccaaaagccagctcaaaaaagagcggaaacagaaggccaaggaagcagaggccaaaaagcaggagacagcgccggtgactgaggagccggtcatcgctccaatgttggtagaaagcgaaagaccaagaggcccctccgagtcgtctatccttctccggagacgctgcttctccaccagcctacgttgcagttacaatgaacccctgagaagtcggccacgtaaagttcaagcgctgaacgttcaagtaaagcccacatcgaaggcgcgcagtgtgaaaaaaacgaa

SEQ ID NO: 12689 - DNA, 324 bp, Emericella nidulans
cagaactagccgcgagaagagcggtattgccggagagcgggcttacagtatttcggagagctatacatcctggcaggagctgctcacgaaggagagtagtcagttgaatgcaggcatgctgttatcggcagcggtcaactattacagactggttgaccgctcagagattttgagcgctcactactgatatcaagaacgagatctacaaagagattagaaagtgtagttcgtttatgtaagggtgctctatggtatgttgtaacagattagggcatcatcctaggaaacttgagttgtcagttttcgaggtattgtttgtgtaga

SEQ ID NO: 12690 - DNA, 202 bp, Emericella nidulans
  unsure (1)..(202): unsure at all n locations
catcagataatgggttttacattctaggagaatcggatgactattgatgctctagtnnactttacgnttcttagantgtcngtacctctgttggaggctggtgaggtagtgctgngaatgatgggntgttccggtgttcgagtggtcgggctcgtcgtaatgcgttgttgtggtggtcgatgatgcatgatagggtgaaggt

SEQ ID NO: 12691 - DNA, 1251 bp, Emericella nidulans
cttttttttttttttctttttgagcttatattcttttctctctcttccttttcgcccgacctggtgtcctcaatatcgacgaaattacagcttcggtgatatctgttgttgttccgagcttgtcgctgtcagttccagcccagcccccttatcggtgacagcctagcgttcaggaactaatgcgggattgatcggtattcagctaccagaccggactaactagttgtcaacgattcaccgtcaccgatcgaacagaacgagaagacgtttcataaatccttaaggaaggcataaaactagggaaggacgatttccagtgttgtgggctttccgtcctcgattgcgcttgttcaaacgcacgaggctgatcgctaatttcccgtctgcgtgcctgaagaggccgccttggacggtaacgcggcaggtgatctagtggatcagaaacgtaggtatgtgacaactgctagcaaacgggctcccgaacccatcccgggctttccctcagtatcccgtctccgctattgttctgtcgcgtcgaactgcggcagtgtacctgttttgctatgactatgatcattgctggcggtacggactttagctagagctattcacaaaagcgattgctcagaagataatgctgacccaactacagtgtataccattctggtctccgcagattcttcggctatgagcgatcccataacgcaggctctgccacatacccatgccactccagccatgacctcagcggctctgtcttccgcccccagcaatagccgaaaccccgtttatccagatctccttagtgggccacccattccgccgccgaggacatcctcgaaccacagaagccgtgggtccaacaacacagcctctgcatcgtccggagagaggggatcagggtcgcgttacaagggcaagggtgaggagcgcagccgccgtgagaaaaagggcgaggaatctcgctcgcgccatcaggggtccaaatcatctgaggatcagtcaagagggccaagtacttacggccaaagctcccctcaacccgaggacctcatggcgacgatcccgagtcagggcacgttggtgaaagagtcaagcacagtcattaatcagctcttagtgagtgacccggcggttgatattgaacgagaacaagcccgtcaacaagcggtaccggcaccgaatgagaacgcttccacctcgggactaggattgatgagcggcgaaaatctggatgatgggccggcggca

SEQ ID NO: 12692 - DNA, 4360 bp, Emericella nidulans
agctggagagaaaatcgttccggagatctggaccgctaaacccgatgcggaacggagcgtatctttcagattctaaaataatgaaataactcgacaccttaatactataatctgattcggaatggattactgtgtatggctgtaagactatgtaggcagctatgatcaaaatgacccaacatatctctttataacgaataacccactgcagattgagtcaaaagcagccaagcttggatattacatttctgcctcaggcgccgaatgacattgcggctgccttccacggttacttagtctcctctccaattactcactgcccttgacctcgcctccctccctcacctctttcttctgttaacgactcttatgacagaaccatggcttattgatacgagtgtctcacaatgcgctctttccgctcgcttcatctcctgttgctggccgcatctgccataacggctgacgcagttcctgccggatccagcatcactcctccaccaccggttgagcctgtttcgctattgtcatcacattctaacccccaacgaccatggactcgccttcgaaactgggtgatcgaatcgatttgggggatccccaaatcacaaacatcccgccctactgcccatgattattctgctcctctccaaggctccacccgatacggaagtgacgtcgttctccgattccgagtacaaggtctcgatgaggcagaggcgctgacagaggcgaccaacatccttttcctggatgtttgggcatcaacaacggagtttgtcgacattagactcgcgaaggaagttgtacgtgcgaggccagcccctgacggccgcgatgctgaccctctcagataccttccttactcggcttattgcccgactcccttcagactgcctacgtgccccttattgataacctgccggaggctatctctgctacataccccgctcgccggtcccttggactcaatgaccaatttatgcctagcccgtccactcgtgcgcccgatcttttctttgaagactatcagccgttgtcggtcattacaccctggatgcagctgatggcgtccatgttctcttcgcacgcccgaatgattaacgttggcgtctcttacgagggccgtcaaatccccgctctacgactgggacgcagttcccaaccgggcgaatctcgtccaatgattctcatagttggcggaaatcatgcgcgagaatggattagtacgtctactgtcgcgtacattgcgtacaatttgatgactaggtatggatcatctgccgccgtcacgagtttgttacaggactacgattgggtcctggttccaacggtcaatccagatggatacgtttatacttgggattccgaccgtctttggcgcaagaaccgacagccaactagtttccgattctgccctggtattgacttggaccggtcatggtcttttgaatgggacggcaatcagacgcagacgaacccatgctccgagaattatgcgggagaagagccgtttgaaggcgttgaggcacaacagctggcggaatgggcactcaacgaaacagagcataataacgcgcgatttgtcggcttccttgacttccactcctacgcacagcaaatcctctatccgtatacatattcctgctcatcagtcccaccaaccttggaaagcctagaggagctcggcctcggcctggctaaagtcatccggctaacaacacacgagatttacgatgtcacctctgcatgcgaaggtgtcgtaataccggccagtggtgacaagtcggcaaagagcctcttccctgtaggaggtagttctggcggcagcggacttgactggttctatcatcagcttcgaacccgctatgcctaccagatcaagctgcgcgatcgcggcagctacgggttcctcttgccgtctgaatacatagtccccacaggaacggaagcttttaacgccgttctcaaactcggccaatttcttacagaacaggattatcccggaatcagaaacatagattgggaatctgagtatcaggttggcgatgagacgccaacccaagaatccacggcctttactgacgagtctcatgaagaagagggcaaggatgttactgtggatacggatgatgaagatgatgattattatgacaggtgggagccgctgaagtgggaagatcaacgacccctcggcttccgtcgacgtcggtaaaaccacaatgccgatatttttactaaagtagttagtaaaatagctatacatgtttgaataatgatgattaatgattagcaatgaatctgactgtcgagcatgagttgatgctcagtttcctcgatctagtatgtcctgaaggcataaatttgtttgctgagtataggcacggatcacatagaagtagcccagtacctgcatcagcaattgagcactgtaagccacgcgctaaaaaagcataatctagcaaatccgaagacgataaacctgtagaagtccgagaacccgagtatacctatcaggatacgactggaaccatagaaaaaagggaaggagagaactgtctggccgagaatcacgaaagcattccacgcggtggcagttcactcagaagtctagtatgtcgacgaggcaggggtctggaacgataagcctcacaagacctttggttccgatgtggcgcagcctgtccccacaattacaacgtaaagaacatacgggtatgtctacaagagctaatgttactcgggacaacagcatgattttcattgctataccaagatacataggcgtgacccgtaagcatggacatgagctaagcataaacattatgtgtaagacaagacaaaaccgggacaagactagaacagccacgagacaaaagtcttgtagaaccaattggcctgcttgtggttggcgccctgcgcagccctcttcgcctcctgccgcgcaagatacgccgcctcttcacggtcgatagcgtccttgtcagtgtagaggtctgcctcgtggggcagaacacgcttgcaccgggtggtgaacttgtaaccaaagatgaggatgaggtagagggggattccaaggtaagaggtgatgaaggtcttgtagttgaatgtgtcaccagtaaagacgtcgaagctcttggttagggagacgacaatgcaccaaaaaagggcgaaataggagccccagacgccgagaggagcggtgtaggcgagctcgttcttggggatttcttgggctttgcgcgccttgacgaagcagatatgtgtgacgaggagggagatccagctgagcagaccaaattggctgacgaggtcgacgaagtacttgaagacggtcttggagctgctagaaacattcatgtaggcaatgagggcgatgagggtgcagaggcctagagctacgaaggggacgccgcggcggtcggtcttcgtgaggatcttgggggctttcccctccttggcgagaccgtagatggttcgagtggcgatgtagagatccgagttggcggccgagaagacgaaggccaggatgcaggcgttcaggatgtgggggagcgcggggatgccagagagttgaatcgccaggacaaagggggaggcggccgaagaggtgctcgcggagtttgcctgtttgagttctgaactgtcgtaggggaccagtgtgccaacgagcaggacactgatcacgtagaaaaagatgatacggtagaaggtcagcttgatcgcgcgtgggatcgtctttcgtgggttctgagcttcgccgacagtcactccaaccagctctgttccgagataggcaaaggtggcagaaaccagcgtcgcccaaaatgcgtagaagcgtccagcagcggaaccgttaccatcggggcccatgtcaatatacgaattgaacgcgccagggtccttccagtagcggaagcccttgcggtcatggtcgggaccgcctcccagcataaggatgaaggagagcaagatcaggccgactatgacgacgaccttgaaggaggagagccaaaactcgaattctccaaagaagccgacgccaaagtaattgatgaagacgatcaggaccaggaataccgtgatccagactccaggattgactttgtcggcgggcagccagtactgtataaccagcgcagcggctgttaattgattgggcgtgacaataatgtatttaaaccaatatctgcaagatcgctgtcagcagccattgcgcgcgaatcgaatcattggcgacgtacgtataacccaatgcaaaacccaaggcaggatcgcagaagcgaacggcataaccagtgaaaccagaagagcgaggtaaccaagtggccatctctcccagaccacacataacgaggta

SEQ ID NO: 12693 - DNA, 142 bp, Emericella nidulans
  unsure (1)..(142): unsure at all n locations
actacctgcaagccganttcgcttagggctagggagnggggagcacaccgcacaaagttatagggttaatcacgttacgaggaactgctcactctcnttgaagtaacgtaagtcaaatgnttagccgtgacacgggcagggc

SEQ ID NO: 12694 - DNA, 170 bp, Emericella nidulans
  unsure (1)..(170): unsure at all n locations
cacacaccgcctcacacgctcacactcagcctctcgcgctcgcgcgctcacaccgcacgcgcacgcactccacagccacgcccctcgctctcctcccaccgcactctcctccgccacactcccacgcgcttnctccgcctcctcaccgcttcacctctccgcacgccacg

SEQ ID NO: 12695 - DNA, 194 bp, Emericella nidulans
gggaggagcaagcgcggacacactaaaacgggacgcagggattttttggacgcaacggcgagggagacacagggggagtggaaaggggagcggaccacaaacggcccagacacagggacagaaagcaaccgagaaaagaagggggcagggacaccagtccggcaagcccaaagagggacgcaggacaaaacaag

SEQ ID NO: 12696 - DNA, 2540 bp, Emericella nidulans
cgaagttagattgcggccttgtggtagtccaagggtaatatgcctgagccaaagagtgtcgttgttagtttactggttaatatggctaggtcttgctgctcaccaaaggtttcggttagacaggaatctctactcgcgcggtgggctgttggattccagccggagactgggcttctttccgaatccaccccgcatagtctcatgcatgatagacgtggctggtcactgtgaatggttggctcacactggagcagggtgtggagttcgtgtataccgattatgtggtttcaatgtgcactgtcaatgaaaaatgctggttaggacaagcgagtcgatttctaattcgtacgtttggcctgttacaacagctaacaaaacaaaaatactgattctcggctgcaaattattaaattggtcatggatattctgttgctctagtctagaaacccaatagaacagccacagaaagccaataatctgccttttcaggaatatcataggctagactccggtagacagtcctctgagtacattcaagccacccacaacggatcccctgtccccttgatctttttattcgtccttctataatgcaccgttagcgtgagagccaaccctgcagcgatggcgctcgtgaccgcatcagccgcatggcccaagcggtaagccggtgcatcctgggctctgtagatccagacaccgattatctggcctggcccggaaaaggcgatattaagagcaatcgtcaacgaacttgcggtcgtgttgcggacgttatcaccaacccaggcgttgagagagggcggaccggcgaaaacacaggttgtggcgacgacgagaaacaagtagcgtgccttgaattcatctgcaggaagggtagctggaaagagaaataaaaaaaaaaaatgttagccgtgagggtataaggtgggacggtgaagagctgtgcttggaggtcactaagccgagaccttcgatatggtgggagcaaaatgcgacaacgaggccacgccggtgccgcggtcaggtacgtcaagtaatgcatataaagccgtaccgaacagagcgcgtctttggcatcgttccagttgagcttatcctcactgggatatattagtaagtgctctcctttcttaacggtctgtgagccggttgttatacccagagcaatggtatgctcctagtcgacgtgattggagctcctttcttcagggcagagccagccagctttttcagggtagcttggaagaaagaagaacacaaggagtccaagagtaactgcaattactcagccatctggtcgtcagcgtgcggcagatacccactcactgctagggactcctttgagtataaagagccatctccagccttccaggccttgatgaccgttgagatgcccgactccgtatgcgatgaccctaacatataagaatctgagttcctattgcgcactgataacagttcatcgtacccgccgaacgcgcccgatagtgtggcactgcacatataaatagcgatccggatagcgcgctcgctcggcttataccagaagtaaaatagaataacataccagggaacacgcccgcctcggccgccccgagaaagaagcgcagcactgccatttctgtaaaggtgtgcgtgaaaccgataccagtgcacaacgcaccgaacgcaatgacgaggaatccaagccatctgtgcggatggaaggacttgagcgcaagattgctcggcgcctcaaagacaaaatacgccaccaaaagaccatcatcgcgatggtgtactggtgaccagagatgccattggcctccatcagggtgtcgccagtggtcgaattcatgattttgcgttccctaccaacagttaagtctggctatcctcgagcgaaacgacctgcatacccacgttcgacctgtcgagatagcagaacagatagatgaccgctgttggaagaagcaggcgcctatcgatcgcggacaagcctgagtgcagacggaatcagagcggttagggtatagaagactggcttctagaatcgttgtcttgcctcttctctgcttgtaactcctctatgctcaattcttggatatcctctgtatgagttgcctggtgttttccctcgacgtccaatgcgagtttttcgtccattgcaccgcttacagtcatagtgatatcacaaataacaatatttagaacgagaaggtctgagcagcgacagcagggctcgatcagtccgacagtggttgttgagacgggttgagaggcttgcttaactagtagattgcaggccctgcaccatagcaaagactccagtagaggacatgacagctccaaggctcacttcccccgcataccccggactgttagcttcagtttagttttatttagtggaggatcacgccccaatcacgcagcgacaagacgtttgctcgagtcatgggctcgcaaccccgctgatcggcagagatgcattctttgccggttgatcaaccggagcgtccgacggctctaggcagcaggtcacacatcacagcatcttt

SEQ ID NO: 12697 - DNA, 2107 bp, Emericella nidulans
  unsure (1)..(2107): unsure at all n locations
ctagatgtggatgtgttgaggggaagggtgatgaataagggttgattcaggcagaagagatgatgagagaacacctttggtaccatgaattccggcgtattcgagtctgcctcggctggcgagtactggtcgaaactggccaacgtctgattcgctcactggtcgatagcggaccttaagagggcgaacaatccgccgacgcatgagctcgccgcaatctctcagtggcacgcggtgatctatgttcaatgagctcgcttcccccattttcgagttgaacattaaggcctgcgatgagctgagtggctggggagtttacatcgcacggaagccgatctcccctacgctaaatctgaccacttcgcagaattgtccttcagcgaacgacgcggcacctggcagtaatgaccatcggagtcgccgagttggtatttgaagacctgaagccaattatggactgcgctagagtagggcatatgtacagcggggtagccaacgtctccatctgcggctctatttgaaacaagtatttggaatattcgccggtagaaactattcatttgtaagccatctatgtggttaatgggtttagagatcgtgttccaacgatgacacagcaacccgtcttaagccggctgagtagtctcaatctttaactttcctctaaaaaaaaaaatataaataaataaataaataaataaaaataactggagggccgttttattcagaatagtcaacctagtagtattcggatggtttccctccaaatatcgcgtacacgcatacgtagtcctgtcatacagtcgcccatcaatcgaacggcgtaagaagcaataggcatgtgatcttatctaacgtcttagacctatgaagtcatactaggccgcgtgaatttggaatgccaacagtccaaagtctcgactagccagctgacaaactgcacgcattgatttatagagtatcgctataatccccagaagttatgcaaatcggaccacgggcccgaagcatccggttgcatgcgcgcccctcacaacttttaggctccttccggatttctcgctccttccgcgaacctcggaggcggggcgggtgtcactttcatccatgccgttcacatattgtggcttagttccacgattactcagtttcagatctagttcctcttcgaccagacaagtcaggctacgaattccgatacaaaagacgactgcttcccccggtcggattagtggtgcacaatttcatcatcattcgcgtcgcgcacgagtgcctgcattcttcacttcccctcacatcgaactcttctccaacgtcaacaacctcatctcagaccttcacaatcgactgcgcgatacagattcagcaccatggcttctgctactacattttatgacttcgagcctgttgacagtaggtcctcacccgtctcttttgtgtaccccgctctctttcacctccgccagacaaacactaacctccactctccaatagagaaaggcgaagcttatcccctcaaccagctaaagggcaaagttatccttgtcgtcaacaccgcgtcgaaatgcggtttcacgcctcaattcaaaggcctcgagaccctttaccagtccatcaaagccaagcgccccgatgacttcgttatccttggtttcccctgcaaccagtttggcggtcaggacccgggctccaacgaccagattcaggaattctgtcaattgaactacggcgttaccttccccgttctcggcaagacggaggtcaacggagataatgcgaaccctctttggacttggctgaaagagagccagcctggtctgttggggttgaagaggataaagtggaactttgagaaattcctgatttccgcggatggcaaggttgttgggaggtgggctagtaccaccaagcctgacggattggagagcacgattttagaggagattgagaaggccgatacgcaagggcttctgggctttaaggctatgcagcccgaagctgtaggtacggactgngagactgccatgctggcgtaatttatacattgctctttcaaggatcatgatcccagagcctaactgcttgcgacaccggaatccgctgcaag

SEQ ID NO: 12698 - DNA, 198 bp, Emericella nidulans
agtaaacgctgagaatcgacaataaatgttgtggcggggcatttcttgttcgggactaacgcgcaaggatggccgcatacttggaattcagccgaggaatcagtgacgctgacgtaccatacgtgatggggatactagaagtatgtaggacagtacacgcttgaagctccaacaacgaactgaacgacatgctatgga

SEQ ID NO: 12699 - DNA, 119 bp, Emericella nidulans
aacacaaacaacataaacaacatacaaaacataatacacacagacacagaacatagcataacaacagacacacacaatacaacagaacaagataaacacacatataacaacaagaacac

SEQ ID NO: 12700 - DNA, 196 bp, Emericella nidulans
  unsure (1)..(196): unsure at all n locations
aaaaccgnnaacagaaatatgtggcccactagtttctatactcacggaaacccacgctaacccagggtaaaactggcactgaaattaataagtcatgaggcaatcccgcatccccgacgatcactaactcagaggacacccgccctggccactgtgttcttcagacaatcttaaaggggctgcttccatccatctc

SEQ ID NO: 12701 - DNA, 193 bp, Emericella nidulans
caaacgagcgcggacacagtttgaggacaggcgcaggttttttgcacaaaacgccgagggacacacagggggcggcttaagcaacgcataccagaaaaggcccagaggcagggacgacaccagagcaagaaagggacgaggaaaaggcaccaccagaggcagaagacagaggacaagagcgccacaccccggg

SEQ ID NO: 12702 - DNA, 195 bp, Emericella nidulans
acctaagtacggggaattctatttatacctaagcaacatcatctgtgaatactccctcaagcgcgtggcacgggcggttgtccacgaagcggggcggttcgtccaggaacattttgcggactttcacgagaccaacccggtccttcggtacacaaatctaggttcttcgaacgagcggtactgggccaacttgcc

SEQ ID NO: 12703 - DNA, 197 bp, Emericella nidulans
ccagggcggcgatgatcacatacgcagtatacagactcattactggttgcgacgacccccaaaggagtgacggggtggatttgaggtcggacaaccgccacgcccggatactgcaaagctgccaggtagccgacaccaggggacacgcaacaagtgctatgatcagctaaaagccactcttacactgtcagcgatgc

SEQ ID NO: 12704 - DNA, 2334 bp, Emericella nidulans
tggatggagtcataatttatgtgactgctcaagcattgggacgtgccttcttggcattgcatgcccttgcattctgtatggcagaacacagcaccgtctatccaggaggtcgagaaaagaggacccgacgaacatgctcggttacgagacatgcaatgggtcctgtaccgccatggccttgttatgtggttgccaatgtgagctgaagccctaaattcaaagtaaattcaaagcgtcgcaagataaactaacatgtattagggcttcttgcggccatccaacactctcgaacccgcaaggcatatgccattcagggtagtattgcgtccgactgcgttcgcgctacctgttgtacatgctgtacactcatccaggacgagaaagagatcagaaagagggaggaagagagggcgaacgcatccagagctgccggggccgcactggtatctccgtatctagccccggggccgatgtcgtacggtccaccccagaagtgacggtcttcagtcctttccaacaaatggcgtgccgacctggtcgaaattatgttttcttttgagcgagttgatgctggatacccctatgacgagattgtgctttctgcggagctttcttaaccaacctcatgtgtataccgtcatttgtactatcaaatacatcagcaggaggaatatatggctgatgctttaatgtagagttcccaatgccatagagttttctatgtgcagcctacaacagtctgtaagagactgctttgattcggtgcatggcctgggtcttgcttctgtacctccaccaggaccggcgtgcaggcagtaccttgctcacaggcggggaacatttgaccatcagcaatgccggtttccatccatttttagcactataatcaagtgacatttctgtggaaaagagaattcgagaaatggcgggcggtgagaacggcgagttctggaccatgtccttcttggccagtccagcttactgttctgtggcgcaactccagaaggcttcttttactttcgctcctcaaactccactacagacggatcaacggacgagatcaccagcgcatgtaatctgcatctcagagctcacctttactccagtccctcttctgcctgttatttctatcgcctgtcccctgcatattcatcgcactccccgtcagattcgacgtgaaatcgtgtcttacccatctgactcctcgccgatcgacgggttccgaccgtctgcctattgatcgaccgctgcccctaaacgaccgatcggcgcagcagtgatgaagaactgagcaaaaggaatcgaggactgtcccatgtattcagtattgatgcttgcgatacaaatgttttcacggcgtgcatgagctgagctgcttcggtcgtgacgtgaagtgtgtttcacatcggtagaatataaccatggaggatgacggccgccttgctccccgtcagatatgggcccggccgacgagtactaccacaagatcctatgtacctgggtgtactgctttcctgcttcctagcgatggtatgttgcgcggatttcagctgcgtcgtccgcggcgccctgttcatcaaggtagactaacgtattgactgcttcgcgtctaggttatgtatatctaaaccgcacctactcaatatccctcggagaaaatgccatttacgaccccgcgtgcacgagtacgccgacgacgaccgaacatgcgggtgcggcactagacattcacgacccgttctacgcgtccgtgacaccgctgttgtatgcaatgggctgtgccactgtcgttagctacctgcttgtcatcattctacttattacgcctcgtacattttatgttggtggccctggaggcggcgccaatttcctcggtcgacatgggatggtcagcgggtcctacagcaataattcgtcggtcgtgggtgttggtggacgtccgtggctacagaaggtcgccgcgcttcttgtcgccatatctctgactatagcgaccgcagattcgtttcgggtggcagaaaaacagtatgatcatggctactccgacgccgaggcgttgacgtcggaggtcattgatggcaccgagatcaaggtagttcggatcatctcgagcacctttctatggctggctcaggtgcagacacttattcggcttttcccgcgacataaagaaaaggttatgatcaagtgggcgggttttgcgctgattgtcctggatactatttttgcgattctggacaagtttctggtcaagacgaatactacccggccacgactttatgaagatgctattccggctctcagccatcatgttagaacttgaacacatcgttc

SEQ ID NO: 12705 - DNA, 243 bp, Emericella nidulans
ccttcatctctgacattaggaaggcggttggatctccgcttctgttatgccgcctcgggcgtaatataacgttgagtggcgggacgcacacgacttagcacgccgcgagtttgcttcgtgccatcacgtgcgtggttgatgctgacggggatggtctgtcgtgcccggccaggatctccacggaggtgtgtagtcgctctctgtgggcgtaaagcgtgaccgccatcggggtcgtctttcgac

SEQ ID NO: 12706 - DNA, 2167 bp, Emericella nidulans
aatgtggtaagcaatacttatgcaatttgccgatggtgttactgatatagcccagacttgtcgctcaatattccaactgtatctaaccgccattttctggtgttccctgaaaaccgtaggggcgatacagtagctatcctcgaggatttgtccagtaacggcacgtttatcaatgatgcaattgttggccgaaacaaacatcgcgaactggaagatggtgacgaggtgaccgtattggacgaggtgcggttcgtttttagagcaccccggacaaagaatattagcggatttcggcagcagtatcgagtcttgcaacaacttggaaagggacactttgcaacggtctacctttgcgtagaacgcactactggggcaaagtttgcggtaaaagtatttgagaaacgagctgactccaagtctcaaaacgacgcgttgatgcaagaaatcggcctcctgatgagcgttagccatccaaatttgctctgcctcaaggacacatttgatgaaagtgatggggtatatctcgtgctagaacttgctccggaaggggagcttttcaatatgatcatacgcaaacagaagtttacggaaaaagagactcgccacatcttccgtcaactcttcgaaggcctgaaatatctggtatgccccgtcccttacatgggttgttcatactatgattctaacgtagacagcatgaccgtggaattgtccaccgagatatcaaaccggagaacatattagttgccgacaacaaattgaccgtaaaattgggagatttcgggctggccaagataattggtgaggactcattcacgactacgctgtatgttctcccgaaagtataattgaagtacaaataactgaccaaatactacgtccagatgtggcacaccaagttgtaagtacttacgagttcattgtgaatgatgctcattctccagatgttgctcccgagatactccaagaatctcgccgtcgaaaatacaccaaagctgtcgatatctggtcacttggtgtcgtcctctacatatgcctctgtggctttccccctttctctgatgaactctatacgccagagaatccttacacactggcccaacaaatcaagctagggcgctttgactacccatcaccgtactgggattctgtgggagatcccgccttggatcttatagacaggatgcttacagtcgacgtcgataaaagaatcactgtcgatgaatgtcttcaacatccatggctcacaggcgagctcccaagcgtgaccgatagcacagacggtctcacgggtgcgttgggaaacttggacttctccaaaaggaaaattgcccgggagagaactctcctcagcggtatcaatgatgtacgttccagccagcaaaagacgggagacggagcctccgttaaagtttaccataagaacattgctggtcaacgtatgcataaccagagggctactcgccagcatgagttcccgaacaagaatagtggacccaaagattttgttaatcttggggagtgcggagatccggtattatttgaagaggaaccgacaagccgccacaattgagctttatgggttgatttaaaaggtcaatcgcgattatctggttttgtgacagagggtaatagttgaaatggcacatttattctaaatagcaccaactgtcaactttagagctgcttttcttataactacttttccttttgtaactacgtgcttgattaagatgaacggaaaggcaacgagagcaattcagtgggttactgcatgccatgattctatacgcaaagccttcagagaataaatatggtactgcagtgatcggtgatggtagtgatcggttcagtctataatactctagcgtgtgtatgtctcagagtctggcaatgttatgaagatcagggcccattcggaagcaaagggtacatctatctaacatccgataactgcttcgctgagagtttgtaccgcttaaacttcattattatctctatttcttcatacaaacaccatagaacttctctattttgagacgcgactcctcccaagtgacgccattgcgtcataaaggacgtctttgaaggcaaacaagaaagcggcagttattgcactttgggtgactttaggcccgattcctgtaaaagaataaacaacgcattc

SEQ ID NO: 12707 - DNA, 244 bp, Emericella nidulans
cttaacaggaggccacagacgaacgtctcgcaacgcgagcaccggaacactcgccaggagacactcaccgatagcggcaatgccgaccagccacatgaacaccgtcgacgtaccacctcgcacctaacagtcacgaaacggcatactacgaagcgccaacaaatcgtaggcgaacgctccaacgactgcactcatcatcacgcaaccaacgcgaatagctccaatgcgtaatcaccaaacgccc

SEQ ID NO: 12708 - DNA, 150 bp, Emericella nidulans
  unsure (1)..(150): unsure at all n locations
atttatattcaaccggnnnatttatttagggagactaaagagaaatgaaaagtggaagtttaccaccgagatgttgaatcaacagctaatccatctgattcgcaagcctgaaaagacacgtatttcgacgattactagatgattgtgccg

SEQ ID NO: 12709 - DNA, 187 bp, Emericella nidulans
caaccaagcgcggatacactgttggcactcaaagacaattttttgaggaagggcccagccagaaccacgggttgacttaagggcagcaacccaccaacggccccacgacagcaaaacaggacgaccgccacaagaccgagaccagagaaccaccaagagaggcgcacaaaggaccatatcacagcca

SEQ ID NO: 12710 - DNA, 200 bp, Emericella nidulans
cccgcggggctgatccgataattatcagtacagacaagaagctctttcgcaagagccctgaagtgacgcccgggggcaagagccacaacgaaatgcagaccgcactgcactcccgggaggcggaacccggcaacagtggaccccgcgaaccgcatgggcacgctgagcacgccaatccaggccacaatgacgaacagcgg

SEQ ID NO: 12711 - DNA, 202 bp, Emericella nidulans
gcggcccagggcgaggccaggaacagtaccagaagagccaccggttttttacagaccgaagaaggactacaagaggggggggcttgacaggaaaacgggcagccaaccatgcaacacgaagggattaagaagggacacagagcagggggaggacggatcagcatagatgggcgtaagaacatacgatggttcaaggaagccc

SEQ ID NO: 12712 - DNA, 193 bp, Emericella nidulans
aacaactgacaaacagaccccagatcgatcccccagattttttctgtcgagaaccaccactatcatagggggcacttggcaaggcaagagtgtgtataccccacaacctacgactgctgaccagcccaagaccgccgggctcgtaccggcggagcagctcaggcgctcaggcatatgaacacacgcgcccagc

SEQ ID NO: 12713 - DNA, 1879 bp, Emericella nidulans
cccagcgggaagaaggcgagggtgattgtgataagtatgaggatggtagttggaggctattttcggggaagacgcagatgtggtagtcgatgatggggacagggatatgacggatgtttagccattcagtctatatacatcttaattccgtgatatagtccctttaattgtggtcaggccggcgtttaaggagagattcggacagttcttatgcagtaatcttactatacaatgacaacgaaccttaggtagctcagccctcaatgcaaatgctagtcaaccaggtaaatcgaaaatgcccaacgccaaaagtccgtatgtatacatcgacacgcccgcatcaatatcatatcaatcgcatcccaacaccacctaattcactctagcctcattagcttgacttcccagcagccttcgcctttgcctccgatttccgctgctcatcctccctcatcatgcgaataacctcctccctcctcttctctacccgttcctgttcctccagtttcgctcgccgccgctcttcgtgcgaagcaaaccactcttcccgcgcccgatcctcctcctctggtttcgcatgctcaatcatacaagaattcatcgcgaggcgctgcgcccggcacacccacgttgctgtgaccgtgcggttgaccgcgcattcggcgaaagctatccagagatacatatattagccgcggtctattgatagcatcgcaaatatgggagtaccctttatctcagcgcgcaataggcgcgcacacgcttgtagtataattgtttgacttcggcttcttgggcggcggagagggggagtgggttgcggaggttgtatctggggtttgtggttgtcatttttggctgatcattaataactgagatgaatggaattattggtgtgttggcagagggattgttcgaattttgcgcttgaatgcaggtaggtaaggtggtctagtgagctaggtggtgaggttcggcagagctggaggttttagtctcctccgtctcgggccaggccagaccaaacagcacctaatttctgagaactttttatctccgacaccttcaactatcaccaccatacctcatcctcccacatcccttatattccctttactttcccaccagttcttcctttgaatcgcttttacaagacttatcgtataaaaaggggaagaaataaaatcgccaaaatgtcttctatgcgcaatgctgtccaacgccgccaacatcgcgagcgaggacaactccagggccgcgaaaaatggggtatcctagaaaagcacaaggtgcgtctttccttgcgtactttacttcctgcagacagtgtctgacttgtttcgttggttataggactactccctccgcgcgaaagactacaacatgaaaaaacaaaaaatcaagcggctcgaagaaaaagcacgcgatcgcaacccggacgaattcgcctttggcatgatgtcctcgcactcatcgacgaagggaaaacatggtacagggatgcgcgagtctgcgactgctcagggcctctcccatgaagcaatcaagttgcttaagacgcaggatgccgggtatcttcggacagtgggggagagagttagacggcagatcgagaaagtaaaggaggatttgaggattcaggaatctatgggggaggcgctaggagttcaggaggacactagacaggaggacgacggcgacgatttcgacgatttcgactttggggccgcggagaagaaagcgcggaagttgcttttcgcggacgatagggaagatcagaaggtcttgaagagggttttggagcagcgagagcaagagggagaaaccgaagaggaagaggaatcgtttggtgagcgcgctcagcagcaacagaagagga

SEQ ID NO: 12714 - DNA, 880 bp, Emericella nidulans
gaaatggtatcctcaaggaaaaatgcttggtattcggaatccataactggactagaagtcttttcaagattgatagacttcgcttccctgggtaaatcctcagagacttgaaccttcttctcagctactgtttccatttcggtgtctgggtcattgcgagcggaagcttgagtcgacgtcgagctctggatgtggtcgcccacggaagtcgtctcctggctaaatgtgttctcgtggacagtattcacagtgacgctgcgcactggtgttttaagcataaccatagggtgtgtacggttgtgcgtatttaagggatggacttcacacttggcgcagaaatcggtgtcgtggcagacggagcacttataacgaacaccagtgatgtatccggatcttggcttgtctttgcatagagggccgtcgcaaaagacgccaaagtgcacctcgtgagactgcagcggctcagagatagccgtgtagagcggggcgaaccgatgaccaggatgggtccgagatgccgagagatggcactcggaacagtaatcccagtctgggcatgtgaggcatttgtggcgtacaccggtaatatgctgaaagtaagttagcaagtactatcgaacagtcatacgggtggatggcgtacgctttcacagccatcacatatagctgcgtgatgataaccacggccgggcttgcagcgagaaagaacaaggttctttaagccagcatcgtggtctcccaacaacacaaaggtgtgtgaagggcgatgcccatgtttgtgtccaagaatgcaggtaatgcacaagtcgaaatcattgcagtccgcgcatgagaccattgtacccgcgttgaactatgtaatcgattcgaacacataaag

SEQ ID NO: 12715 - DNA, 4090 bp, Emericella nidulans
ctcggtcagatcggtagggcgccatcgccgccacctgctgaggcgtcgacggaaacgttcacagaaaagagtcttccggaggccgaaaagctcacaagggggaaatgtgaggatccgaccgttgtgcctacacgcggtagtttcttccttcatgacaagcgttcaacggaatctggagcaaacaatcacaggccgtccgggaagtcgaaatcaagaccgtacggccttattgtggatggaaatgttcggaggtaagtgcaggatctcccaatcatctcggcagctcctaaagccgtcgcaacagaaggcgcaattcagcatgttctaacctagtttacgcttcccaggaaacatgacattacaaccgaaggaccgtggacccatgatcttcatgatacagttgctggagacgacccgccggctaccaggcgtcctacagcctcagcggcgggttcgtcattttctcataaacaattacctacgactgtacctactgcgccatatacttctactcccaacaggactttctcgaccacccagattacggggacaatgcctgtcgtggtgttccttccaggcatggataaaccgatatctttccaagccgacaagaagcattatactcggctaccagagcatcgaccccctctgcgacgagacaaacccgttagaatctcagttcctggtcaagcccctagatatatatttcccgccacggagcgatcttttgtctttatcccacgggctcaacggcccaaccagcaggcttatcgtggacgtgcccgaggagggttctatcaagggcgccgcccaagcttctatgcaagctcgacatatacaccgagcgtagcaatgagccggaggtcttcattcggcaagcctccctcacatgatgggtatccttcgccagctgggtctgtcatttcgcggcatacagtcgttacgaccgagaatggaaaaccaattgttcgcttgcctcctccccgagttcccggggccaatccgccacctgccacagcttcaatccctccaatctactcccaacagccgcagcacactgtatggcgtgagaatcgccctgcccctatccccatgcatcagcctcgcccacagaaggctgtttccttggccgacattgaaaccccggctagtttcgccaattccccccgggcgcagcaggagcaaccctttcattatcaggtccccgtgccaaacagcggccctgtatacggccccgacgcctccacaaattatgccctttcggcacatacaactgcaacttcattgtcccaaatacctgaacgtgccgttcatgctccgccgttccatgcgtatggattccagcaacctcaaacatactattcaaacccgtacccaccggctcctgtatattactctgtttcgggcacagaatatgcaccttataacggcgtcgggccggcgccagcggctcctttccctgcgggacaaaacgttccgtatattgtcccaacaccatcggagcaaacgtcacaagctggtacggttgcacatgagtctggtggcacggtttattatctggacgcctcacaaatgtatccaggaccaacgtttggcgggagccccgcgggtggagctgccaacatgggagggattatgacacctggtacgacatattattaccctcagccccagggtgtatactttgcgccacagtaactagacgggaggcaaggcctcgtcgaaaatgagcagcgttcgcgccattttttttttcatatgtttcacccacctgatgccgcctgacgactcagtttcttttttggttcttccgacatgatttatcgcttttggcgcctctcttcattcttttgtcggtcccttctcttttaccccctgcgatatgcttatcccaaaaattctcatggcattttcttttttctttttttccttcccggtgcgttctaccggagcttctcgtttcgttaggtctgccttagtcgtcgttagattaggatctgatgcatttctagcgttgatgggtttctttgtttagctagttattgttatttaggggctttttcgcgtgtgcagcgcgtttatgatactatcctccatgcaacaatggttatatgatggcaggctgagccaactgttccataataggtctctcctttgtacaaggctaatttttctgcgaatcaatgcctagctaagggccaaggccggtcggatataacgtgtcatatgtccggctgttgcatcattgcttgcttgcttgctttttcctatccttgtagtaggtaaccacatatgttactgggcagaggataaatgatgagcgcgctgcgtacaggttacattctttagctaacaatagccgtaaatgctctgttaggacctcaatattgtaagatataatttatgaagcgcaaagtttcgcagctccagctttccccagccaaagccaaaacagggggtctggcgtagttgatggggcattgccattggacctccaagagctcactgacgccgcacgggcgctgggaacggcactgatgcttaagtaagctcaccgccgggagcgttagagggcaggtggcaggtgaccatcgaccaccgccggccagccaggcatcttcttatctgccaattataagcctcattctcgctcctcttctcttcaacctccatcgccttgcgctatcctcgtcatctcctgctgcctcctgatctgcccatttatctcttcttcatcatttcctaatttttcttccagctttaattgcatatcccttgccctggcctgtcgacattgtctttgcgtcaccgttggctatctcgttgaagctagcgtagctacccggcccgcaagcgattagtacagcttcgagggcagcagtcatgtccgcacccaccgtcaaccccgtcgggcctggtactttgattactgtcaaggtgacctatgaagaccataccaggcgcttcaaaatccctttgagggatctcggggctcgtaccttaccccagaatgtaagttctgtccccacttgagctccgaccggggccgccgacccttacgactctcaccgtaccttcattatctctctttcgttcacctttaccctaacttcagcctgagttctctcatgctttcgtcttccccctaagcgtcccaggaattcaatcaacatcatcgcaccactcgatactgacgttcccgcactagttgcgccaactgcttggcactccggcggataccaacgtcatctttgaacgctattcggatagtgccggttcttatgtccagctagacagcaacaacccggcagtttttaaacagctttatcgggctgcgaaagccaagctgaagctgcgaatcaaagctactgtcgtccagcctacgagccaaccagcagtatccgagagcattagcgaaccaagatacagctacctggaaaccgttttgagtcaccctattcctgagaaagcagttgatacgaacgacagttctaccacattagctacaactcttccagtaagtgcggaacggaccacattgttcggctctcaagaccccttctgctcggccaccgaaatggaaggatcgaaatccgtcagccacagagaatttatcttgggccctgacagcccgagtgctcccgtgatctctcacacctccactgctggtgtgttctgcatcgactgcgatcactgtggtcgtcctattccaaatgaacactaccattgcaatacctgttccgacggcgactatgacctctgtccgcagtgcattgactcgggcgttaactgccagggcgaggaccattggctggttagacgttttgtaaaggacggtatcatcaccaacagcaccactaagactctcgcatcacataaaattcaaactcgcgatgagcataaaccccggtcggagccagttttggaaagtgctcccggattagctgaaaatatcgcaatcaaccgcgaacgtgtgtgtaacaactgcctcaaaggtacgcaatccgcatattgtatctctttatgtgttctaattgattacagagttcgacgagggtaaaatggtttcctgcgctgactgcgatgattt

SEQ ID NO: 12716 - DNA, 188 bp, Emericella nidulans
agcgcgtccacacttttacggctccctggggctttattgacgaagtgcccagggtgacaccgggggggagtttcagaggccttatcaccagttacgcagcactaaaaacgaatcatgacctcaaagatatttagtgattggacatttataggcaatgcgttcgaaagaccgttagacagctcacttcc

SEQ ID NO: 12717 - DNA, 213 bp, Emericella nidulans
tgggaacggcgcgggaggcacggcggctctcaccactaacacgctcgctgctttttttttcaatggacgcccagagaacgccgggggggtttgtccgtagaacatagccctcacaactcaatggcagtctatgcgacaggcccagccagccgggggcgcaacgcactacgacgtcgggcccaaacatcgccggcagattaatcacgccgggag

SEQ ID NO: 12718 - DNA, 204 bp, Emericella nidulans
gcccggcagtgtcagaggctattaatactaacacacccgcggggttttttctcaccgaacgcccagcgaaaccggggggggtttttcaggggaacaggctggccaacagtcaaatgcataggcggcaacaggaacagaaagcagggagcggaacgaacacgcacgataggcaatatcacctccgcaacactaaccacgccaaga

SEQ ID NO: 12719 - DNA, 720 bp, Emericella nidulans
tctctagtctagtaacggccgccagtgtgcagacggaagaaaaaaccacagacgtctgcgcgtataagttactatttcacgggagtcaaaaggacacataccaacatgtgctggccagtcagccggcttcgccatcagagccggagaccagcagtaggtaaacgggatcttcaaagtctgcgtcaacatcggcccctcagtggccgggacaggctccaagtccagctttgagcgccagctgttaatgacatctccgagtctgttcccgtcagtataattccaagcctttaagacacttaaaactaacccctgccacgtcagccactccacaataccgtacgaaaagtagttcgccatctcctgactcgtgtctgagtacttcagattcgccaatggatgcgggaacgctctcgtgctgctccacggcatggtaaacatcaaatgcagcggaatccccagcgcctgggcacaatgaatatgggcaaagcttggtggattggcaatgattgcctttgctacaaacggagtcttcgtgactgggtcatccgcaatacaagacctccaacacccatccagcatcaccgcaaccatttccctcatcatctgcacgtcgccagaccggaggctatgcagctgcgggatcaacccggggttcttgaccatgtatgccattagccccgccgggttgccgccaatatgttattcccctaacgaaccctg

SEQ ID NO: 12720 - DNA, 198 bp, Emericella nidulans
  unsure (1)..(198): unsure at all n locations
gggcaaagaanggcggttctaagacgcccacggatttttttagcactagggcgccaaagccactgggggggttttgatcagagaacagccgccggcaacgcccaaccctacaggatgaaggacgagtacagaaggaaggagcggtggacccgggctcgcacggcaaactaacctccatcagattagagcacgccaagg

SEQ ID NO: 12721 - DNA, 197 bp, Emericella nidulans
ggggcctggctagaaaatggaattataaagcagcactctggggtttgtctggagctgagcctagaataacctgggggatgtttacaggaggatttacactaatgctgaatactacacggatttcgtcatatggtcagataaccgagcgttagctagcttggtgctcttgcataggaacctccagaaaatatacccag

SEQ ID NO: 12722 - DNA, 3719 bp, Emericella nidulans
gcgcatcattagcttcagggggcgtctccggtacgacctggaccgggacatttgacgatatgtctgcgtcgctagaatgtgataaaaccgactgcgaagaaggaacgcgattgcgcataggcatatgaacttccagattcggagatgttatttgcggactcgggagaaagcgagcagtgttttgtacccaaaacgaaaaatacgcgagggtgttgaggcgattagccctttggtcataatccaaaaagctacagctattccgccaaccaccacctttatcttccatactctttgggggcttccatttccaagtccaatcaaattgaacggacgggcttccaccggttgagaaatcgcccacgagctgaacgttcgagttgttttgcaggtttggatttgcgtggaattctcttgtaaccagattgtcgagctctttcgagttcggcgcgtgcgcaaatgtcaagcctgtcaatatggtgtcggctacctcgggcaaagtagtcgcaaccccattgaccgtggaattcgacacgttccctgtttgcgtttgtcttaagatgaaggtaaacttgaaaatgagttcgtcgtcgttgttcagacgcaaaaggaacgaagggtggggagcagaaggggggcagtccggatcctgtaagatgtcggatttgtgagctaaagggcaagcgttccatttaatggtcaagtcatcatacctgtatatactcaaccagagtgtcatctccgggctcccttctcgcattatacctggttgcgggaaatccatttggaatgaggttcagaagcacccggcgagaattcgatatcgttacagatgcgatcgttactagtagaaccagtcaactgcagtccatttagctgcatcagcaaaaacgaacgcacatttgttctgatctttgaaatacagacaccccgagtcgtcaagccggctcccgacaacccccatggtcaaaacgctccaagtgtcaagccgccgcttagatgattaagtccggagagggaaccgggactattgggaagtcaccatcggcggcttgcgcaccagggaactgaactcgtagttgaagcggaatcaagaataaatcccaacaagctgccacccaactcagatcatgagcgagtggccgatggacgaaggcaagggcagggagccgcgaataacgatcgacggatatggatgaacgcagtcgcagtgcagtggacgagatgaatggaatttgggtggggaagatggagccacactagccgtctcagcgttcttctccagggccctccttcaattcaccaacgacttaatcttagctcgacagatgaatgaaacttaggttcagtggttgttcagcaagaaaggcgcccgttcaagggaaaatccaggtggttgggaagttagagcgagggaggctcaagcgagcaaagcagacggttggacagtttctcgagcaggtaggacgggcagtcggtcgaaggtaagggaacgagatgtgttgaggtgcagtggaggatggtgggagaagaagaggtgttgagttgcggactcggagatcgatttggagggggcttagacttgactctggactaactgtgaatcttgtcatccatctacccctcgatcttcctgaagcgggatagactgctatctagcgccgcccttagtctttattattttccgattctacagagtattccgagcacagagccatcgccatcgccagcacctatttcggtctcacgagacgacggatggtcatgaaatattcttgactatcctcatgtatgtttatcgctgcctaatccttccatcccgtgactatggacaatcagctggatccgccgtcctctgatataggccgcagccgctgtttaccaaaaatagagttagccatggccatacattcgagacgaacatgaccttctaaacggggcaaatgtttatacaaggctagtcaatctcacccctcccatctaagcatattactattataatcacaggaaataaacaataacgatggtcccgcgtagaaattcatagagttgacctaggaaaacagcggccgtagaaggaggagccgggtttagagaaaacgccgggaaaagtgagaggaatgaacgcacaatcgtagcttttaggagccatctgggtatcaatttgggaaatcattgttgggggttcttttggtcaggtgctccctcaggaggacgtgaggacatggtcgcattcttccttgcaccttcatcttgatctgcctgcgcccaccttagtacctgactcttgacgtcccgcatctcgtgcacctttctagcaaagtctcccctctttttgttctctaagccgctgtgctcgttcaattcatcctcgtcagagctcgatatggataaagaggaagaagacctgctcctttgctgaaggaaagccatttggccgcgcgcacgatttttctgttctctttgttcattctttagcctttccattcgctctgcatcagcctggcaatccagagtggtgatgtgtagcccgggaaagttagacgagatgaactgcttcagaagcggcaaatatttggcattcggccggtaggtgccgctgtcgttatctataaagagctcatatttagtggggtcggttgatacctccatctcttcgccatcgttgtccatgatatactccgtggatgagctatttgataccaaggactgcattcgatgattgtgcttgcgctgtcgaacgaagaactcccctgaataggcaatatagatggatacattgctgtgcatcgtgtgtttgctcaataaatcgatgccgaattcctttcctgtctccgtaaagcgaagctgaccgtcgagagtaagaacgtaagtgaatatcctacccccttgggcataatgaacaaattcaagaaacttctgcgtcagctccaggcatggctcgtcgaactgaccgtccaatgttgcccggtcaaaattatagatcctttcatgctggtgatgaagcgctctgttgagtatccgcccccgcaaagtatgcgacgtgaacatccctgccacgaaaggcttaaactccacatatctgtgatacagttctttgggtacaggtcccttgagttgaatttgtatagcttgaaagctagaacaagatattagatgaaccgtatcgaaaactctcttgaaggaaaatgcgagcatacttatagcggttgaccgttttcctcccatcctgactttgtaccgcgtcctttgtcccagtcaatctgccaattaaaggcgagaaatgtttaaaccagtaattcggcccaacggtgtatacttgcgcaccgttagtgccaggcgttttccccagacattcaacgctgatgaccagatgtggatccgtgtgaagacgtctcgaggcaatggcagcaacattaccaaaaagatagacacgtttgctgccagtatgcttctttaaccgaaaaggctgttgttgaatgccgggccattgagcgctaattgagtcaacctggatataggcattccctaatttgtcatcgtggtctgccgcatcctcatcgtatacgcgacatttcagcctaaacccgcatgcgggcacattggccactgtccactccttctcccagacagggtcgcgattcttgcgcacagtcggcgtcctgtaggtagaaagagaatcttgtttatgccactgcggaacgtcgacagccaaggaaggg

SEQ ID NO: 12723 - DNA, 1633 bp, Emericella nidulans
acacttttgccgagtttttgtcgcagcaactcatatcttgcagcggcggatcgactcaacgaagccgaaaacaaagcataccaggaccaacagcgcaccaagaaccatgcgcaggcaccaggaatttatcactcagagatctatgcacctggtaccgagttcgttctcatccaggcaatggcgcagctcatgggtgctgttgtctgcgtactgaacgagagtcttacagaaagcataaaggggttctacaagctaagaaaagcttactttgcgctggacgcaattttgaagatggaagagaagttcgtgcaatccaaacagcttggaactgcaaacactccctctccgaccccttcattgaaaggggcagactcttctgtcaaatccttgaatctcaccaagggtttatctgatctgaacgtaaacgatgttggcagtagccggtatcgagcagtacgaacacatcagaggtaatcaaccacgatccagactccgacatattcaaaaaccagatagatgtttttgtgcactccggagccaacttttgctacggcgttctcctcttgctcatctccatgattccaccagcattcagcagacttctcagtattgttggctttcacggtgacaaggaacgtgccctaaggctgctctggcaggctagcaaattccacaatctgccaggtgcaatcgcggcgctaacgcttctggggtattacaatgcatttgtccgctactgcgatattatgcctgatgccgtgtccggaagcgatggagacactcagggctaccctcaagagagactcgaggcccttctggcacgaatgagggaacgttttcctaagagccaactttggcttcttgaggaatcccgtatgaacggcgccaaccgcaggcttgacgtggcccttgagcttttgtgcaccgaggtgcacagccctctgaaacaggttgaggcactaaaaattttcgagaagagtctgaacgcattgtatatccacaaatacgaactgtgctctgaggctttcattgaggtttgtctccggcagatctgcctgttttccatgcgctaacggtaatatagtgtgctgaaatcaactcatggtcccgcgcgttatattactacattgcaggaacatgccatatcagtttgtacagagagcttgccactaccgacccgaagaaagcgaaagaacatgcagagactgccgtcaaactcttgcacaaagctcctcaatatgcaggggccaaaaaattcatggcgcgacagttgccgttcgatatattcgtcgtccgcaagatcgccaaatgggaagctcgagccaaagagtggaacgtgccgttgatagacgccgtgggagttgatcctgtggaggagatgattttcctatggaacgggcatagccggatgacacaggcgcagcttgaagagtccttaaaaagactatcatggtccgagagcgatgcgaacaaaacatggtctcgtgaggggccccaagagaagggtatttaccagctccttcggcaacagtgctgcgcttgaagccggtacccgacgaaccaaggatggttctccaggactgatcttacctaaaagaggttggtattcaagggccccccactggaggaccgg

SEQ ID NO: 12724 - DNA, 566 bp, Emericella nidulans
  unsure (1)..(566): unsure at all n locations
gtcttgtaggcttgctgaccatcgagatcttcgagagaaccggttggcttcgcaatacttcaacccgagccagagtcgccttgtggcatntagactctgtgtcagtggttccatttcctgtacttcgtcgtatgcggtcgggatcccgagcaaattgtgcatggggggaggctcaagacctccgcggacaacagacgagatgaaaccgtcgttctgcagggcaaggcacagcttcaggtgcaggttggaattcgggatcgacgtgaagccgagacgagccttggtggcattgttcaggtgtgaacagacgtgggctagattgacgagagacatgctgaactatggactggcgcaatcaaaccggatggccgatgggacggagttctgtaacaagcaggcgatcagttgggggagacaaattgcgcatggttggcattggtagtacctgcggagatgaaacgcacagcaaagggggttatctcaatactcagcagcccagctcaagttctagacgccgaatatctgttgaagctgttgacttgcggaatgaaattttcggagaaacg

SEQ ID NO: 12725 - DNA, 202 bp, Emericella nidulans
agggagaaggaaggcaacgagggcccggcgcggcgaggccgggggggagggggcaggaccggggagcgcgcacgagggccaaccgagggacccggcggaggcgacgggccgcggcgaggcggggagcagcaggagcacaggcgggaacgggaggaggggagagcgagaggagcgaggaggagggaagtgagcagccgaaagg

SEQ ID NO: 12726 - DNA, 199 bp, Emericella nidulans
gcgggagggacagagaacggcagcacaaagcaacccccggaggttttacgcacgccaggccaagcagaaccgggggggggttaaccgggggacggagccacccacacaacaccacaaaggcagcgacagacacacaaaacaaggagcagaaacccccccgagaacaggctaaagaacccccacaggacgacaccaagcc

SEQ ID NO: 12727 - DNA, 195 bp, Emericella nidulans
cctgagaagggaatcattaataaactccaggagaatttttttttgccaggccgagaggatcaaccgggggggtttttggccaacccagtggcagacgccccaccacatcttctgcggcaaagctgcgaaacaaacagctcagacagcgactagcacatgctatacaaacaccaccggagcagccaacacgcgagg

SEQ ID NO: 12728 - DNA, 158 bp, Emericella nidulans
aaggggggaagggacagggaaagagcggaccgaaaacggcaagcgcagggcgaacagcgggaggacgcaaggcagggagagggcggaggggacgacggccggcgcaaagggggagcgcagcaagagagggagcgccaagggccagggcgaaagaggag

SEQ ID NO: 12729 - DNA, 192 bp, Emericella nidulans
cagagggaagaaaggaaagaattaaaaaactaaaggagaaggatagtaaggaaggcggagagagagaaaggggggggttttaagaggaagtaggggtagaaaaagagaaataatgggtggaagaaaaatagagaaaaggggtaatagaaaagaaggtaggaaatgttgaaaggaagaatagggggagagaaa

SEQ ID NO: 12730 - DNA, 200 bp, Emericella nidulans
cacacccaggcgcgggcaaaacgaacaaaaaccccgggccgttattcacggaaggcccaggggaaccacgggggggggttaaggacagcgcagcggcagccaccccaccacaaagacggccactaacccacaaaagaaggggacgcaggacgccacggagcacaggcgaaaggaagcaccagaggagaaaccaaggcgag

SEQ ID NO: 12731 - DNA, 164 bp, Emericella nidulans
  unsure (1)..(164): unsure at all n locations
gttgcaactccaattgattaatggagagattgcttccgtaccatttccgggcagcagcggtcaattcatcgagcgtcatatccagtaacganttgtncgtcatgatgcgctcacggcgatgacgctgggcattgcagtctgttagacgttaccgcaaggctgtg

SEQ ID NO: 12732 - DNA, 2460 bp, Emericella nidulans
  unsure (1)..(2460): unsure at all n locations
caccgctcgttgctttcctctgcagcgttcgtattaaggctgatcttggacagttttcagtttaagcttttctgttaatcataagaagcataaaggcgacgcccgcccctacagccctggcagtgaatatttcttcctctcgaggacaactacggcataacagcgtcattttctatttttgccacaaagaagacctcgaaaatctatatacagcatttcagcccctttccgttctcaacacgtcttctcccactcttttcctgtgtttccctcgctcagcttgattggccctttcaaataagatgaagattgcactcctatcagctataacagtgcttctctccacaaccgtcacctctttcacggttccgacgtcagatataaccattcgccatggcaacctcatcagatccgcctctgaacccgtagatctcgaaggcagagatctggaaaagcgtcgtggaggaggcggcagaggcggtagtggaggtgggagcagtggaggcggaagtggtggacgtggtggtggtggaggatccagctctagctcgagcaatcatccaggaacccgtccaggctcaacaagtaccaccagcaacactggaggtacatcgcgcggtggttctggaacacggccgacgtatggacgtggtggcggttactatggtggtggtgcgactgttccttatcaatcgggcattcggtcaccattaggtattgtgcccttcttcttgcctctcgctgccctggtggccttcttccctggcccctggctctacggggcacacatctatccttacggccacccttaccattacatcaacgacaccacgaacaagaacgaatcaatgccggttatctgcttgtgcgcggagtactcgacttgcggatgcgacgacaacaacaatagcacgtactatgaatcgctcttcaatggaacacaacctaaaaacggcagcattgtcagagttaccgacgtcaacggtacgcaaaccattgccatcaatgggaccctgcaaaacgggactacggcggacgaggatacggtagattcggccgctgccttgacggtaatacaggccagtgggtactgggtcatggctgccgtcgctttcagcgcggcgtatactctgtgatcgcatgtgtttggacactttatgggaggaaatctgtatttgtttggccgttttgaattcttgatacccagttgtgccctactataatcgtgtgcgatgatgacgaaccctgagactttccccaagaacccagccatcctaagttagcgcgggttcgcttagtatgttatcaatattgcctgcacttgtgcttcaacagtggtagggcatttctcaagcagctaaatcaccaaggccacttgtaatgccaacccacttttgacgataacaaaagcaaccgctatgcccagccagatatgagattgaaatttgcagccgtgggcatccttcagcacttttccgagatgaagatctccgtgcttcatcaaaccaactgtgggacaagtgacaactagcgtgtcaagagactaaaaggacacctcgtgaaccgtggagtcagactttatttttttgccacggcattattagagtctacgtgaaaactgtgacagcaagagatgcagactaaagcatatcattcttctcttattgagacgaaatctgccactccaaggcatcctgggcgtaattatcgtgcttgatgggtcctgggaaattgagcaacgtaatgctatacgctaaatctatcattctgcacaaataaccaattgactggccgaacggaaagcttctactgccacacgcagcgaaccatggcccagttcatcttgaacagcgggaacgacaggaacgagcctgagaagtaacgcctgattgtaggagtctgagcgactaacttttgcgcgtgccaatcgccccgccagccacggccaacaacggcactgcccccttttcccattgcatccatatctattccatatcgctcgttttattccgttcacactactacaaccacaccttcgttgttgtcgctctttcattctctacaaggactgccgctcttttcgagtcccattcgctctttctagcaactatctacctactatccagcgcgacgatcaaaccggatttattccttcttttctactctatacaatcaggttcgcttttatatcgacccaccttgatacacacaacagacaacatgcaactccttaagaccattcttcttttagcggcggctttaccccgngcttttgaggcgttgcgaaggcggcagcggtgaaaccgatctttactcaaccgcacacaactgaaacggcaccggaaaaccttattctgcaatcaacccgtctaaaggccacttaacacagccggaatgtgccctttatcaatgcccgccacaccttgcttgagtctttgatacaaaccctttggccatggc

SEQ ID NO: 12733 - DNA, 195 bp, Emericella nidulans
caagcccaaccgccactcaagttgtggcaggacttcggccttttttctcgcactgcaggcactggagacggggggatttttggagcggcgcagcggcattcgcccaacaacgaattcggctcacgacataactattgtatactgaggggagctttaaacaccggtgtagcaaactccgtatggatcactccctgg

SEQ ID NO: 12734 - DNA, 787 bp, Emericella nidulans
tgggctaaccaaccaaagaatggtaatcacaaaggtaaaatccagtcagtgagctttcgtccctttttaaacatactcagcttatagccaggacaagtcaaccttatactgcgcaagattgttttaaaccaggcgcttaggggttgagccttgggaaggtggcacagttgctcggcccaatcaagactggattatagatgaatcggtgaatgcgtggggtaatttacctagctatccttacaaagccacaattggaagtaatattattagctattaacgtgctctagtgtttcatctgtaggatggttggacaaacggcccgggacgggaccagcatacatggtctataattccggtcgactcctttaagcttgcgggataaataaagtgtcttgagtctcggtgctgaacaccatgatcaatttattctgttccttttttcaatatttggaaaatgtttgggtttgctgcgatgacgcaaaagcacagctaggagcatggcatacaagcgcaggcggatagagatcctgtcaagctgcgaagcgccagcctaatcggagctgagcctcagactacaggctgatggttaatgacccgcgccggtaggcttgaccaaaacttcgagccgtatgtagggttctattagttgacaggagttgggaaaccccgactgaccgcaacgtggcaatcataacaactgaacccttgctgaggaaaatgtctaccattatcagtccctgtgatgaccgctgtattcatctaagagacaatagaatatctcagggat

SEQ ID NO: 12735 - DNA, 196 bp, Emericella nidulans
gcatacccaagcgccgtcaaacttatgaggctcaccggggcttttttttcgaacggcacagggcgataccgggggagtttttaaggcagcgtagtatcagttacgcagcaactaaaacggatcctgaccttcgagataagggtgattgggaatgcgtaagacaggcgctatgaagaccagatgactatataagtcg

SEQ ID NO: 12736 - DNA, 187 bp, Emericella nidulans
cacacttaaacgccgacaaacttagccggatcgctgggacttttttctagaactgcccagggcgatcccgggggggagtttcagggggcgtagtaccaatcacccagcccttattacggcccctgaccttcaaaatatggggcataggacactacgccgccatgcgctacaagctccagttgactaa

SEQ ID NO: 12737 - DNA, 449 bp, Emericella nidulans
ggcgctgatacgggcgggtgggttttgaactacgagaccagaaatagactggcggacaagaacatagaccgggggccatattgacggcaattgatgttgagcagcaaccaagcaggcaacaccgagagcacccggaagtcacagcgaaaccagaccgctgggtgaaactgcactgggtcagactgcagaagcttaaagacatatgtaacccttgccaaggaagaggccatcacgactaccagatactgcacaagatcaatagctgtcaacatggcactcatctgtagcggtgtgcactacgtccacaacaagtgtctctgcccgtacacgtagcactgaacagcaactgtctagttagactggccctcagcccgagcgcgtctcaactagtgccgtatcgctacgcatgtgcatccagcaaagtagagtcacaaggtgccacgcgaata

SEQ ID NO: 12738 - DNA, 311 bp, Emericella nidulans
cgggactcctttatgtcgattattgccctatgtaatcctacaatgagaaaacgggactcagatcagatatatattccacttctcaaagggtcatgggcggtatagcggaggtggtccatccggtatacctcagaccattccggatccagccggcacacggagactagatggcgacacagagtatgagtggatacgcccggtatgagatgtaccactgaagataccatagtaggccttgctggctggggtacctgggagtttctcatttgactagttatcagaactcaatgtcattattccttggcatgctc

SEQ ID NO: 12739 - DNA, 392 bp, Emericella nidulans
  unsure (1)..(392): unsure at all n locations
gcccggccttgcgctnagccgcccaaaataagagccgngccggaaccggaacagggggggccgagagcgggaacagagccccgaaccagaccgggggcgccgcacggggcgaccacggaccggaacgaaaggaccccccaaaccgcaacaccaacacgaagaggggcgggacaacaaggcagcgccaggaagcacgcgcgacgggnagcgaggacaccagcgccgagggcaacccgcaaaaaaaagaccagccgcacaagcacccacagcgacgacaccccgggcgccaccaaagaccacccggcccgcacgaggcccatgctgaaccgggagggagcaacgcacggcgcacgcaagaagaaggcactcgccgcgccgaaagcaccgagccc

SEQ ID NO: 12740 - DNA, 112 bp, Emericella nidulans
  unsure (1)..(112): unsure at all n locations
ttgcactggatagtgtcgatcagattgttttgactcacggctcttgaatggctaattangcatcaatccgcttgtttttaccctgcacacgctatcctagttgggatgtcgt

SEQ ID NO: 12741 - DNA, 422 bp, Emericella nidulans
  unsure (1)..(422): unsure at all n locations
ctgtatatgtaatgcaaactcctgacgataggacatctatagtaagacctgatgatggatagggcgattcatatatagttgttcacagtgacagacagttagagtatcatgtaggtgatgatcttgaccttgtcgttgtagtcatctataagccgaactagtctgatttagggtaccgtatatagctctctcatggggttaacacaaatatagtaataatgttgtcagagatagatgctgactgacacttctgcccgaggattaggaggtgggtattagcggttgcctgggactcagatcatagggcgcgcaatgtctggaactcctcatgaagaactatgttctgaccttatccgaggcactattgttctgttttgntcacacgggtctctgaccagagctgcctcagttatattggtttg

SEQ ID NO: 12742 - DNA, 1700 bp, Emericella nidulans
ggatattgctcgtgcgcagcaagaagcttgataccgactgggatatccgactgaccggcgagtacaatctatctccaaagagcgcaccggcatgagcatcatgctcaaaggtggcgccaatggaccattcatccctgtacaagacgagagtgcacgaaactggctgtataaacagatcgccattggtaagattctgatttgttctccctttattcttataaattcccgctaatggaaaactagccgtcaatgcattcaatgagaagtataccaacagggcctaaaaaagccatgccttcgtgatgatgttatgctaggaaatccactaggtgaaaaaaacatggagggcttgcatgaccgacgatgcctttgtgtatctgggttgagcctcacaccagtacataattctccattttctgaggttgtatgaacttaaacttgcatgtatatagatatgacttgttagtcacctctaatggtttaatgatttattcgccatcctatatattggacatacttaccctcatacacgccagtgacgagaattattgcctggatggaaccttccaagcaaatttgatcttttatgtctggccaatcgattgcacgagatgagaatttataatgttattagattttgttatattaattgtattatttggtacgtctcgctcgtcattgggtatatcaccataactgttcatctcgcatctctgagaaaagagagtagatagttcaaatggcttactgggcataaatgaattcgaaaaggtatgacttggtactttgaatgattatcaagccttggtagttgcttgccttctatgggatagcgaatgcgacggaaaataatgccgttaattcgtaaacttgcagtttggaagttatatatccgcaggtggtatcatgattacaataacaattggtatctaaacaggcgtggtcgatgctggtttcattacgcaaaagaaagaacaagtgcatggcataagcgcgtgcagtgcttgagcaatctatctcccttccgcacgttgaacgagctgttcttccaaccccattggctcccaaacttccttcgccttcttattctgcacccacacgacatcgccctggatgaaagccacaacaccgcctttgcccgttgcgctggctgtaattcggaacagaggctggccgttttgcggatgcgcttcgcgcaatgggagcattatgaggccttcctctgcgcaccaattttcgaggacatctttgaatgcgacttcttcgatgactttcggtttgtgtggggcagttcgtccggaatttattgatgatggttgaggtgattgaggtgcgggatgggtggatttggttggttttgagcatgtgggtgtggatgagggaggtggtaattcttctgcagcgcggtcacctagttgggctgctaggtccattgtgcggagtgccttgttccattcgtcgtctacgatctccagatcgttgattcctgtcggaaactgggatcgccaccaggtgaaccactcggcgacttcttcgtagttagggtcattggtgagccaaatgtataggatttgatgaaattttggaaagaactcggcaacgaagagaaggcccagtacgttaggttggaaccagtctttccaattgaggatgttttcaaaagccgtgaggtcttggtcttgtggattgacgtcgaaatc

SEQ ID NO: 12743 - DNA, 245 bp, Emericella nidulans
  unsure (1)..(245): unsure at all n locations
ttacgcttcacaccccgcgtttaataccacggccgcaaacacgaccacaggggaatttaaggaangacaccgggcgaaccacaaaacggcaaagnggcgggggggcgcaagcaaggacagcgacccgacgcacccaccaaaagccccgggccgaaagcacagccaacaaagaagcacaagccaaagacacgccgaagcgagggcgaaacagaggagacaaaacaaacaaaagaaaccaaccaaag

SEQ ID NO: 12744 - DNA, 764 bp, Emericella nidulans
  unsure (1)..(764): unsure at all n locations
cacggaccactcgtatatttttcagttctactaccgnnataaatcgcaagncatgaaccgcncgggcggggggttttggcaacctgtgatttgcctggcgtcaagaggatgactggcaataattcaagcagcctgctgctcgcgaagcacaaactgttctcgtacgagaaagacatgagactcaaagttgcatctcagttaagggaaggcttttctggtgacttgctttatcctgttttgttcgtggctaaattaggtaaacggccagagcaggctgagctatatccccaacgataccgtactagatatcatttcaatacagcttctcgctatggtccctctgcgcatcgttatggattcgttggaagatgacctgagtaggtccaaaatcacacgatagttggttcttaacagcataaaatgcatgagccaataatatttgaggccatttaacctaaaatcagttactttattctgccctgaaatccgaataacccaagctggaaacctttttttcggcccttatgacacggtacgactgcatctgatgctattttaagaaactattgcattatcgttcagggggagggaaaacacatttaacccgtatttatatggctttaaacagaagttttgtggcgcccgcccataagatattaccgctgtcctgttccaacttcatcaaaaaaaattgactttcccatttgcaaaaccaatgcatataaacctgccatatgaccttcaacggtttagcccctgtgtta

SEQ ID NO: 12745 - DNA, 111 bp, Emericella nidulans
cttcttacacactgagacggtgccagtcgccttatgcacacttcgcctacctcgccgcctccacagataggatagcatggcttgtcaacctgcggctttgtctacttgctc

SEQ ID NO: 12746 - DNA, 289 bp, Emericella nidulans
  unsure (1)..(289): unsure at all n locations
ttctagctaagcctcagtaggcgcaggtcgagtcggagtgaatgcccgaacggatgagattggtgtgagcacgccttttcgcgctgcctactgctgcgaatcccatgtataacgaatgggaggaccgtaggnattgcgtccagtccgtcgctgtccgcaacggatgccaagtctgtctgccgggcacacggcatgtatttgacctgggntctacggggcagcaaacggaaaccgttggcccttagtacatatgggcttgatgtcgctaatcgctggctaggctagattc

SEQ ID NO: 12747 - DNA, 3662 bp, Emericella nidulans
  unsure (1)..(3662): unsure at all n locations
catatatgtcagttggtgcaattcggtgcttcattcggctactctagagaaagggcacggactactgattagcgagctcccgcgtccgttggacggatttgtattgcttatttatgtagttatagagatacggcgtggcgaagtcgggttcgtttctgtaagactttgttagctgaaatggattctgcgtacacgcacatgtacatataaatctgcgtgggagagaggagtaccctatgttcatgagagttgttattcctgcgccattggggccgagggcttgcaccgaggtgtttggtttgaactaggccattcgtttgcttgttccattacagaactgaattatgtgaaggagatttatggtacgtaccatgaggtccagtcgtgcttcgaaggtctccgaaccgcccatgaggtcgactagggtttgcatgtcgtgcgggatcacgaaagagtattctgtagccacgtaagcatcacatcaaagtttagggttatgacagaaagctggacttaccccaaggaactccttcataagtatagtcactccactcacacccataacaatagagcggatcataccccgaattattgaagcttccatttgagaacttcggcgccagaaagccatcgaaaccaagactctccacgtccggattccatattgcctgccagcctgccgagcgacgcaggtgtttctcctggtcactcgacatctcacccgctgcaacctggctaattgcaaaatcattcagactatactccaccgtccgcgaaatgcagcgcgtacttcggtcttgggagacatagccgagctcgagccaatcgaccagcgccccgcggccttctttcgtactggcagtgaagtcggttggatcgtgggtattgtagggtactacctctgcattcgtcttcatggcggcataaccatcagtccagtttattgcaccgcgaaggccctttacgtatgcgtcggctaggacgttgtcagcattagagccaccctgtacaagaccgttccaatttccagagcggccatcggggaggaagccttgatgtctattgcgtgttaggcactacttctattgcttaactctacaagacgtacctccatatgtcgattaatccgcggatcattgactcgtagtaaacgggctggaagatatggtagaagctaacggtacaccgaaatatgtcccctagtagagttagtaagatgcaagattgagatgccagggaacggacaaagagtgtaaaaatcatcccatgagggctcgcctgattcccagagtggattctcgcccgtcctatcagacggcatcaggtgaataaagtagagtgagctgtacaataaccgcacgtttgtcaagttcgccgtgtcatctagcgggacctgaatcttgctgaagacatcgttgttccattcttcgagggccgcgtctaccgtgtcgttgagtctccatgacggaatctcgttgcggatatacgaatgtgccttttctgacgagataaaggagattcctacccttgagctaatgctcagttcttcatgagtgttccaactgaatatcccgcccacacggtcattcatcggccccgacgacgctgtgttggtcaagttgccatagacggggaaacttgactgcccatttgcaaggccctgataccctcgcattggatctgtgtttggccctttaaatactcgagcacttcctggtgccttgtcaaattctccgtagaaataaactgtgaaaggggcgcctatttcgagtaagaatacttcagcatctctctcccacacaaacttaccattattccagcccccgatgtatgttccgtagcctgaatacgcctgtccattgtcaaggatatggatctctccaccaacatagaattgactgtttggatcatttggggatcccggaagatactaaggtcgggttagcctcagcgtgatgccaggttccagagacttacgtgagagacatcgaccaggatgtgtttatcacctgcgggaaagctgtactcgatgattccagcgtggcgagagcccgataattctatctgaactccattttgcagttgcgtcttgaaatatcctacactagctgtatcgtgaccgacctgaagactatgagcaagtgcaggcaaagagaaatacatggcgcataccctcggctgactatacgtcaaattgtcaaggatgtttactggtggatcgatgtgcgtcaagggcatttgtggaatgattccgtacttgggagcaccgccagtgccgctctcatgcatcatcgctagaaccggttagacaaatctttcatgtagtcaaagacatacttatggcagtcacatttccgtctggagaccagcctccattcagcacggccatgctccagttcgccgcggtggtgtcgatgcccaccttggctacgccaaagggtcgagcaccgccgacgaagatatcgcctccaccatacccctgtcctggaaagggtccttcagagcctatgaacggattcacatattgagaataatccactgccgcagctacgcccatagtaaggctcaagagcgagacgtttctagcagacattagagacctcatggttggtcataggaacaagactgcacgctcctcaccatgagaaagaggggatacttaaatcccagctctgcatcttgatggcaccttcccctcagcaatggtagtactagttactccaagtgagtatgcggagcgaccaaacagacgagacatcagggcgatctacataccagccggaaaatcccaccgctttggaatttatccgatcggaacagccgcacagcaacacaatcgaaaattaatcctcaattttgtcccgcattagaacgagcctcaaatccaccccctctctcatcatatcatccgtcacaatgggcgtcgctatcgacaagtgcgagacacgaccggctaacatcgaggccattttgagcggcctcgaccggtataacccggagaccaccacagtattccaggactacgtggttcaacagtgcgaggaccggacattcgactgctatgccaacctggctctgctcaagctgtgagtgcgctttacaccataattttccgtctgcgattgtttttgggcctctttagtgggggcatggcttgcatgatgtagaattctcatctattatcacgtttgctattacctgacaccccattgggcatgttgagcattattctctgaaagccaaactgaatcaatgacttggacctcaaaccgttcttggacttgcgcccgctaactaccttcgtggcagataccaattcaaccctcacctgcctcaacctgagaccggtcccaacatcttgtaagggcctcactgtcttccctttccggcttttcctatgctcgcctggtccccgctacctcagccttcccttttcgagccgaggcacggcgacagaagccacttcgcgatccgcagaactcctggtttcgcctgtcggccccagcgccagtcgcaaccgatttacactgtccgaccttcgcattatggtaagactgcccatcctcccggggggctttgatacagattggtaggtatgaaagaggtaaattttgtttctggatatttttttttttctttactatatatnnnntnnggcacgc

SEQ ID NO: 12748 - DNA, 315 bp, Emericella nidulans
  unsure (1)..(315): unsure at all n locations
ccgaattaacaaaggcatcagaggctgtataatttgcttattttggcatagaatataataccgtctgccacaaacgtgncgcaaatatcccgatgagtctaaggagaacgaatgcccgagagtgttacgngactngggtaaccacagatcagtgctgcacaagttcgtaccgggcccggaaaagccaattgggcgggtaagcagtgaatgtccagaaaacaaaccagagagagtagttttcagacangctacgtagatacgtctaaaccgncaagcctgatacctgtttctagttgatcctatcaccccagactg

SEQ ID NO: 12749 - DNA, 1098 bp, Emericella nidulans
  unsure (1)..(1098): unsure at all n locations
cgatggtctacaggtacctcgtcgaagatcgccggtagggaaggttgccacctgcgtgtccgtgttcaccccttccacgtcatccgtatcaacaagatgttgtcgtgcgctggtgccgatcgtctccagaccggtatgcgtggtgctttcggaaagccccagggtaaggtcgcccgtgtcaacatcggccagatcatcctgtccgtccgcacccgtgactcccaccgtgccaccgtcatcgaggctctccggcgctccatgtacaagttccctggtcgccaaaagatcatcgtctccaagaactggtgggtttaccccctgttcgtcgtgaggaactacttttcattttcttcaggagggctaggttaagtcagttctggctcatttccttctatttcattctttgttctctgttaaattttgtctatataattttacccttttctgtttgtcttatttattaaattttaatatttttctctttctctcattttttgtcttacattttattctattctttcttttatttttctttctattacttatttatcctatttctctttattttttacttatagtatcttctatgttatgtttatgtggtgtggtttattttttatatatttatgataattattatttatttttaaanccattagactcattatatctcttttttttcttcacttactatcttctgttctatcccccccccccttctcccatttttaactaattatatttaatttttataatttttttatttattatttttatattttatttatttctattacttcttatttatcccccactcccctatctttttcttgactattatcatttcaattttaatcttcttctaatcttggtaactaatacaagtataagtgattattattctgtattgtataattatactcatatgattatttatattctttattttttgaactatgttgccnccctctttcccattctattctatctttcaccttaatattatataagttattatttattttatattgtttagtaattaattttttgattcctcccactccttcctcttttatatctcctctctcctcctccccc

SEQ ID NO: 12750 - DNA, 148 bp, Emericella nidulans
gtcgcgatagcttaatctacggttggtatcaacaatacgatgcgtcggacaattagactaaatacatgaagcgctaaacgcttttctctcagtacctcaagatagtgacctacatggcataagctccccggagacctcttaggacttg

SEQ ID NO: 12751 - DNA, 1113 bp, Emericella nidulans
gagatgctgctggtgacgctcagggtgcgactgcggagacgaaggcttgaatttgatgtacggtttcaaagaccgaattcgcatcataagtcttagctcgtcattccttgatctgatccgatatagcttgatctgcataggaactaagaggcatatatggatgatcttgtgtcatttgataggtatcctatgaaaacggacatactggttattatatgttagtcaacatttgttatcaatcttaatttgtcaatacataatttatttttgtattttggatattatttttgtataacttatttatatcttactctcaattatactgtattaaaatcttactacaactgtgttaattctctaatactttattctcttattttataattatttctattacttcatattatataattttattacttttttctttttgtttttatctttatatcatttttctatatttcatgttatttaattaactatcttaaatatcttatattaattattatttacactatatatacttaataattatcaatgttataatcattataaatcattttttctttatttaaattttttacattaataataagtaaccacattcttttctatacattttttcatgtttatgctcaatattaattatattatctaattcctattatatatataaatttacatcctcattactcttacatattcattcatacatactattattctattctatttttacctttttcactatattactacccttttatatacttattattctctttttatattattcattttacatactttcgtctcttaatatattctacattccataactctattaagcttttttcatatactttttctttaactccattccttttactatcttttctttatatatatttttcacttcacacttatctatttcttatattatatatatcttacttatcaatatccacttcctgtttgtcatccttacattcaattcataattctgttttctttttataaatatatcaatctcactcattatttctctcatatctactatttcaatcttcttattctttcattctttcattaattattacattcataaccctt

SEQ ID NO: 12752 - DNA, 326 bp, Emericella nidulans
gggaaaaactcccgagagacatgaagggaggcactatgcagcggagagctgattatatttgcaggcgaccaagatcatccaagggggccttaggggacttccgatggagtggccacgggaaacgaatgcatcctttttgttcgccaaatggaccaagcctggccggtgatttcttcccccggaagattccaacggattattacaagggtggtcgcatatcgccccgggtgcttaatcattgtggataaaccctttttataaacacatgggatacacaccaggcttgtttggggggtactcgatcaagccatgggccggccttttga

SEQ ID NO: 12753 - DNA, 610 bp, Emericella nidulans
gggaaacccccgggggggcagccgagtagggaacatgagaatcagagcttaatattgtcatggtccactacatcagacaccaaggggcttttgggacactcagccgggtgttactccgaaaataaagcctgatgtcaggactaagagtggcccgagtttggcgaatagttgatgctcgctcaacccttctgaggatcttcaattggggtcacagttgagccgatgcaacatttgcacgtcgtccagagaattggtaataacgcaattccactgtgctgcatactttatggggctctgtgccgaccacaggtcctgactacattacgcgaaggaagcggactactataggatgctggttgcggaacgaacaggagtcaatcacacatcggatactgtcgatggtcacatctcattgcttctaagccagtcttaatacgtgagctgacagccttcagggcttgacgcattagacgttcttaacttgagcaagatattgggctactgagtccgatagtctacacagaagcttgtagatataggcgggatgaggacggtagtaacatcgcactgaccctagactggaggtagcccacatgttgtgatgcgggga

SEQ ID NO: 12754 - DNA, 151 bp, Emericella nidulans
agcgtcactaggtaaggaatctttcggaagaacacagctacaaggtgcatactatatagaggctgtggagtattgcaactgctgtgctgggacatggcaatggaacaatatgcatcagaggattcgcgtcgtaacgctggtacagctctag

SEQ ID NO: 12755 - DNA, 197 bp, Emericella nidulans
gtggcactccattccaaagaatggacacgatacacaagcgcccagaggtagaaaggacccacgtcgatcaacaagtgaatgagccaaagaaatatgatgtagatgtgaacaaacacaaccacccctctcaacttgaacgaatcgtcaagaagcccgtcgagatcgtaggtatccgcatcagagacgatgtgtatatc

SEQ ID NO: 12756 - DNA, 111 bp, Emericella nidulans
ctgggccatcgcttctaggttactaataagtatgtttaggtttacattctatttattaatttgggatttccaacatgctctgactgaacacgttagtcatggagcctttcc

SEQ ID NO: 12757 - DNA, 894 bp, Emericella nidulans
ccagctagcacgaaaaggcggcgaataaggtgaactatacaaatttttaataagaaagaaacatgtatagaagtagtgcttagaacgtaccagttagatgatgttctcaacgacaaaccttgatagaccgtattggactgccctgactcctgagactggtgaaacgcccgacaggcagcctctaatgcgccctgagggcgtctagctgctcatatagaggacctgaaaactccgtagccgtgtgaattaatacggtttttggtgaattttgatacgcttggtttttttcgttagttggaatttttcctcatgaaaggacttttagacattgttcttaggaaagataactctccatttacaggggtataagccttgaaatcatataagaggcggtggtatgattctcttcaggcattaaacttattagaattttttaacctcttccttgagcttgggggttcttctgctgtaccatgttggattataggccacggataatggggtgctttaggacaaataacagggccctgaactggtaaaccgggttggggtgccattgtaaaattacttgtcccgcactttttttaaatggtaacaattctcctggcccggtttcttggggatattaatttgcaagctattacactggttgggggaacgacccttttggctattgatagtttctttttggctttggcgtccatggagtgacacataaaccttttctctttccaattttgaataaaaacaggactttcggttctttttaagagtttaaaaggtaattttggaaacggattctgttatagaaaacgcctaagattgtattaaaactttgggtcagtttatctttttccttttgggggcgggtaaaaaaattctctcttgtgtttc

SEQ ID NO: 12758 - DNA, 988 bp, Emericella nidulans
  unsure (1)..(988): unsure at all n locations
gctatttanttttacggtcgttgatgaatgccgatgatgatgatggtgatggtgatgctttccttttttctgcttgcgttttgaacgtttatctgcgggcgcacttggagagctattataactactgtttttatgctttgtagtgatggatcctgcagcagcatctttcgattccagccctgcttccttcttcaaccgggacaccacaggtcccatgacgaattcactttctgcgctgctgtggtctgcgcatgggctgcgcttgatggggagcagccaatcgattatggagtggccgagcacctgttggagatttttgagcgggctaccaagtgcgaagggattttttccaggaagggtttggaggatggcgaagatatgttggtctgctgagggatctgttgagggtacaggaggagcgcaataggcgttgcttcctttttccgttgcaggctgagtttgcattacagaccaagggcggggttcatgtggtaagggatattgtttttgcgaaaatgtctgacccacctttgtctggttgaatccctaaacaaatgttcgtacgcggattgccatgtcatacagcgaccgtcggtgaaattttttttttgcaatttaagccgcaagttttgaaggttaaattcttccaagttattacccaataaacattcttggttaattgttgagtcgtctacattaaggaagttcttacatcactctatgcacatgggtactacctgctgaaaaataaattctatcacaacaattaagttgggggttgttgttgttacaatacgggtatcacctccgtcgggaagataagaaaagtttggaaatattaaaaaccgtgggacggtgttggttcttttttttttttaaaaccactctaactgctccatattatgtcggctgcacagacttctatatttctcatccaatnttnntatattactcttctgtctatttgtttatctcccgatctcctttc

SEQ ID NO: 12759 - DNA, 102 bp, Emericella nidulans
ttgtaagtccgtgagccctgagataggtagctgcggtgtagcttgagtgttgaatcgggcctgcgatcaggggtcgagaccagcgctcactgtgtccaacgc

SEQ ID NO: 12760 - DNA, 420 bp, Emericella nidulans
ggtaatacttttgtggccatgccacgggcaaccttacgggtcaagcacactggggagctagcaagtttttccctgatggcttaggccccatggacgtggaccgatttcacggccatatggtgccatgagcaactcccatgaaggaccattgaagggggcactccagcttgtgccagccagctaactgaaggggctacctctcgtacttcctagacaagtgctcgcacggactgccggtaccaatggatgtaactggtggccgcacaatctcttgggtgttcacctttgccctcccatggactcacttggatttctggagatggaattagccctggctatctccatcgactcattccacctggaaatgcgttcatggggccctaatcatcggaatcctttaacgtaggccgctcgatgact

SEQ ID NO: 12761 - DNA, 1575 bp, Emericella nidulans
taccctcgagctcacggccggaactttgaggtcacgggcaacggtaggcccggtggcgatgatcacagcatcattgctcttgcggagagaatccagggagacttcgctgtcaggaccaacagacacaccggtgacaaacattaaccgttcggcagccatcaggtcgacacggcgctggacaatcttcttgtcaagcttcatgttagggataccgtacataagcaaaccaccaatacgatcggcacgctcatagacagtaacactgtgtccaacgcggttgagctggtcagcagccgcaagaccagccggaccagatccgatgatagcaacggttttgccggtgcggacgggaggaggacgaggaaccatccagcccatctcaaacccacggtcaatgatggcacactcaattgacttgataccaacagggtcttcgttaatacccaagacacaggcgccctcacaaggagcagggcagacacggccagtaaactcagggaaattgttggtcatgagcagacgattgagagcatcctgccactggttctggaagacaagctcgttccacttgggaatgatgtttgagattgggcaaccggtatcggactggcagaagggaacaccgcagtccatgcaacgagcggactgatacttgagctcatcctcagtgagacgagaagagagctccgcccagtcacgggtacgggtggccgggttacggtacttttcgctgcggcggttgtacttcatgaaaccgcgggtcttgtcaaggataagagcagtcctcttcttctcgaccttggagtcggtgacactgtcttcaatgtccaacagctccgccttcttggcatcgccttcagccttgggcttctgcttctcgacaggaacactaggcaactgagggatagtggtttccgccttcttcgcagcggcagccttcgcggcttcttcctcgagagtacgcttgtagtctgttggtaagaccttgataaagtgaggaagagcacgggtgaagtccaagaggatacgggcggccaactcggagccggtatagtggtggtgatcctcaatcaaaccgcgaaggaaggcaatttcagctgggtcttcaaggccagagcattccaccatctccatattgaccttggaaaggaagtcctggttcatgtccagaatgtaagcaattccaccggacataccggcagcaaagttacggccggttgaaccgagaaccacaacgcgaccaccggtcatgtattcacagccgtggtcaccgacaccttcaacgaccgcagtagcaccagagttacggacagcgaaacgctcagcagcaacaccgcggaagaagcaggtaccacgagtggcaccgtacaaacaggtgttaccgacgatgacattctcctcagccttgaaagccgcaccgcgcggggggtaaacaattagacgaccacctgacaaacccttgccaacatagtcattcgcatcgccctcaagctccaaagtgataccaggagcgaggtaagcacgaacgattgaccgccgatccttgatgttggagtggatggtgtcttgtggaag

SEQ ID NO: 12762 - DNA, 242 bp, Emericella nidulans
  unsure (1)..(242): unsure at all n locations
ggcgtgactctcgtttccgtcgcagagcggtgtcattttggcccagcagtcgcggatctggctcttaagctgggtggtgagtccagtacaggccgtcttattgacgttcaccgattgtcggggttggacgaagcctggccatttagatctgcacccaagaactgagatcaatgcgctgtagatggcgtcttggtcggaatcgcagattacgataggnaccngtgngtggtttgtgcttgtcc

SEQ ID NO: 12763 - DNA, 667 bp, Emericella nidulans
aaacaggaggcgatttagaacaacctcgggggtcacctgatatgctgaggacgctctccagcctctaggcttgaaatccaaatagcatatctcaccagtggtccagtttttaatctccatcagaccataattatcaacagtaggattgccagtgatgatgccaataactgaggacgtaaccttcttccaagtgtagagctcttcgcctcctgatacaggacgaagcttcaaaaaccacgttcccaggagattgatgtcgaaagacttgccgtagaatttggacttgagagatgattccccctaccacggttagctaacgacatatccttaaactgatatatggcagtcggaacatacccagtagtcccactttggcgattcagccaaggctaccccaatcggtggatggtggctaacttgctcaacgaagaaccgatagcccttatctggcctaacatattcaaaagtttcacctaatagggggttgaatggtttggcgacacgtccgattgtagaagcgtattcacttgctgcatacgcggcgacatacaccaatcgctccatcgagtcagtccgatcggcagcaacgtcgagaagatccgtatactccagatcttcggccacgcgctggagaagtgatgtcggctcgttgaaagagacagggaga

SEQ ID NO: 12764 - DNA, 1249 bp, Emericella nidulans
cataaagatcccgcaggatgtaaagtatttctggaaattgcatgcgaatgccggatcctaagcttcttgccctgttctattaaacagtattcatttcgacaggattgcacgctcagcaatactatatacggactcgcgccacggctatttattccagctatgggtgcgagtcaggaggcgcagaaacagcataaaccgacactttggcccaaaagactgccaatacaaaccacattaagatataagaacggggggtgagaataaaaagaaaatagaaacaggttaatcagcaattataactcatccgcagcccaactccaggcgcctgcgcaaactcgacgcttgtcttgctgctatatccattcgaaatactcagcctgtaggtcatggtaccggcacaggcgaagctattgatcacccgattactcgctccagactcgaatttcacgctaccgaccagacttattggcgccgggcaatagtcccaagagatatcaatacctcttggcgagcggctcagcgggccagctgaaaagacctccacgggtgcaagcccgacggtgttgaccggtgtgccggcagggatggagtaggagagcgtgcaaccccagacgccctgcgggacggtaaactcgatgaatgtgtcttgcttcttggcggcgtttgcctcctgggagactctgaagcctgggaggtaggaggctaccggctgggcagcatcgacgcgtgcgatgctagggtagatggttgtgcatgctgagggagcagggactgcggtcgctatggagacgagggccgccaggaaggagatggttttgaagaagtgcattttggcttcgcgattgctcgattgctctggttcggtaggaatgatgagattgcttgttcgagaacactaggtttgcggtggcttcgtctttgatttatatagtcgtctaaggaagggtgaatcccttttaccattaccctttgcccttcgcccttcaccgttttgcagtcgtctttcgcctattctgcctcagacgacactcatcaaggatcagccgatccacgagccaccgcgcgaacaagtaagacatccagccacttagtccttcagtgaagggacctgacctcattgtgactcctcttcatgacgtagattactttcttcttctctcaatgtgcctgcaattcctaggatggcttgcgcgattagccctatctggccatgttttacccacgttttcccctcaagcccgtatcctcg

SEQ ID NO: 12765 - DNA, 494 bp, Emericella nidulans
atacctttgatcgaacccgcactgcttaaaccgcatgctgcaatataccacgcatccctttaagagcgctagatccgtctcccttagcctcgagctcggatgcttcatcagccagattgctaacgcaatgcacgccagacccgccgtaccagctgggatgagtgcgctgtctgcgccgtaatcttgcaactcaatacttaacctagcaataatgcgcgcgctgttcgcgcagcttgattcgccatgtgtgagacgatgtgagaaatcctcaccagagcaatgccgcttcacttcttcttcgatctctgagcgtggggcgacaagggcagcgcggtgcagggctatcattgatccatggtattcgatcgacaggaacgccaggatgtggaaatcagcactagacgtgaggaggtcgctgcctggacgctggtcggaaggaattttgttcgcccaggactggaggcaactatcgagacgggccgtatcgaggagga

SEQ ID NO: 12766 - DNA, 518 bp, Emericella nidulans
aggataaacccttggctgcgcccctcgagtaccgacatcgcatggtagcgcatagtgttccactactgtactgtaaggcgacggggtgtactttaggctgcgataaaggaaactacatgacccgcaaagggagcgaagacttctacagctggctactgcccacaactcaaacatcgtgtcgcgcgtgtgaacccactcaagggtccttatatagtgcactatatcttttggaactgtgtactgagtggtctactcaaagcttgaggcatactgacagactgctatgtgtagagattattgctgaaaacgaaatatcacgtgaccattcatctcgtgctcacaaagcgtgaaatgaagcctctaagaggcatacaatcaccggcagtaccctctgtatggattcatattcgcaagggatggcactaatgcaacaaattctaaataccgaaataatatgttagaacgctctctagaagcttagtgaccaaataggctttacaccaaatcgcaccacgaag

SEQ ID NO: 12767 - DNA, 1735 bp, Emericella nidulans
ccgaaacagttactttccacctcccatccgagtccaaactataggccttgtaaaatcctcataccaaaaccctcccaatgcattttctactatgaacccaaaccggaagtactccggttcgccaggtacaacacgcgtccagttcaaatccggaagtcgcacgtcaacggcaccatcagaccgaaacgcgtggtatctctcgacgtcattcacaattacactgagaccatcgatgtcagagggtagagatcggagagagctaaaagcgaaggagatgatatctgggtttcctgaggggatggtaatgatatccggtggtatatatgggagcatagagccgagctgcgcgccgtcgagtagggaagcggatgtttggaggattgaatcaaatccccagcgcgcaatgccgttgatgaagaggcctaccagaaggccctggtacagtagagaaggacgcgtctggagcgtcgtaccgggaaggaaaagaagagcaaggatatagtgatggatgcggaggttcatgcttggtacgaggagaaggataactatcccggcgataagtgtagcatagagcgccagcattttcggcatacgcccctcgttgcggaaggcgagggcctgcgtgatgacaattgcaaccaaaatgactataatgatgatgagggccggaatggcgccgggctgttgctggatgtcgtggggtgttaggcgagaagggggaatttttgtcgacaggtgtctgtattgagggcgccaacccagcagggccccagccagaggatcgtcttgtcccagtgtgctgttaggtcggatagggtgtgccggatacagaaatggtagattgcgaagccgacgaaggcgcacgggaggaagcggcctagcgcggttgagacgatttcatagtaatctggcgagtatgtggggtcggaggagagggcaacttgaaagtagacgatgaagaaaatagatgcatagaacgcggctggggatgcgacgaccagagagagtattgttgatacgaccacggagaaggtgaagagcggccagcggatatcctggcagtccaagccgctgtgttctgatgacgcgccagtgtcaaatgtgaaagataaggggaagtgagacgggaaatcgacgcttgagatttcgttcctgtcgactgccgggaaattcttctgctcgcctgttcgacgaagtatgccgcagccgcctttactatcttctagtagtccggcatgcattgcagcttggcagatggaggaatcgcctctataaacagagtcaggctggctttcggcggcagcacctccgatgaccaggtgctgatagttgatttcctttgggcctacaaaatatggctcgaggaccatgaagcccgagcaacccgcagggcaccggaacgcaaacgtttctccatcgaacggacgacagtaatctccatcgagaccgcagttagttgcgttgctcctgcgctgagattagtccaagtcttctgatataaatccaagatcgtaccaaagtctacttgagcaagaaagcttcacagggcttccaaggccgggtatctcctgtcccgcaacgctgacatgtaaaatagaaataaacgccgcgccccacagtaggagacaggcggaaaggagacagaatcttgtcttcgagctgtgaaagtatcgctcgatgagacgaccgggagccgtttgccatcggcctagccaaaggatgattcgggacgtcc

SEQ ID NO: 12768 - DNA, 4579 bp, Emericella nidulans
acacacacctcagcgggtgcttggagagctttacctcgccggagaagcttatggccgatgtatacaactgcagcggctgtggcaaccaccccccagaaggcaacaaagcagctccggatcaagaaactcccggcgattctgtgtatgcagcttaaggtaaacaccatatccgtgacggcaagacaacgagatatcatctaccagaagcagcgctttgaacacaccttttccgtctcagaaaaagttgaaggccgtattgacttccccttatcaatcaatatgcttccatacactacgaaccccgactctgccgttgacaaatcacggtacacgtatgacctgtcttcagctgttgtacataagggcaaactcgaggcggggcattactacgtctactgtcgccagggtgatgaggtttgtttctcttgcttgcatatttactctcaccatctaacatcgccataaaacagtggatgctcttcaacgacgatcaagttacccctgtcactgaggcggaagtcctcggtgttgacgcttatcttctattctataatcttcgctgcctggccaatgctgcgtcgtagcccagccagcgaccattatttccatcctgccagaatgatgtcatcatgtttttttgctttagcgcttgaggttgagactaccgttctattggtgttacggcggtgcttcattttatatcttctattcctgttcgttccatgtttctgtcgctagttacgtgcatgcatgcatatctagtcatgtaagatttatgagtagaagtagatgatgacgagtatcgtggtatattatgttggatatctacggatggatgcacggccgggttgatggtggtatacagaatgtggttcacacaccacagccgtattctcattatgtacccacttatctacctacaaatagaactcgatgtttacaactgagcgtttaactttcgctcgacatagaccaaggctgcagcggacgtgagatcacatattccgcttggcgaagttacaactacaaccatgagttaaagcagataagcttagggtcagtttacttagtctcaccgtacgactactatgtattctgtacttgtagctctactggtctgccgagactgtttaggcagtttgcgatgagctgtaagaggtgggaaatgatagagcgatatcccgtggcactcctttagccctcagtttagtagcccatctttgctcatatgcgataacgccaatcgaacggtggctcaggcatgagatagaaaaacacccatgaattgagaagttgatattgtctgtcaacaccgacgacgcgcaaacgtccgcccgcgcaaggctcagttcgtcataaaaaaaagaagagtcgaccgatcctttttctaagtatccgtaatttctttcacattttttttcattccatcgcccccaaccaagtcctaattccgcatcgcgtgcctgtgttcaatagtcctggcctttcatgtcgcgcccgtcggaattttagtcttcaggcaaagcgggtacgtgtttcggaatgaaatgggattcgacttcctccaagtagcatagtctattgacgggctgagatggcaccggtaccggtacggacacgatacggaatcgtcatgacgggagaaagttggtgattgatttatcggaactgaaagcaaggccttgttagcagcgttccccaatgggcttcctcgtcaaaaccaatcgacaattccaagttgttcaccacacccgtcttcccaactcaacccctaccaaccaggacggaaataaggagaaaccaaccttgaagaaaccaatgtcggaggccttctcacggaagcactgacggcagatgtccatctaaaccaagtcccaatcagtcaccaaatcccagcattaccaagctcaatctcgaggaagaatttcataccccgtacttgcggatcagaccggcgcggtgagcgcagacacggctgttcgaatattcgagttagaacccatcaacatccattatatccatgcgaaatcattgtccaattcccagttccattgcttttccgatatccacttattttcgcatattcgccaaaattatagagggaagaaggctacacaccattgacgggaacccttgccgtacctattgcaaaacattggttagcatcacacccaccgcatcgaatccaacatgtatcactcgagctcaaccccgaaggcaaaggtgtacatacttgcgaggacggctgtaccacacagactcgtgagtcatcttgaataatcggcgaggatgagaacgtcgggaaaacggtgttgacgggagggtggtcggtgggcttgctgtcggcgtcgctggcgttggggacggaaggaaaaggttcaggttagggtagggttggaatttggcgttgtgggttgctgactcaggctcggtgctgtgaccggggcttggcggatctttctcgcttctttatggcgctaatcctttatggtatatagtcatcatgtgactgaccggggttccccagatctaccactcatcttgagttatgttccttctactagcacaatcaatattgctgtgttcgactgtttttaaagtcctgaagaccgaagacagactcatagctcactagcgaaagctataaaccttcatcctccagcgttccattctcgagagcacattgagtctacagctaaaaactcgattcccagcatacagcaggatatcgagtcatgagccctcagctgccctctgcccttcggtgtagtcaattgcccaacatagtattatagtcccggatttccatgtctgtaactcacagtcagcagagctttgactgctttgggcttcccggtattgggaagaatcttgccgagcaagcatgaacctcgtgtccaattcagtgatagctcaaaatcataaacgccagcagctccgaagatctacctgagcatatgacatactcggtcagtgctccccagtgagtgctgatattctagtctctcaaattcgccgctaaaaccggggtcgatagggaaaatccactgagccaatttaaccagcgccgttagcaacggtcacttcatttccatcttgctctgcgcccttgcttttgaccaaggggaatgcaacagcacatgatatgttgcagaatttgaatgtatttgggcaacttctatccctcgcatgccggaaaatgccatcagcccggtaatggacgtccaacctagagccgggtattcactgctgccctcccattagccagtgtatcgccaggcagtatgtgttggcctcgtgtgtaaatctttctcaatatatctgttatatctgtactgcgatatctactgcgatggtggacttcacagataaggcgcctcagccacaccgttgaacagagtaagcaccacattagcttcctcatcggtcgttcttttacgtttggggacggcgttgaacatggccgaaggcaaggcacccggcgtatgccatgctttgccagctttgctcagtggcgcctttgctggagcgcatatgattgtcagtatgcattctttgacataggactggaggggtgtagagtatctgcggggcgcatcagatcgaagccgagcccatcgactttagcgaaccgagtgaacctcgaaagagtgagttccctgtatcttctgggatgagcggcacgggcggggttacttgtgctgctcaggcgtctagcgtcgtgatgaacagtcggctagagcaagacccttgaaagtcgactcgctctcctgttgctggtgcagttcattggatggccgatggctgtaccgatattacagtagacgagatgggaagtgatagctcaatctatcatcgatactgacgtctcgaaaacagatatttaccagggcccgtacggtacagcaccacaacagaggggatgtttgtagtcggtgaggcgacaccggagccttggtccacattgtcaagaagatggtcgagccttgttcaagaccgcattgggtaccggttaagtagcctagctcctgctgctaataaccttgatttcctccctcgaacggtaataatgccatgttttcaagtgcgatcaactgcggcactaacctactctcacaagtgttgtactccgtaactcgtgtgttttgtatacttcccgcgggcctcgcgggagatccgaaccgctctaccagtttcaatagtagcaggtgtgaaaaaaatccaactgcttcaaattggccaatgtcaatatcgatgtcaaggatagcgatacagtcctacagtcgctatgtcgctcccgctaccggtttttcggcaaccgtcaacgacgattgggtaccggcctattttatggcactcgacggtcgtacttaacaatgagtctggcagttcagccagttgtgcacaaatactttccatagcttgaagctcggttacactattgagaaggcactctgactgttcgactggctggcggcagttattgtaggtagtttcgcacttacgcagtcggcccaggcaagtggacatggaggggcaaagtggggatcgtgctgctgcagaagcggcaaataaatat

SEQ ID NO: 12769 - DNA, 461 bp, Emericella nidulans
gaattgcagaagaactccttggcgggtgaaacttgcggtccgcaggggcgtttgccttgagggcgtttttttggagaagcactggactcagggcagggaatcttgctgaggtcgtcagacacaacccagcggaattgagagctttcataccagacgggggctgggcaggctcaacaggcttggtgggttccaacttgtgtgcaaggggctgaggattgtcggctccgccaacatgttggggaccttgtgagccgaacgagccaaaggcaggcctaactgtaccgaggatgggggacgcgctaactattggtgtacagactatactgtcatttattgaggcaaaccagcactggccgctggtcttttgaccagccttacactggttctggctgggctcctcgagagacccggcctgacgctgggactgcttaatgttagccacatacgcttacccatcctgc

SEQ ID NO: 12770 - DNA, 886 bp, Emericella nidulans
cgcgatgaccactggcggttgttattcaatgaacgtagctcgattgggactgaattttattgcacggattgctaggagcgctgtgtgtgcatggaatgacgaggccgctcatatgacctgcacggtggttagttctgcctaccccagcgactctagttcagggacacattgcggattgcatgtaccaacaaatcctactggctcactctatgggaacagcccacctcgggatgtggagattctcccacgagcgtgatggatcaattgaagtatgatacattatcgggtctatatgaagacatttctgatgatgtcatcgattattttgcgacacacccaaacgttttactatgatgcatgctggcttaaccattgacaacctcacctgacatgggccacccaataagacagattcgctaacaaagagctctctatagaaagagctcgactccgaaaccagaaaggatggttttgattgcaacacaaacagctgctcaggatcatataactgatcttgcgtgagcgcaccagtatacttgctgctctagcacctccatcgcacaggaaactggtaagggaatactgtccccttctaccaatagggttttcttcgaaatgccttcagctgatttctttatcgatttcccaagctataatcactcatgggccatgtcattgggaaaagcgtaggacctctttaagttccggcggaaatcccaaagcgtttgtaaattgaagaaagcacttatgcatttctacccatgttattatttctcaactgttctactttccaagctgggcgtttttttttgaactaaagttttcttttaaagtttttatttttttccttataagggaaattgttttatttgtaaaattcttaata

SEQ ID NO: 12771 - DNA, 1176 bp, Emericella nidulans
ctcgagcgtcgtcggagcatagtccgcgatgctgtgttaacctttgaattcaacctccacatccccaacccttttcccgaccaccctccgccgccgtatgatgaagtgattgacgatctgcctcccgagtactccgaggccgcgccgctagctcagcagaaatgcctggcccaagacgtggacttggaggaaaagagcgattcgagaaacaagtcgtcgcatcaaactatcgacttcgagagccctatcggcattagggagtataaaggcaagaagaaaaagggagggggcgcgaagaataacccgcccccccctgcgaatgatccgcctccgccgccaccacccgaagaaaaaaaggatccaccggacgaaggtgccggtgatgcaggaggttccggagatggaaatgatgacgacggtgataacggtggtgacggtggagacgaggatgacggctggggtgatgtttggggcacaacaactacaaagaagaagaagaagcagaaacagaaagaagaggaggaaaggctaaagaaagaggaggaagaacggctggctaaagaagaggaagagcgtaaagctcaagaagaggcggaacaaaaagccgcagaagaggccgcatcagcccaagatgcagcactcagctgggcggacgacgctgatgcgaacaacgacgactcatgggctggagttggtggaaagaagaagaaaaagaagggcaaggtaggtattttgtgtatctactactaaagcgcttgatattgactgaattagttggaaccaggcgggccggagccgccgtcgaattcctttcaagacgtgagtctgaacgatggagcccctcagctcgatttgaacttcgactcgcaaaaatcaaccggattcggttttggtgcttggggtggtggtggtggtggtggtggtggtggtggtgttggtggtggcagcaaatggggtatcgacattccaggtgcagctacaggaaaaaacacgaacccatggggcggtgggttcaaatcagatcccttgaacacgtctatgggatttggttttgggggaggctttgatcctacaccagctacagcgaatggcgactccaaggataccaataatgatgatggctgggggggatggaatatatcgtccaagaaaaacgaacagaaaaaagtggcagaa

SEQ ID NO: 12772 - DNA, 531 bp, Emericella nidulans
ttttatgctgaccggacgctgaaaaacctaaactaccatgaccttgggagccatcaatgtggttttctggcaaccacctagtgatggctagaggtatttttgacaatcatgtgggcgggaaccatatgaactgcatgaacagtatattcacaaatggcgctcaactgcgtgattgtctatcagctgtgaactctcgaggaacgtgactgggacatatctacagcgggggaaacggcagatgtactataagttatcactacagcgatgccgaatatgactacgactgcatgatggggcggcctagacggacaacatgacagtcaggaaccatgcccagcatgcaagatgatcacgtcctatcagatggagtgggaagttaaactcggtcttaagcccgctatacatcatagcacgaactccagccatgctggaccaaagccttttgataccatgactattaacgctcgtttaatggttgataatgtctgaatggcgacatgctcaataatatacacacactaaccgggtttg

SEQ ID NO: 12773 - DNA, 3972 bp, Emericella nidulans
acggagcccagttcccgcttgcaacaacgtttggtccttcaacaacggccacgcgatcgaagggggcgaagaagggcaaggtttgttcgaaggaaatgtcttccaggaagtggctacagtggtctcgtcaactttctgggaagctggggatctgttcctatcgtccgctgatggaactggcaatgatgcctgcgcaagctacattggccgcaactgtgcatccagcatttacatgaacgacggcggcgattacaccagttataccgatgttagctggctgggtgattggtctggtttgaccattgcggagtgtgcagaggcgagagagattgagggcactgtgccaacgagtgctggaaacacgctctaggctcacagttgaacttctgacgtggttgagctgtatttgtagcccataagggtggtgagaaaatgactagcggccgcatcacaggtgtatggcagatgtactatggtttatttgccttcagcgaggacccaaaacttttctccataattaatcgtctgagaccttcaactggcggatattatgagaacagattggtacgccgagcagtaatggtacgttcctaagtatggttgatcttatacaaattgatgggaactatttcagaggatgcctatagtctggtagtacatcatgtatcaacagctccatggccacggttaatcgagcttctctcatgtccattaccgagatcaccagtagaaaagatttatcatcaacaagatagcaagcaagtcaaggtcatacgtggtgcgctaagctcaattgggtaggatatagtaaacccacgacccagcccgggccccgccgacttccaagctagcgaggggcaccatcctggcagctatccaggaacagtcaacatgctcctgaagctaaaaaacttgacttcataaatgatcccagcctcacatggcaaagcccaagcgagtcgccataattggtcggtatctctttcccctaacatcctctgcgggccgctacctaacactgaagctaaggcgccggaccttctggcctcgtaacggcaaagacgcttctacggaactttccacccggtactttcagtgctgtcatcttcgaaaagaaacctcgaattggcggcctctgggctgtggattacccatcgacaccctacctcttgaggcccactccgcacttttcgcatgattatgagcttcactgtaggaaacaatatcaaggccgagcactggtaaatccctggatgcgaacaaatctaagccgcttctctgttgcgttttccgacctggcgtgggagacagccttgggcgatgcggttcctctgtttccgtacgcttgggaggtgaggaaatatcttgagaagtatgccgaaacatatatccctaaagagtgctttaagctggggaagagagtcttaagcgtgacaaggagaggaacagagataagggcaaggactgggctgtttgggaggtgagctgggtagatgactggtaaggtttttttgagcttaaccgtatgcatgaactaacgactggccttcagcagatgtggagaggcccctgtacgtaacctggaagccccaagggtacgcaaagaggtgtttgacttcctcgtcgtagcgtctgggcattttggcagtccgagcataccactcatacctggactagaggacatttcctcggttcacagctcagaactacagagtccggacgatataggtcgtctacttgagaagtctcctaagagtggaaagctggttgttgttggcggtagcatgtctggggttgaaactgcgacgtcgcttgctcttcacttatcgtctttgagttttcggccgggctcttctgctcaacagcataattatgaagtgtggcatgttgggcctgggccgtactgggtcttacctacttatctcccacacaactatgccaaagataccgaaggagacgcaatgccttttgtccccctcgatctatcgctatacgatatagcccgccgcccactcggtatgactggcatcgcgtttggcccaacctcccaagaccagaatcgcaagagaaatcagttcttcagggatatgcttggggaggaatatagcaaggtgggctcgtttcatctcggtgataatcaaggaagagaaattcagcggtcgccgtgggttgggatagctgaccattacgctgagttcgttcggtctggcgccataaaaactctggcgggcagggcttcttcatttaccaatgagtctggccttgaaacattaaatattgatacatccgctggcatggtgcgtctcaccgaaattgctgctgtcgtaatggccacagggttcaagccctctggatctctctcgttcttaccagacgacgttctttcgaccctcgaatactccaaagatgaccattttctgcctcttgttctggatagcatgagcagtgcccatagtgagatcccagacctcggcttcgttggtttctaccgcggggccttttggggccctgcggagttacaggcccagagcctcgctcagacttgggcggcggctgatttggagaacggggtatcagcatcgctatctgaggaagagaagcgctctagagatggcgagcgacaacaggtccgagacttcagagatgtccgacctactagcctccgcggccagtttcccctgggcgactatgtggggttaatggaatcgtttgcgagacggttgcaccgctccaggtttcctcttgggataagccctgatgcgaatatacggacaaccggcccggttgtgcctgctcgttatgcgctaattgaccatggtacactctttgagtatccgactttaaaggaagtggaaataactatgaaagctctaaagagtactctcctaccagatcctggtcaagcatcggtgactacgacagcagccatttttagggctttgcatggtaattgggggtttgagagaatagtttctcatgcaggtggtgaggacattaagtcatgcggaaagacaaccttctaccctcgctacccgtcaagtccgatgtatgaggcagagtatctctgcaaggaagatgcaaatgacggtgcagcaatgaagacagccatatcagtttaccgccatctcaacactttcaggtttccagggcaagccgggattagcgtgtggtttgtagacggaaagtcgtgtccgaactcagctaccgagtttgcgttgaagctgcaagtcgaaccaatgggaaaagtgacggattcaggagagatccttgttagagctgtggccatttgtgagtcagccgcgaaagaacatacctatgaattctatttcgatcgtgttgctatcagcaattggtgtcatcgagtggtttggtctgctaagagcagggatcgccggcaaacgacgtggtacagcagaccaaatgacgattagatcggttgcttaacttgggtttcttggactcacggctttatataatgcccagaattgcggcagtcggaattgaatgcgcaccactccgatttagcattggcagcaagacccacagtggaattgctccgctgcgggggaaatccggggtagatcgtgccctagacttttacatccacggaccagtcgacgtctatcggaccatatatggaagctaggtttcaagaaggtggaatcaacacaaagctgcagcactagtactatcatcattcagctttccctcctcgctgcccgcgctacccactcacgacctggacaaatgacacgcagtgttgatcactgccgaagcatccattctcctgaggactaatcccccgacaaactcttactctattcgtcagattgtgcttcacacaactcacacttgacttattttgggttacctgactggctgatcccccaactcgcgcgacatcggcgcctctccccgcgcaccagcgacgtacctgtctcccaacgcggaatccggctatgtaacggatga

SEQ ID NO: 12774 - DNA, 270 bp, Emericella nidulans
gaacgtcagtataagaggttacaagatgtactaatccttgcaaggatgagaggtatctcaaaacgtgaatcgaaagaacctcaggagggccagaacgtatgtaccacgtagaagatctaggcggtctatgcagctggtgtatatgcacccgcgcgcatatctctagaatgcaatgctgtcacgcagaacggcgacaagcccgtcatggcatacgcggatggccttttgcacgcgcgacgtacagctaggacttaacttctccagatctgg

SEQ ID NO: 12775 - DNA, 143 bp, Emericella nidulans
gcatcaaggatgtactcgaacagatcagtgtccaggacagcacagtacaggcaacggcaatccccaagatcactggtgaagacttttcgttacacgaaaggagatgggacgcgagagcgcacaacccgaggagtggcagcttc

SEQ ID NO: 12776 - DNA, 1628 bp, Emericella nidulans
tgcgggggccgcgcgctcgagaagttgttatcttcgatttcgcgggtttccgggctgcggccgcttttgtagtcgctgttttgcgggtcgtggtggatgctgcgctctgcctcccttgccacgaccacgcgtagatattcgtcccactggtggttcagcgccatcctcgccagcttcttcctcgttggggtcgccaccctcattatcagagtggattagcgcaccgggttgatcttcccagacgccgtcgatctctgtgacccagccgtctggcttcggcttgaagcgtcgcctgccacgggtacgcttcttaactccctttgagaacatttcttccatctgggtgcggtatctctccatagccttttgcaaagaactttgagattcatcatcttcagcgtcactgtcgcggtcaagcgagagaaggtgctttatctggccctcaagagactcattcacaaacatctccatggcgtgtttgtcgtccttgtcgatgaattgggaaacggcgtcgccgaaagagttttgcggaaggatggagagagattgctgagagaggaactcacgcacgagttgttcgacttgcactgtgtctagggtggacaggcgcgaaagcgctgcttcatcgagctcattttctttcttccgtgatgtagcggttttcttcttccggtagaactgcacgacatcgttcacgttcgcgactttgccgacgaatcggttcgagaaccgctggggattttcgcagtcatagctgccaccctcgggggttgaggtctccacacggagtcttacgagcggcaggggaacctccagctcttcgtcgtcttcttcttcctcttcgccctctctcctctggggacggtgtagctccagccactccgctttggcctcttcgatcagttcttctacgatcgtcatgaggaaacgggtgacttctgtgcggttgttctctttgcgggccaatttctgggcacctctttcttcagaaagcactatctcccgcattgcaaatggacgtactgacttgagtctgattggcttacatttcatctctttgcccttgatgctcaatatggcaacatgtttcggtactgcctcaccgggaaccagcgaagtcgcgacagaagagcccggctgcatcacgcgaaacttcatttctgggttaatacgagggttgatcaaacactcatgttcatgaccccagatgacaaggtcaagaaattctgggaggaagttttcaggtagatacccggtctccgtatacgcatggtggttttgatgaacgcatattaagttataccagtcctccttctgaacagagggtctgaagaacttgacttttccgtctcgaaaagtcctgaataatcgctcatctcgcacattgctcattccgtagagcgccaacttagttcgacccttctgtaatagtactggttttaactggatgttatccgactccggcgttcgtccttagtaattcaagaggcctgagacctgttggatatccaaagtcgcaaggtgtccctaaccggacggatcgttatggttcccgtgaatagagatatgggaattccgacattgatgtccaagtcttcaatagtgacatggttgaagcacctttggaa

SEQ ID NO: 12777 - DNA, 130 bp, Emericella nidulans
  unsure (1)..(130): unsure at all n locations
accccaatggcaaatacccactccaagtgcgacatgagtttcgaaagacccaacggccccnagggggggggcttaaattaaaccaccgcggcccgacaccgaaaagagagacataaccccaggcctcaaa

SEQ ID NO: 12778 - DNA, 1490 bp, Emericella nidulans
aactggacgggtcatcctttataaattctacaggcaaggcacaggcacggtggggtttgtccgatccacggcgatcttatatcagtcgagccagtccctcaggtgcattgatcgcaattcattgcatcgatagattgcaattgacccagatactatcgcttttttctgagtatcgcttcgctcggtttgatctgccattatgcctacctttacagaattctccgcctcctcccgtgagctgcgcgtcctcccctcttttgcgccgcctctgccccgcctttcccccgccttcacaaaaccatcaccttcctcttcggctctcagctcccaatccgaacagagcgaacaagagaaatatgaagtcgtcattgtcggcgccggccccgccgggttgatgctaaaccttcttctcgcgcgctatggtctctctgacgattcgcttctctgcgtcgacgccaagcccagcacgctccgatccggccaagcagacggcctgcaaccacggacccttgaggtcctgaaatcgctcggggtcgcagacgagatcctcaacgatggctgtcatatggaggaagtcgctttctggaatccaacaggtaaaactgaaggtgatgtgattgaacggacgtccatcgtgccggacgtgagcgtacccgcgcgctttcagcacgaggttacaatccaccagggacgcattgagcggattctagagacagatctgctgaggtactcgaagcgcggcgttcagaggaatacgagactcgtggatgtgaagcttgatgaggcggatggggagtttccgattgtggcggtgatcgaggttgggaatggcgatggcgaaagggaaaagaggacgattcgctccaagtaccttgtcggtgcggacggggcgcactcgattgtccgccggtgcatgggtctcagtctagagggtgaatccttggaccacatctggggagtggtagatctggtcgtggatacggacttccctgatattcggcggcggaccgcgatccactcccctgcgggttcggtcatggttatcccgcgcgaacgtattgcgacaggcgactaccttacgagactttacgtgcaggttcccgagattgagattgaggctggcgatgatcggcgggcgaaggatgccgcgaaggcacgcagggcgggcgttacgctggagagtattttccagcaggcagctgaggcgttcaagccgtactatatcagacccaaagaagatggttctgtggattggtgggcggcgtatcagattggccagcgcgtgtctgggcaattcaccgtcaaggactcgaaggggattaaccgggtgttcattgctggcgatgcatgccacacgcacagtcctaaggtacatccaaacttcaacctgtgcattccggacaagtacgctaacatgcctgaagacaaaaacaaggcatgaatgtctccatgatggactcatccagcctagcatgaaagaaaatcaactc

SEQ ID NO: 12779 - DNA, 1636 bp, Emericella nidulans
ggacggacacgtctcgcaagaagggcaagaacaagcactcgccatctctgtcttccacccaaccaggctctcgccctatgtcccctgtcacagcgtctttacctgtgcgtgtcctcgtaacttctaacaatgtcgattgctaattgagcataggctaataagaagcgcgtgcggaacacgctccctggcgcagggtctgcaagtgacgttgagggaggtgccggttcagcgggagagatgagtgaaactggaaagtctaagaagttgaaactcaacccacctcccatgacctctcaaggaataacgccacatgggtcaagagccggtagtccaacctctgtgacgggcaaaaaccttactggaagtcgtgctagcagccccgagtctctaagaggcatgtgaaactcccccaatctccgtagggacagtcactaatctctccagcgtctgatgccacaggccacgcacgtgtttcgactcctggacctactgcgcaaggttttcctacccctagtgaaatccatgctgccattcctgcaagtggtatcctgagcaccgatctgctcaaaatatttcggccacgcatcggcgactcccgagagaaccataggaagttcatcgcaatcgtcaaggatgttggcgtttatgggaaggaagaccgtcttttgcgtccggggccatggaaagaaacataaactgtgtgtcctgatgttttggacctgcttttgcgccttttctcatcttgtggtgtgagctaaaaggctcctaaataactgtcccgcaggcgtccactccaatgcaagctcgtgtttattatacatctacatatgcattgtagataatctatcatacttcgcgttgcacgtaagacgaacgtgacatagtatagggcccacccacctttaatggctagacttggtctttgaatatatggtaattcatgaactcaaaactgattgaaaattaactacagcgaaggaagtccaacataagtgagcaggagaatgcatatctgataccacccgatctataatctgtagatatcattcccatcataaatgctatctgagaatatgaacaaagggaacatacgcccaatcaaaaagacgagataacagcgacacacaaccccaagcgctaagaagtgctataggactaaaagaaggaaaaatcatgacatggttttcaggatgaagccgcagtagtaccgccatggcgggaacctccctcagttccttcttcatacttttcccaatttgctaggatatgagcgatcctgggagagttcgtgagccggtatacgtcctcgaagtattccttggtgatctcgaacggtcgggccgtcacattgggtatgtacttcccaaccagtttgcttggatcgatcgttgtcttgttgatcttcttgagcaagaaggatcggaacggcttcacaccagaacgaaggaaagtactgtggaagggtacgtcgattcccttcagaggaattgtagcaaatccacgctcaaggttaatgggcttgggcttcgcatcggtttgcttcacgcattcatgaatgatgttgacaaggtgaccttcacgtcttccaaggacatgctctgcataagagccggaatgtcaatattttgcgctttga

SEQ ID NO: 12780 - DNA, 1830 bp, Emericella nidulans
atctccaggcccagctgctctgtagctattagctgtgctcactgagaattctctgaatgattctgcgctggaaaaaatgaagaacactcatgtacccatgccattcacgtgtataatcacgtagcattttacccctaatttaaggccactcaggggagtggggaggatggttaaggagcaagcggcgattctatcgagaatagcaagcgtccacatgagctgctatacagacctgtcgtgcgcaggaggctgactgggatcagtgatgatttgagaacgttctgcagcagaatattgggagcgaagatgggacagattacaggagcagctacccagccaactgccaaaaatggcgccgaatggccttccattcaaacagggagcagtgagcaatatcgacatgtgcgactaacggcccacgagcgtatataggatgttgtctggtcgcatttgacgggtagaataattggatcacttcttcttaagacagtatcgtagtgctagtaggccgttgaaaaaacgctgcacttgatgtacaactgaaacgaaacatgaacagcagagagttaggttaaaaatcctagaggtgtgtcgaggctctcctgactgtatctagaagtttccgcctcaggcattaatattagtcagcctctccgctgaagctctccagaatcttcagagctggagatctcatcggagaagccatcttgtgaccgcgcctctgctcctttcccttctgccacagcctcgttttttcgtcatcctttaagtaccacatattctttaactaccgcttttctgtcagacaatctagcgctcgccatggctaactacctcgcctccattttcggaaccgaacaagacaaagtcaactgctctttctactacaagatcggcgcctgcagacatggcgaccggtgctcacgcaaacatgtcaagccatcatactctcagacgatcctcatgccaaacatgtaccaaaaccccgcctacgatcccaagagcaaaatgaacccaagccaactgcaaaaccacttcgatgcgttctacgaagacgtctggtgtgagatgtgcaaatacggcgagctggaggagctggtagtctgcgataataacaatgaccgtgagttcttttgcctcattgctaatattgtgcaaaactaaccttgcttctcagatctgatcggaaatgtctacgcccgattcaaatacgaagaagatgctcaggctgcctgcgatgcgctgaactcccgatggtatgccgcgcgaccgatatactgcgaattatcgccagttaccgattttcgagaagcttgctgcaggctgaatagtggcgagggctgtgtacgcggcgggttctgcaacttcatccaccgaaaagaccctagtagcgagcttgaccgggagcttcgcctcagcacgaagaagtggttgaaggagcgtggccgggatgctcggagcgtcagccgcagtcctagcccggagcctacacggcgaagatactgaatgatggatttgtttcatagtggcgttgggtgaaagctcgtgtactttatttcatgatatcaggctataatggctcgcatcagatacttctatttacatctcaaatggcagacattcggtgcctattttcttgtactaggtccgttgtaattgttcctgatcgggagatatggaggtcttggcgttggactccggcgcgtcagtcgcgtcgtccggtggacagagaaaagacacccgctatgctttgccccacgttgaccacttgccacggactgcgatcttgttgatccgcattgattattgtgccatttgttctggcatcac

SEQ ID NO: 12781 - DNA, 101 bp, Emericella nidulans
gggcggcatgccgtccgatctcagtgagcctttctgtcttccgtggtaatttgagtgaggctctattaccgattagtaagaggcttacgttctggggctcc

SEQ ID NO: 12782 - DNA, 114 bp, Emericella nidulans
cctccgattcatcgtcaaccggactcctgcgctgtcgttcccaccggcttgtggtctggaatcacttaattgagtccatctataaggccagatgcgataatcctaggacgctgt

SEQ ID NO: 12783 - DNA, 593 bp, Emericella nidulans
  unsure (1)..(593): unsure at all n locations
tacgatctgcgatggcggatcattgggaggtgagtgtccgaccactggtgcagtgcacggtaggaacatgtttgagtgcaacacgacactattgcacatacttcacgtgtagacgagccaactaggttcgtgcgtgatacacctggaacgcacatataactgaacctacgtctaatgacactgtctgagcagcgagtcgtgntgcagcttctctggctggtactccggccaacgcattgttcacttcatgatgagcatgacgagcctgcgttccagcgtattatatccgaatgaatatcgtaaatgggatcagttacggggatatggactggtagccagaacatggatttcaagcgcatggactggggatgggatattgaactagcatgggagtggtaaacgaaatgtttaagagcgttgcatttgctggtttgctcacgttgctgaggtaaaccgtgttccttgctgacaacatatttcggaatcaacaatcgcctgatcacacagactgggcccttgagccttacaccgcggatgacgaatatttactgttcataatatcacggcggtttaaatcctatacccacctaatg

SEQ ID NO: 12784 - DNA, 600 bp, Emericella nidulans
  unsure (1)..(600): unsure at all n locations
tgtgctctcagtcgtctccgaaatgccattgagaagangatcgtacgacgatgccatgttatgtccatggtcaacaatcgcgaactggaagacgacgttcttgtccattatatggctcatgacctgggcctcctttagcagcgaagcatgctgcaaaaccttttcggccatgcggacataattttgctgagaccagtgtcggaaaactgagcgcgcaacctctagctccctgggggacaactttgggtaaccattctcgtagattcttggcactgggtgaccaagtgccttcatatgcgtctcaaacgcttctttttgctttcgaagttgctcttcgtattcttcttttgctactcgaagagcatcctccatgcgggccttttcagaccgcaattcgtcgatgccttgactcggggacgcttccgattcccttagcttatccagatactgctctttctgtcgctttaactgtcgttgcatatcctgacgcaccgactggagggtggcatcctcatcggcgggcgaggtgtccctgcattgtatggccccgttcaagaaaaggtgtaatagtaccattgacataacttatcgcgaatcggt

SEQ ID NO: 12785 - DNA, 136 bp, Emericella nidulans
aagtttgtagcagctgacgggcgaatcgacgtctaggcttcgtgatagtccatgctgccaatttggcttgtggtcgagcttctcgcctgttatcagatgtagagtacgctgcttaacttccatgagcttcatggtg

SEQ ID NO: 12786 - DNA, 670 bp, Emericella nidulans
  unsure (1)..(670): unsure at all n locations
accagtctcttaaaactagaccgggccctacaagggcaagtgggccatatctcaacactatgttgtccctggattttaataatgctagggttggggtgattctttcacgttacaagtctgggcctcttccaaaaccgttcaaaattctccctactgttccaaattggcaaacgcttctctcaatcacgcgtcccgaatcatggaccgccaacgccatttacgctggaaccagaatattcatctcacacaagccggcaattgcgcaagagttcatctcaacggtcttgcttgaacgcgtgcgcgaggaaatatacgaacacaagaagctcaacgttcacacctacaattcgatgaagaaggctctctacaagccggcatgtttcttcaagggattgctattccccttagtctcgagtgggacttgcactctacgggaagctcacatcgtttcctcgtgatcggcgcgtctctttccggtcctacattcggcggcggcactgctaagatgtgtgaccttgccgccgaacaatccatgaagtcattagaaagcacccgtgcggggaatactttattcgagtcttttagagaagagtacgccttccgtacaagtcatngatgctcttgtcttcatttctgcggtccgtgcgccgaccagcgaggattcatgacg

SEQ ID NO: 12787 - DNA, 841 bp, Emericella nidulans
  unsure (1)..(841): unsure at all n locations
atagatctggagtctctaaatatgtgtcgtggcgtttgncttgaatggatgagctctgctccacaggagggagaaagggtcaaggtagaggctacactattgcagccttgagacactagggacaataagaccagtagcagcctgcaggccatcttcactcactgccattcaccgagcacacccaggcatatctgagggagccatctaccacgccatgatcagtagtaaccacacatgaagtgagagcgtagacatgcggaactaaccacataaaccatggttaaccacaaccatatacaaaaccaaatggcttagggctttagattctgaccaaaaatttatgcggagcggaagtggtgtataatccaagacaaaaattttatggggactggctgcggtcttccggtttccacagaaaagctcggggagtcaccaaaaattcggcaatgaggggaggcggctttatattgggaccttttgtccaaagcaggtttatggccccgaacaggtctatttataagggcggagcagcataaagctaatactaaaagccgttttcggaaaaggtccgggagtgtgaccaatactcactttcacacactttatgactactgtgcacaaccactttctatacgccgggagcgtcttctctgttttggtacaactttttttttgggaaattggcaggcccaactgttgtaacaagttaggcgaataaagaactattcctcacgctgggggtagtttataaccccagtgacaaattataaaagaaacttaaaccctttctaatttccaaggtctctaaaacagtataacctgcaaagaagggcaaaaaagg

SEQ ID NO: 12788 - DNA, 116 bp, Emericella nidulans
tcatattcagagaccgtctctctgatcaccttttcactctattggctacatcttacttgaaaatccactagggatgtgctagaggtgatagttgtagaagaagagaacggtgatgt

SEQ ID NO: 12789 - DNA, 173 bp, Emericella nidulans
gaaactgtcactcagcatgccttctgatacatgcaactttgatcggatatttttgattatcttcttattcccatatgtttgacatcgcgccgtaggcatagcgaggctgtctcatattgtcagcccgatagccagttcgcccacagaactggtttgtaatgctgcagtacgcc

SEQ ID NO: 12790 - DNA, 2306 bp, Emericella nidulans
ggataaagtaaaatacggataaaacaaaagaaaaaaaggaaagacggaagagagcaaatacagaaagaagtaaaagactaggaaaaagagacgcaggatgaaacaaggaaagaaggaaagaaatcaggatgacatagaccgatataataaataagagaaaggaaggttgtaggcaggaattgaaaaagatttggcgcgggataccacagacagggggagcagagagcgtcgccccacctccattgagggctgttgtgggccccaacccagaagaagaccgggggcaggggcgcgtctggctggggctggaatggccgttgtggcgccagctaggagagccgttggcaggattagaggcgaaaacatagtgggttattaaatgaacttgaattgactggtctgatattctgttgctcttgcacaatggaatgggatactcctggaggacccaatcgtagcaatttatatatttcttagctcccatcggctgaacggaactccccgcaaattgacacaatgactcgggtgaattcattgatcctgcaaccatattgtcaatgttctgcagaatgaggtgatcgactaggaacactcggtgggagaaggcccgaggtgtgtagggctgcactggcgagcagctgcatgagatgcgggggatcagcgccaaggcggaaaaattgtgaagaatgcctttctttctggcatagtgagtctggggaactgaatctttgattatatgatcgggttattatggccagcgttgattgctgctgttgctgtttatccggtgatccgggcagtcggggctattccattgaggatttaccatgatgaaatagtaagttaactgcagagttctgtattgtgtacatttctagacatctgcgtcagcctgacttcactataagctcacttgtcgaccctctcattattgaaaacaaacaaaaaggcaaagcccctcgcagccgactggcagtgcatttaacaagggtccagaagtatgctgttactgctggaaagtcctggggacaatgtatatctgtactgacagggacaagatgcgcattgtgactgaaatgatatccatttattttcattccactgtccggaatgatcctaaatgaaaatgttgagctgacgtgctgaggaggtagaagaagaattgaaagtatagttgtgaggtcatatcaagagcaagttcgcacttgctttatttgatatatgacaacatggaggcgaattgcagaaggcttatccatattgatgaaggcacaccataagagacttaatagaaacaaacaatgtctcattttgacaggctgggcaagtctggtaccacattcgatttcgttgctcctgcggcgtcgataagccttccgccagggtgaccctcgtgttcccccagttgcgaaagatacaggaagacaagctgtagttgcgagggattcactcctatgcttcgtgcttagaggtcaacagagaaccaaaggctaacagagggaaatggtggacttctatttccagatgtcaagcttcacagtggcaccggggccttttgcatctctttatttaagaaaatcgagtcaaccatagtccattacatgcaaaagagccaacgtctggaaatgtggtatggtagtcatagcaagctggccctgctgagggccattgcagcgttacgtcttttgtaaataaacatgtgataatgcattggacatcacggtcactcggttctctacattgccatacttatatcaagatcggctcaattacatcgcgagaacagcaaactacccctagtagacaccgatgatttctccaaccacgctgcggtagactccattcgggtcaaacttctctcgaatggctttgaaccgagcaatgtgctagaacggtcagcgcggcagttccagagggccatagacttacatcaggatccaggtttttcttggccagttggaacacttcgcgagtgtttttcgtccaatgcggccggcagggaaactcctcaatcagggctttctccagggttccatctgcagcttgtttagacaaggctacggaaatatcacaattcagaacttacaaaacggctcattaaaccgtgatccgtctccgactgtgggtttgaaactcggaaagtcgaacatgatggctcccttgctccagtccgcaccatcggaagtgttgtaggtgacctgacccagcaggtcatagtatggccggccaaatttgatgttgatgccgctgcggtaggtagatgtcatgacaagacccttcttcaactcggcatcgaagagctcgcg

SEQ ID NO: 12791 - DNA, 135 bp, Emericella nidulans
cgtcagatgttttccagtcaacgaagagaattggcaatcgggaccgcagtgttcgtcgaattggcttcagacctggagcgattgcccatgatcgcatgctctgcctgtggaggtcacgtatacatccttgacgat

SEQ ID NO: 12792 - DNA, 141 bp, Emericella nidulans
gtgctatgcgcccattcacaggatcccaaggttgcatcgatctcgaacagccgcgaagaacttgctacccgcagcattgcgggccccgtccgatgaagtgccagacaagtgcacatctgaggcaacatctagcctggagac

SEQ ID NO: 12793 - DNA, 317 bp, Emericella nidulans
tccgccctatcagaggaacgcctggagtgcttctgaacagtgctcgctgctacctggcttatgtttcttacttggatcacttataccagtggattcagactcatttgccggagacacaaacactaatttgacttactataacacaggttgcaggcccaaataagatctggtgcaccaagctagaggctttggactctcccacagtttaatacagaattccatactaccaccttaatccaatgaacgttgaaccttgtagtaggaacgagacttatttcacagcctctggtcgtatgagtaatgcatgcttgctttca

SEQ ID NO: 12794 - DNA, 1924 bp, Emericella nidulans
ccctaacagattgctcgtaaaccctgccgtgtgaggccatattctgtgtcgttggccaccttaatggcttcctcctcactgtcgacaacgatcagggacactgtcggtccgaaagactctgtggcatagaggtccatctccttggtgacgcctccaacgataacggggcgcagagcgtttgcgcatggctcgctttctttagggtcgccaaaaacgacagaggcacccttatcgatcgcatcagctaccagaccttggtttttcttgaccgcagcggtcgccacaaggacaggtgcaggcgcgttcttgccgaaaatcttctcggatgtttcaacgagtaacttctggaatttctccgcgacagggcgttggactactatgcgctccgtcgacatgcagatttggccagactaatggttggtgttagcattcaccgggcttccgcgaactatgtccattgaacgagttacttacgttcagaaaagcccccagtgtacagcccatcgcagccttctccaggtcggcatcatctagaacaatcgcggaggctttaccacccagctcaagcagaaccggcttgatatactttccagcggtggaggcaatgatcgaaccaacaagagtgctacccgtgaagctaatcttgcgcacgtctgggtgggcaataagcgcattggtgaccgcgggcgcatctgaggtcttgtgatagatcacgttcaagcagcctgcgggaagtccagcttcccggagaacatccccgatcaaccagaaacatttcggagacaactcggagcctttgaggatcgttgtgtttccagcggccaaagggagagcgactgaacgagttccgaggataaaaggagcgttcctggaggcgaacgttggttagtgacactgcttccttccaaaagaaacaaacgtaccagggcgcgatccctagaacaacaccatatggctgctttatcaccaacgcgctttgtccttcttcagcaacaataggcgctcttccttcaacgctgggaatcatccctgcgaagtccctcaagaacgaaacgcttgccatgaatgtcacctccacaaacatcctcccggctcctgtttcctccatttgggttttgatgaactcctccttccgagaaaacatgatatcggcagccttgctcagtatcgccctgcgctcgtacggatgcgtcttgctccagataggaaaggcagctttcgcagccgccacggcacggtttgcatcgtcaacggatgcgccagcgcaacggtggaggagttcgcctgttgccgggttatggacctccactacattgtccgtgatgactgactcattgttgattatgagaggaagcattgctttatctccgttggtgtgatttgaggccatttcgtcgacagtatgacaatcgagattctgtatgcggggaggacgaaaaatctgtcggttcgggaatgtgggggaagggaaatataaggagctctgctctcaagtatggcccatgacccattcattgacccataacctttatccggaaggcactgtgaatgtcctattcatttatttgcgaaacgtgaaaccaggagtgctagtgggccacttatatgagtaagaatttcgagcgccggtcgggaagcgtggggcccgcaattcttttgataaagcttgcccgttacagttgctaaggagaccaccttggacagtgtacgggtttccccttgcggaaccccagtccttaaattctgttttgatcggggtttcccaaccactttattggcgtgggttgagctacttcgccccattactaacattaatctggtaatgtatccattcctattgggcttaatggccctattttttagattccccatgcccaggcgtttgttacgtgaactgggcttttttctagttcctgcgttttta

SEQ ID NO: 12795 - DNA, 590 bp, Emericella nidulans
agaccccgtttagactcaagtcgcaaatgggggtgggagcgggtgggagaaggcgcggcagcggagcggggtgggagggtgggaggatcaacacgagcgtggcccataggtgacacaatatggcatatgaataagatgcaaggactctgagctcactggctgagtcgggcctgtggttattgtaatatgagtcgattgatatagccgactttatacaagaatggctcatcccgcaagcctaaaatcggacaaactgaggatcaaatcgttaacctgcctcatactcgtctgatcgtacttgttcaagaacgaatccaagggcccgtcttcagaccgctccaacccttgtgctgcagcttcccctgccgggtttcgtggagtgaggtttggctgtcatgagattcgccagcagccagtatttcggggcagtagctaaagaacccaaccgcttcacatctggtctggccggattgattgggggttacggggacggggagacatccccgtacaagggcggtgtgaatggtgccaacggttttccagtgctaaagcattttgaatagcaggagagttgaaggagcccacaattc

SEQ ID NO: 12796 - DNA, 213 bp, Emericella nidulans
ttggaatgtctgcggcacgctacaaagctatactcgatcagctctttcggtccgtagagcccaaatctcgccgaccaaaacccaatccccagctgcgtctggatctccttcaatcgagtgtcagggatcgccccggcgccattatagaagtccttgcgctgtccgcgcttgaccatttcgcgcggcacgtttccgatcagcgggtggtttggg

SEQ ID NO: 12797 - DNA, 921 bp, Emericella nidulans
tccccggagttttgtcagctaagcccgaggtgaggtcgcccaagtcagacgcgaagactcccaagtccttgttgactccttctcttgttgcttcctcggggatcatgggagcaacccagaggggctatattcacctatctcaggaacggcttaatgatgtgcaatcacgagacccgcaagagaatgtgcgaaacttcctcaacttccaacggctcagtgctcttcagccgcattacagaccctgccactcctcctgcagagcatgatgcatccatggagaactcacctactacttcacaaaaaggaactccaactctggcggaaaatctccgccaccttccaaagctgcggatacccagccttcaagccccgaccgaaaccactttctctccaggctactcagcgcagcgtactattaccccctctggcctccgcaagtcacggcagttttccactattaaccgaaaggagtcaccgaacccgcacagcgggcttctatcgccctcggacttctatcgtgtgaccctcactacgcgcagggcaccccgttgttcagcggtgacgcacccttgacagccattcacatgggtccgatagagcgaggtttttttaatctgtacaccagaattgcattttggaataagcccttaaccccgccggtttcagaccgaaaaccccggactgactttgttaatgggcattttaggccacggtctggggggcgttccctgcccattgaacctaaacctaaaatcctcggcccttgagaaacctttgccctttcaaggatgctttccccggggtaaaaggaacttttcttccccaaggaagaatttccttgggcttttttttaatgaccttcgctcaccaccaaaaaaattcctggtcttccccaaaacatttaaactcctgttaaaaacc

SEQ ID NO: 12798 - DNA, 198 bp, Emericella nidulans
tccgtagtattgactaaccgtatatagcactatgaaactatggtagtgtgtctctaagactggttctggtgttgatgcctcaaggctgtggcaggcttatacggtgtatgtcctaagtcttcataatgcggacagacagaaaaagcactggaatgcgcccggaccatttgagacccggagtaagtccgtccgagacgt

SEQ ID NO: 12799 - DNA, 215 bp, Emericella nidulans
gcagggagaaacatgcttggttgtggagtggaaataagatcccaactgcaaggcagatcgcgcatcgccagcgagaaactaagcgcattgaagctcaaggtggtaacccagatcggcaaatcgccataaagacgaatttggatgctcgacctgccaaaccagatgcgtggaaaacccaggcggagaactcgctgatgttccttccgtcatccgtc

SEQ ID NO: 12800 - DNA, 583 bp, Emericella nidulans
ttcgcagagtttgtcgacctttccggaatccatccactcattattcttgagagcgaatttgccaagggatttggggttttccacacagagttgatggcactcaaagtcattgtagggttgtaaatcttcgtagatgagttttgggtcggattcggcccatttctcttcttgcagacaagctttggacatcttggttaaaattttgtcgttgtagtggcgtcggtgaaggagtgggtgaatggctgcttgacggagtttcatgaggatgttcgcggacttgttgcccgtctttttgccggctgctctgtcttccaagagcttctttacttcgttcttctcatgttcgtatatctcccgctgggcagcgttcatttcacagtactcaacgcgcgagatctttgcaggcaaatcaataacttggtgcttctttcgccgtagaacgaacggtttcagcatggattttgccctttcgatcctctgcgcagaaagcagtgcggaatgggattcatcaaccgtttttgctttgttcgagaatatgtactgtagatcatcctttcgctcttgaaagaccttagggaggata

SEQ ID NO: 12801 - DNA, 208 bp, Emericella nidulans
cttcgcctgccttggctttaaaaatttgggacagcagcgtcttgtagctgactgggttctatatatcctgggcaaattaatcagactgttggctatatgtcgtttatgattaatgccgcagccaaggtcaaaacacctcatagatgacaaaggtattgggagggtaccaacaaggtagtaaactgagagggaattttataagcctgag

SEQ ID NO: 12802 - DNA, 202 bp, Emericella nidulans
tagctatagtattaataataactatatattatagtattgttgatgatgaacctagaactagttattattataattattaacctaatagaattaaaagaataactaagaaaattacctaaattaagactaatttcacttctagaactaaccctctaaaaataatagctaaagacttactaaggataataataatattaactta

SEQ ID NO: 12803 - DNA, 2499 bp, Emericella nidulans
tttcaccagaccaggaggctgctctgaatcagacaacacatgaaaaactgatgcagtttgcaaaggagcgtggagcaacaaagagaaaattgagccattccagttctttcccgaggtaagcttagcaggacgaccgtgttggcacatggctaatcattctatagtccttagttaagctgaacaacatagaatacgcccttacgcaactcgacaggctcgagcgcgaggtgaacgttgatggctgtgcggaagcaatcgcccgacatagccctccaacacttcagaaagtacgcaagtcgacaacttatgtcttcacgataaaggttgtggaagcagaggatctcaaggcttgcgacatgaacggaggcagtgacccgtacgtcgttttgaacgatgagtttcagaagcggattgggaagacgcgcatcatctacaacaacctcaaccccaggtgggatgatacagtggaaattaccacccatggtcctttgaatgtcattgccacaatctgggactgggatgcagtaggcgatcatgattatgtcggccgtacgtcgatcaaacttgaccctgtccacttcagtgatttcctaccgagagagtactggttggacttggatacacaaggcagactcttacttagggtgagcatggagggagagcgtgacgatattcagttctattttggtaaagcattccgaactttaaagcgaacggaaagagatatgacgcggaagatcaccgagaaggtaagccgctatcttgaccaattgctgaaattactgacaatcatctagctcacctcatatatcaaccattgcctgtctcggcggactctgaagtcattactatcgcgaggaataggctctactgtgtctaacttcctgaaccgcagccgcgctcaacaatctacttctgcaccgtcaagcgcagatgttgagaacgcattaacacctctgttcgattacttcaacgacaactttgcaatcatggctgaaacccttactcccgaggccatgaaaatggtcatggctcgcctatggaaagaggtccttgctactatcgagagcttgcttgtgcctcccctttcagacaaaccatcacaccagaaacctcttaccatgcaagaggttgaaatcgtctcccgttggctcgtgcttcttctgaatttcttccacgcaccggacgaagaaacgggtgaagcggctggtgtacctatggacattctcaagtcgccgaaataccacgacatccagagcctgcactttttctattttgaacctacggagaacctcattcgcacatcggagcgaatggcctctgcaacgatttcccggcagcaagccaacaagaatagagcctccgccccccctggcctgggaagtcatgctagtgtgcttgcagttccgggtggacggcgtgccaagagtatcatgcactcgcggaatctaggtacgatgaaaaaggcaaaggcggagaaatggcgtgaagcgcaggcggatccaaacgacgacatgatcttgcgaattctccggatgcgtcctgaagctgctggatatcttcgtgatcgcagtcgccagaaagaacggcttgctgctgctgcggcagcggatgctatcgtcaagcaaagcctcatggctaatgttggtgggcgaatggctggcacactgggacgtcgatgattatcgatgattacttccacaatctgttttgttctttctatattcttgtgtgggtatagcatggatattgatggatgatgtgcgatgttttttttatgttgagaatgatttaatttagcggtggctaatggtgaagtgtagtgtgctatctaatgatctctttacataataccacttcgacctagatgtagaacattgacttctgtttctattctcgcatctatatatgcccatactacagcagctttacgcaagagcgatgcactcaatctcaactgggacgcccttgggcagctgcttggcagcaatgcaagatcgggcgggtttgtgagtgaagaacttctcatactgagcgttcatctccgcaaagttggacatgtcatcgaggaagacctaaagccattactaccatcagccaacccaatcacactacatgacagttcatacgacacgacttacattgacacggatgatcttgtcaacagatgagccagcagcatccaggatagccttgatgttgtcacagcaagcctgagtcttagtcctgatgtcaccttcgacaaggttgccgttcttgtctgcgggaatctggcctgagagaaagatctggccgttggcttaacggcttgggactgtttattgtttagtgtttgttgcacggggtagctatggcagttgcgtttatgcgcgtggttgttgctttctgcgtgcggggtacggactggaattgggaaagaggaagtactgcgcacgtacataggggccaacagctagagacagaggtcagcttctgctatcgtagaatgcggtactcagt

SEQ ID NO: 12804 - DNA, 569 bp, Emericella nidulans
tcggcttattatatacaaccatccaagagtcgcgttgcctacaggtgccttggcccttggttgacgggggcccactgatcctgatcgaggggtctgtcatacaccaggcatacaacccagattggattattattcacccaaactgttcctatgtgtcgtgacttgttagtctcaatacatattaagccccgtcgctctcttagtcttctggtcctagtcgtttagcacctttcacgctcgaaaaagcagccaagcggactagacactagagacgacttcaatcgcccccacttctcaggaacaccacatcagtcacctcttcccatctccctcttctctcccgcagcctgtcgacaccttcgacctccctccaggccgggtcgttgctgaatggaatgttgtccatgcaaaaatccccctcgttcattttacctccatccgacctggacagtaactcctcccatggctaccttcagcccgactgccgctccagtatagccgaaccagtccccgcttgacgtacgctacagtcgtcgtgactcttgatggaccccaggaccccagacttg

SEQ ID NO: 12805 - DNA, 681 bp, Emericella nidulans
  unsure (1)..(681): unsure at all n locations
gctaccgtttgtgacatgtgccttaatgtttctttgggaatctcgggactggatctggtagatgtcatcaggctttggtatgggtgacctccgaccaacaatggccctcagtagaagcaccacgactttgcgatataagtatgcgaggaaggacatgatgcgacatccgggcaatcatgcagtagctcgggagatgaggtgatcttgttagtctaaagagggtgatgggatatcccaaggtccatcggggctcgaaccccatcaggccatgctataaccaaattggttgatgaccccgtgctataactaaattggttatatacgcgggaactgatgtatgtcttccccagcatattctacgctagcacaggcggtatccgtcgagaagcttgcttcgtgtttatctttgtaagatgtctataaaaaagatattcatggaaggccaatacagcgaacagatacttgggagtaggagaaaagcggatcatgtgcccctcgccagctgaccactcaangccgtggaaatattcaagttctccagatgcagactgatgatcgcaccactattattcagttcacctagacagaagctatgtgggatacagatttcttttgtcgcctgtactgtctctcgccattattacgtttctagaacgaataccatcgacgttctcatggatg

SEQ ID NO: 12806 - DNA, 545 bp, Emericella nidulans
caggctccgcatgcctatgctgggccataacctacagaggatgccaagcccggcctgccctcgaaggagcggggcgccttcaagatgcaatgggtgggcagcacgaacaacaacatataaacagcccatggcccaacctaataaccacaaatgctcaaaacacctcaagggatgtaaccaaagcacacaaaagggagggacatgcacaggcaggacctggaggagccttaacgggccctgagggccatacataagcataccgattgctctggaaaccgactctcaaacctctcacagtctctacaggaactcgactaagatagacctatgacaccctggtgcaccaactatacaccggcctttgcacatggcagaccatggatgcctgctccaaacgtcaaagcctccagacatggacacgatacaacatgggaccgcacacgatcttcagtctagaacagaagctctaatgacatgcactaggctaccaaaaggcttacaaattagccgacttggatcagaagcagggtcctagccagggcatc

SEQ ID NO: 12807 - DNA, 600 bp, Emericella nidulans
  unsure (1)..(600): unsure at all n locations
gaatattccttgacagacttcccgaagggaagagacgagattaattgtgatatgctcgctatgctatgtattcccggagagatggagcggatggagacaagaaggcgtcgaagtgcagttgaactacgacaccgaactcagcgacgagacggaggagatgattcttcgctcttcaacctgcggtttcggagacttcattatctcattcctaggacgcgtcttcacgctactggagaatctccccgacgtttcaagagtgcgaaatggttcgccagaggagaatatcgtgaacacgctaccagcgacctttatgcctttactgtcatcgctatcacccgaatattatgagattgctctgactaaggttgtcgattttgtgtcaaaccatgtcatccaccaagctcgcgacgcaatggctttcatctgtaacgctgtttgcaaagtcaatcctgaaaaggcactgaaacgttttattccagtgttgatacaggccatcccgactgagattgatgacaacggtgcgggttcgacccggacactgggacngatgtgctttcttgtgatggggccttgtgtggaatgcagcatgctcacatgtgt

SEQ ID NO: 12808 - DNA, 401 bp, Emericella nidulans
ggccgttgtgctcattagccagcgtcactagagtgacggaccgcccattacccatacgtttcctgctggatcaccatggtggcatgtgaacacaaaatgagaacggcctatgcccttgttccgcgggtacccttgtgattatagtccacctttctgaaacccgaacgcttagccggacaccagccatggccctgccgtggggcgactggtacctcgagtatcaaccggtgtccgatgacggcgcaaatccgcttaccgtatttctggggctctatatacgggcccgagctatacaagctagccattctagattggcctttagaactttgagagagacgcccctgctgattctgcatcccctgctctacaccattcgtccggagctatttcttgaactgatg

SEQ ID NO: 12809 - DNA, 463 bp, Emericella nidulans
cggtcggggttggctccaacagccgagctcaccttacgggatttattgcacccgcactgacccaggcttatgatccctaagctgtggcctatctggggccgcgctgtctgagtagcatacttgagtgcgtccattaacgcccggggagttagtgactcggatgcattctgacgacaggcacggttactccacggggtcgcactgaagaacagggccagcctatccactgactgctatgacacatgcgctgccaactaatacaggacggctatctgagacaatgcgtgaggctattacacatctggtctgcgctataggagcaagcccagcacatgccctggaactgtggactaacccttttcaggctcagtctgtgcttcatccgagatagacgcgaatccggcagaggctaatatgatcgctcatcaccggagccagtctgcgtgctctttgtcataccaga

SEQ ID NO: 12810 - DNA, 602 bp, Emericella nidulans
ggccgtcgtagtgtccctgtgccctggggccaaccgcaggtgcgcgctaccttgctccacgaaccttctgttttatttgaccatcctccgtcgcttcgcaacgggggcgccgcactacagtgcgtggacacgcctgcactgtgtgcaccccatatggcgaccctctagctcctttggctcgcgaatggcgcgaccgggcgctgtggtatcctgtaaaatagtccagagctgcaatgattgaacctgctgtacaggccacgcctagaatatggcgtccagctcggtcttccggggctggtcaatttcctagacaagcaccacaagactgtgctagattgagagcagctttgcacacaagaaacaagcgttctattcatcagacagctgcttttgcggaaccgcatttggatcaggattgcgcgtgtgcaaccggatcgaccggagtgtcttctgtcccaccatgaatttctcgaacggaccgtgcgaggcgggctcaaattcccctgtgaggtgggaagcatccttccctgtttggagttgtcccctctttttaatcggctagtttgttaagggggagcttggctttccggcccttttttaaa

SEQ ID NO: 12811 - DNA, 2136 bp, Emericella nidulans
ctgctgccgcgagcggatgtgacattgccacgagaacggttggagtacatgcgatgcccctttacaccaggggcttctgggccatgaaacagtacacaagtacacaagacgaaacaaaaagacagagatggcacaatgaaattgtttttggtgatgcttctaggaagaggcagagagagaaggcgccctggcctgggctggcgggatgacgaggggaagacagcggctaggcgcccgatgattattacatggtatttgattgcgctgcagagttgaatggcggctttcagctgatgcatggctgcgtgtcttgtcctacccgactgtctcctgccattggcacaaatctcagcgcgacggttacccgccaggaaaaaagaaatgctggatcgccactgcacgccaatcggcctccgtctcccgggatgtcttacgtttgatgtttgacgtcgctggtttggaacttgaatcatcataaaacctcgcgtggaggtatcaggtgccttggtgcctgagggtgagagcaagggggtttatcttcaacccacgcggacagctcatcactggtctaagagcaaggtagagacagtagatgacacttgatgaattacgtaccatacaatcgcacaatgagagtttgcagatgagggaaccgaaggaaccagtgcgagtcaatattgaaatccaatatttcgatactgactcgaacctgccgccaacatgccgttaagagttgtcggcaggggcttacttctgagataagctcgacctgtcccacccttctgatcccctggtcaattggcttgtctcggaatctgtactgcagagtcaacattgtcaacaatcacaaatgttggagccacacaaccatgagctgaaggctctcaggacaggcgcggggagaccccgagggggacccagtcacgctttccttagatggttaaatgcatagtctagagaacggcagttgtcgatcatcaccgctcccttacttctctagggcatccatagcacagggcgtttgctatcgtttacggtcacggattcaaaggggtcccggaatgtgtgacctcactgcaatctgatagcgcgtacttgggactattacaaagccgcttcaacggcttctcaatgaccggcgaggcactgatttgccaaattagtcccagatctctcatggccatggctcgcttcaagtgccgactcgtgccaggccccggcgtcactcagggcggaggcttacccagcacctccaggcttagctatgctgctacccatgccacattccacccaggctggccgtttgaaatccggagtcttggttttcgtggtagggtttgacgcgtgtgttttgtcaaacgaagcagaatctttccttcactcatggcagacttgaaatttgattttgcaaacgaaacattcgacctcccgtgtagcttcaatcaatcaggcgtcatagatctactgtgacttgcccgtccgagtcaggacttgttggaactggaaattcctgggagcggactgtaaactcacaatacaaatcctcccttgccctcttgcttcctgcctcgtcattcacggttcgacagcgacggtctcaccgatggtttcactctcttttctcgcgggaacactctcccttgtcattgcttgtttcgtcaatgtcgtggctgccgattttggttatgtcactgtcgaacggctccagagagccccagatggctggattagaggtcctgtggcgccgcctttcaagatgataaagtttcatatagctctccgtcaggaaaaagctgccgagttggaacaagtcactctggatatgtcgactcctggccatcataattatggccgccatttgaaacgtgacgatgttagggcttttgtacgcccttctggtgaaaccatgaaccgagttctggcctggctcgaatcagctgaaataccggcagaatctgtcaggacccatggaaactggatggaggttatactacctgtgtctcgagcggagtcgttgatgaagacaaaattccatatctatactcatcgagatactcacagacgcgccatcagaacccttagttactcggttccacgagcactctttccggataccagttaattcaactacgactc

SEQ ID NO: 12812 - DNA, 1477 bp, Emericella nidulans
ttaccacctgactgcaaggaggctctcatcgaagctgcctcccacgaatgggagtggaagtcgagatggtgcagcgaagtggatgatggagctagggttgcaccgcggaagagctatgcgtggtttccttaatgctttaacgccattttctccttccgtgtatctggcgtaagatcacaatcatggcttctatttctagctcgataggtttctttcttttccttgttgattatctgtttggacggtgtaggtctggtgggaaacgggagttatctagctactaatttagttttactcaattactcaattttaatcctcagtgacgttttgctgggttgagaagcggctttcatattctgaggttcatatgacacgagtgtgaactgcaaatgggcatcaattgcgctggggaaacatgatccacaaaacatatctaatgacatgatggcgtaggaaacataggcccttcaaatcatccagaaaagtattcacttggtagattattacagagtgggatacacagcgtggacagaacggaggtagcgtgctcggacgggagtggccagtagtcagggcaagggcgacacgtctgggctttcgctctcgcctcagcagaggcctcgcggggtagttggtacaactagataagtaattacgccgcggagaagaaggaatcgcaacgagccgacggaaaaagaacacagtgcttggctaatcgtagtgcgtcatgataacgattccctgttcatcatatgtgtagggggaagaaaaaagattaaagtaagaccaaagagaccaaagcaccaggaccactctcacatggccatttccgcgcgtaacttctccaactcggcttcctcgtcttcttcttctgctttctgtttcgctttggcggctggaaggctgtcagtcggagttcgcttttgaggtgggaaagggagagccttacgttctgcattcgctggcgcaggtagccgattgagctgatctgcaactggtactgtgcctgtgtggagcatgcgctcgtccatagcctcctgctccatgccctcgagttccgcctccagatcttcttcgtccacctgctcgccgaaccccgggtttgtgattgcaatcgcgatttcgtcgttgatggcttgttgttcccgcagtttgtccctgagtctgttagcatgccaattccgctatgtcaccagcggtacagtaagggacgtacattgtctcgtcgacctgttcgacggtcatgccgttgtgaatcttctccatagctgcaccggcggccttcatggcggccagggtctcgtggttaatattggcggcttcaatagagtatatctgctgctcaagctgtacaatctgagcctgcgtctgttctaagttcttctcgtgcacctttttccgtcggagcgcggctttggcggctgcggtggtggtcaaatcagcatgggaacttgtataaaggtcccataatatacac

SEQ ID NO: 12813 - DNA, 910 bp, Emericella nidulans
gtctattctatgtgatgttctctcatagtcctatccaccaccatctggccgaaactctttcattagatctcctttgatccttatgacgtgagagacacacgtggcctaatactcacttctaccaaacagctggtcgtgtatcattcaagccttgtgaaggaagattagataatcgccagtgtattgcacataatgtgtcacccatggctcttatatgtgaatgtcactgctacttagaattacatgaagttctcatctaaaaaggatgaggtttggacctagaggttttaccggaataccaagcccgtgttaattgacttgggaggtttatacctttgcacgcgaatctttatctatgtgatgaatctttctcaagtttttggcttaaggacatcggtcttttaaagtatcgaaacccttgccacctttacaattttgagaaagcaatttttaaggaaaagggtttaaatagggttggtccctttttttaggatatttttgcgaaaaccacctttttgttggcccctcccccaaatccccaaaaagtcccgttttttataaaaaaggcctttttttggttctttgcccccctttagaaacctctttttgagttgtgggggtccttcaccacgtttttttttttatccctacacttgttttctcctcaacactcctgtgggttttttttcctttccacttaccgttttatatttttattttatattgttccttatatacttttttctccattttctcaatttagacttattttttatttttcccaacgctatgttttgggaatatcccatgctttttataagttcctttctgtttaaacttataatttttctctttatttaatataaatgttgtgatctttattcatatgtttattttttattcaaaaaac

SEQ ID NO: 12814 - DNA, 493 bp, Emericella nidulans
ccaatcatgaatacgcgactagccacgcgctatgaacaataatggacacctgttcgctggaaaaggggggtttacagcgtgcgtagcgattactgtggaatcaagaggatctaggcacctatggctagtactacgcctacagcctcaccaggtggcaaagcaaccttcaacctatgccagcagactccaaggcttcgatcgcactagcctttgtcactcttgtgtgctgactacgagctaacggacgactcatcggtcgaagaccgatcgctctaaccaatcacaattgaagagacgccaacaagattactctctgccaactgccatctagaactatcgagttcgaacttactagtagggatgatctgctccagtcaatcggctgcatcggagagtcaggcattgaccatcctgtgcagagcactagcacgcgacacttacgaaaggtctaccccagggaattaaacacaatgcctactattgtggaaataca

SEQ ID NO: 12815 - DNA, 424 bp, Emericella nidulans
cggtctgcttcttgcgcgagggggccctgccgttttgcagcgttttcctcgacgactccgttcaagtccccttttgttgggtgggctcatccgacctcggccgaatcgctgatactgggcatgtcctttgaaaacgcgagaggcctgaactcatggtcacgcttctatacaagagccttgtgtatcgactcagcatgaggaggattacaaccgccgctatgcacgttggcaacgtgattacacgttggctccttttgtacagcctgcccagcgtctgagggtccttatgtctaatgaccacgagcaccacttgctaactccttgcaggcgttcagagtgcctcggacccacgggacctagattggcatctgcatgagttacctacttgcattggccggatggtgcggatctctgtggagattta

SEQ ID NO: 12816 - DNA, 215 bp, Emericella nidulans
aacagtgtcacttcaaagaacagtgccagcgcaatcggcaaagcgagttgaatcagtcgtttcataaccgcagatcgggttttgcggtgcctttttcgttacgaatatcgcgcatggagcgggcgcgtttaatgtaagaaaccatggcaaggaacatgacccaatacaccgccgcagtagccacgccacaaccaacgccaccgagctcaggcata

SEQ ID NO: 12817 - DNA, 350 bp, Emericella nidulans
aagagctccacccccggtggggaaaaactggtcagcgagatggtcggcgagcccctgaaccttggcgggggcaccatgatgggcctcaacgaggccgaaatcagccgatgagtggtagaacgcttagccaagaggtatggtaacagctaacataaccgagcacgtgagtatcttgaaagaaccgggtaagggtatcccgacgtggctaggcggtcgccagtatcaatggctgccggccgtcactacagtggacgatttctcactcgtgcagaccggggagcgctccatctgagtgcccaataagcataggactgggcccctatctggcaagaacggtagcacaactgccg

SEQ ID NO: 12818 - DNA, 1119 bp, Emericella nidulans
aagatccggctcgatatggcaaagtctccagccccagatacattcagcatgcccccagtctgctgagggtctttagcgaggaagtcctgccagtcctggtcgaatctcattaaccgccgctcagaaggatacaaagatacaataataaatataaacaatgtatgaagataagaaagtaaaaagtaaatagaagtgaacatacatcaccccaggtaccgacaaagacccccgtattagagtcttcccagtcgcgctggcctccattttccatgcactcccatactacctcgagcagcatgcgctgctggggatccagcttttccacctcagcctttcccatgctaaagaaagaggtgtccaggcgatccagcgcgtctgactcgtccagaaaatgaccgcgctggactgcaacgctgccgggcctcttggacgccgagtagaaccctccggcattgtacctgctgctaggaacaggcccgcttgtttctcgcttgctgatcagcagctcccacagggcttccgccgagtgaatcttccctggtagcctcatccccatccccacgatcgctatgggctctgggaccatggacgtagggctacggaggtgagcctcgccgttggcggagccattcatgtcttgatttctcatggttgattcatgaactagtgaattgatgacagaaaacagcaggtttgagccaaacaaaagctgcttatccaatttgaagagcatttataccatcgtggtccacagcggcttatcatcagggcgtcttcaacagtactgtatgatttcgtacagtaatcgcctagcgctgtattgagcattacaacttcagtcagggagcgccgctaaatccatcttactgcatccaagtactattcaggttaaactgatgaaacaaccaaatccttgcggaatagcagcccgataatgccgggggaggggggaatgggggccctgaagaagtcccttgtggaattcctccctccgctcctcttagggctcgctgctacattctccaacaaaagaaagaattagccattcggccttcgttgtgtcatttacggctatgacggtggaagattcctcgctgaagcccgatcagaatgttcagt

SEQ ID NO: 12819 - DNA, 485 bp, Emericella nidulans
  unsure (1)..(485): unsure at all n locations
cgcccctggctggttccgggggcactcctaaaggtacgatctcctgcactttgcatcgtactgccagagacaacatttgtatgtataacaggacaatatgggtttagatgacagcggctagggtggctgagtgatgggtggcactataataagtgatgccgtacgatggaaggtcatgagaccagctgcagttgcgactggagcgaggtcttcagtgctcatatatgaactattttgcacacccctaattggtctgcctatatatgcatgccacgatgcacatctagatgctgatctatcctcagatcaatccatgtgctatgcacttacgtgcacctgagaatattcaaacattaagtggatacactattatttcgctttgggacgttcgaggctgaaccttctatgaccgcgagccaaggtgctantgcaacaactttatccatgctcgtaggatcgagtgcataccatgaggttgcagacag

SEQ ID NO: 12820 - DNA, 219 bp, Emericella nidulans
cagagttgcgtgaacccccgatttcaacaccgcagtccacaacaccacgccagcaagccctagacgcccgtgcgggtgcaccacacagattcaataccgcgagtaccgcaattgctacagccgcgacgccaagagaggccatcgataagtcattagtgtagaacaatgcgatgataatgatggccccaagatcgtcgataatagccagagccatcagca

SEQ ID NO: 12821 - DNA, 523 bp, Emericella nidulans
aactatgctgagaaggcggtctggaggtaccgggcggtgcttttctaccgggtcgcggaagtccatactggaacatacctgcccgacaccgatgagctcatgcccactggcacagatcctgggaacacggaaatcctagccgtatacggtactgcactgaagagccagattgataccgaagctgacatccctgaggagggatctcaccccattgtcgaagcgaccctgggcgtgtgtagcccagcttgggccctccagggactggaccatcttgctcaacctaatacatgaacatgcgcaaaggacgcacatatgtcgtgatctacaggcatactctgactcagcagaggtggacgcttatgctacactagtagttggtgacacgttctcgtcactagcatttgctctgagctgggctataacagtgagtgaccgtcacagcgacgaacaacacattggtttggtcgccggagaacatagcacgcgccgtgccatgtgtatatgggatcgcattgcttctaca

SEQ ID NO: 12822 - DNA, 217 bp, Emericella nidulans
gacccttcccggcatctcctattcaggagccaccacccggacacctgcctttcagagcccaccccacagcccagaggacctgagataccccaacatttcagatccccaccttcaggaaatgccccacctgaagcttactgggggtcacgctcctccagaaagaggcctccttccacagctcacactggtctgccccttctcatgccagtgattgcct

SEQ ID NO: 12823 - DNA, 693 bp, Emericella nidulans
gacctctcggcatattttgcttgttaggtagtctttacgcgtcttcaattttttttttcgcttggatatatatttaagagttggagacagtagacatcacatacctggtacaggattgaatagttgaatgtgcggcgctttcggaagacacctaatactgagcctctttctgagcacgacattgtttccagtaccaagacaactgtgaaatatagtaggaaagtgaatcttgttggtgatcatatccaagtattggtttgaaggctggccacactggttttcttgttattctcctattgcagtctctacggcaagcaccgacatgctgccttcaagccatcgtactgggcttccgagtactaaagggcagaaagcttgttagagctacgaacactccattgccaaaatttgaaacttggatccattcaagtctgcaatggtagttctgtctagatgcgagtagccatttgcgacaatataggataactgaataattgctagcaacaggaccagaaacatgggaggaccactaaggatttggctagtaggacagtttgagtaatccgtcgttgaattcgacattcttgtgattgtatatgctacatatagtatggaagactttgactgatgctatcagcgcctgtacctaccatgggcggattagattgcaatctatccatactgttacacact

SEQ ID NO: 12824 - DNA, 699 bp, Emericella nidulans
  unsure (1)..(699): unsure at all n locations
aacgtgattggcttttataagcgcaacaaacttcgcgaccatctttcagcggcatcaaggtttattatcttgagcagttgtcccggtgttgttattgactttgcctcctgtgtctcgcaactattttaagtaaacgagcttctctccagttctgggcgcagtaagaacgcttaaatcttccccatttttacgaatggttcaaatttcgctaacctttttgcccattaacccagagctgcccttccgcgatatccttgtcgttccctccctgcgctatggcgttcaatttcggtaaacagaactcctcgggggggtcaaatggtggattgtttggatccgctggaacgtcctcgaatactggttcaagcggcggtctctttggaaatgctggagcaaccacaggcggcacttcttcatcaccgtttggagccgcggccgcttccaatcagggctcgtctatattcggtgctggagctggtagcggcagcagtactcctaaattcagctntggtggtgcgacatcctcacaaacacccaacaagccgacagagtcgcccgcgtcggngtcatcgggcaccggacttgttggcggtgccagtaaaccctgcnngtgcctcttggagccgctacagcaactctgcgtctcttgcacgacacactctttgngncagncatcactactctgtgggtctcgcgagg

SEQ ID NO: 12825 - DNA, 1842 bp, Emericella nidulans
gacgcttgacatggcaatcggtgagacgagcaagatcgagagcgaggataagggcaagatctcggatctggtacagcgggtgaaggatctaaacagccggttgcaggatatcaggcgagagcaggtgttccaaagagtgtgtatttcttttctttccctttttctcccgactgggcttgctcccttgttctcttaggtttctaatggtcttattttacttaggaacgcgaagccgagttccgtgaccagtctgaagcgatcaactcgcgtgttgtccgctggactctaatgcagcttgccgtgctatccgtcacatgtgcttggcaattatcccaccttcggtccttcttcatcaagcagaagctgacctagaggattgtcagcgtggaggacgaaactaaggaggccgatgatagggtgcttcagaaagggagtgttgcgcggttatacttgacgaattccgacccgaagtcaatgatatgtttctactacatagcgttctctggatgatatgaggataatcgatttccttgatccaagttgctctctctccgttataacatcctcattcagaccactgggactatattcgataccaagttccgctcgtgtgtagacaatggccaatcacccgttcgtcaagaccacctcatctatggagaactgcgccatggaattttgcccaaagctgttctatatcgtttatctgtctatattgtcgcataccgtcaatggttagcccgggtacggtgtacggggtttccacctcaaggacgtggcaaaacgaagacgcaggcagcatctacagttgtatcgtgactcaatacccatacatccgttgatggctgtcccgatcaattgcttgatcaactcaacggcgtttaccgtgtctggattggggttactgaatgctagataccaacctagataatactgagccctaattccgccattgaagcagtaaaccaacagtatgtcttcttaatgtctgtactcattcaggtatttacttgtagtttcgagaactacactcgtcctatatagaacaagtacggtatgtgtctaacatgatgccttcccgaagctcagcccctgcccaccacttcagcggcagctagaggacatggccactcacacatacgccaagtgcagacgaaccaaacaatctacagtatagctctatacggcaatgccgagccccgcgtatgtgtccgaaaatcgcattggcatccttccacttgtctgcactatctatgagcaaaatagatcatcataagagaatcatattgctggggaagtagacgacctacgctgccgtctaggtgtatgctgcaattttcacgtttagtgaatactaattactcgacatcaaaccgggacttcagatatcgcacgtctaactcgtactatgcgatcctgatatgttttcaattgaggtgcaggggaacttcaaccttttcaccagattaggacatttccagattgatcaggggcaattacgcggtttgaaaagtgctgctcgtatctcacaatagaaataatactcattcagtcgtattggtattacttccaggaggtaccaacttttatccaacctcagatacttccccatcacataattaccaacacaacgtgtctatatatcaggaacgaggtttaatcaagcagagagagagacatcatgaaagcacggtcaaaaaatcgtgtatgtataaacgcaaaaacagggcgagcccatagggtctgcaatcggtaatcaaaatctcatcatgatagtatgaagagagctgcgcagatatgcagcgtataatttattatctattataacgaaagaaataggga

SEQ ID NO: 12826 - DNA, 1114 bp, Emericella nidulans
tgcctgtcctgcctacctgatagctcgactatcagaaatcaagaggatcgggggggctcaccttgccttacaggaacttggtcaactatagattataaattacaaattactacctgaaatgtcacctcaagtgttcggcatttcacgaaatgtaggtatattctttatcaattaaagtgctgctgcagctctcacatcccagaagtggtatcgttaccgtatcacaaattccagcaagaacgtgcatacgtcaaaagtaatttgaagacaagacagcctgccgtaactcgtcgagaatagtatgccctatgtaacggaggaataagtgaacaattaaccgtaaaaccgaagaaaacaaagtcaattatgtgttgacgttagagcttcaacgtttcccgcctgacatgcttgctccgccgaccgagtatgtgcccggagcgccgtacgcagggggcggagttgggctgggagatgggcgtcttcccaccggactgagacccggcccggggggggacaaatctccaccgtcgcctgagccaacaacgacttgctgtccgttcttcatgcgtccaacgatcatacccttagcaacagacttgagaaccgccttgcggctaactcccgaggcgtcaatataaactaaccccacattcttgatacctcctgtcagattggaggcgaccgccccggcctccgctccgtagcgatgaccaatcattgtagaggcagccgtcgacccagacgtcagtacattccgtgcgccttgttcaatgccatccgccaacgtggaaaaggcaatcagggacttatttagaatgcctggctttccgcgagggggcactcgagagttgtcgtctcgagcttttccatcgtccttgcggatggccaaggaagcccgaaattctgcgcatagcggccaacctgtacgaccgttatagatgatattgccgccgcactgtgaggaaagttccaatcttcgattcaatatggcggcgttgaaaaagtcgctctttggtggggtctgacttttagtgatgcattgcccacgtcaatacgctgcaagatgtagatcagtacaatcagcaggagcttgccgctactgacggagacattt

SEQ ID NO: 12827 - DNA, 137 bp, Emericella nidulans
tcccggtgcctcagtgggtctggtcctgcagcggcagcacctgccccggccccggcaagctcaagattgtggggcattagccggcacagacggttgtgttgacggggatgcacactgggcagccctccttctccaca

SEQ ID NO: 12828 - DNA, 2532 bp, Emericella nidulans
gtggcatgaaggctaacccaatgaatgttgtaagcagcccagccgtgtggtaggcaagagtcctgtttttatcttcaaatctcctgtggcctttagaaccttcacagatctaggaaaattcacataccagaccctatggaacaggatcaaatactgccaattgaaagtatcctaagcaagttatggcattactcggatgtctactacggtatattgagtaaataatgttagtaagctctactgaaatcactgctttattaggtaaggttcattttccagcctatatacatgccctatctacgggatctgtatcccacgcacgtaagcagctgctctaagccaggggatacgatgtaaagcacagaaagtcagccaccattaccatccatccacttatttcaacaaggcctgaaagacagctagtaagcatctctgaccttatcagatattccgatttggtctgatacatgccacgcagaggaaacagcacatacctcactcatacaaactgttctagttcgacaacgcgaggtcgattgtcattctggtcctgtgattgcatagagctcggtccgattagtcgttggaacgatctagggagcatcagtgcttgcactctagtacgtaactagctcgtaacatttggttctagtgcctaacacctcctgagacttgaactgtcggatggaaggccgctgcggacaggcatgtggagactggtctttacatatgaagtctattttaacccacaagtaggaatttgccattaaatgggaatgaacggggtcaagtgtgttatagtcatcattaattttaccgtgggtattatatctatatgaggtcgaagtatatatgcacaggtgctaccagagcactatcccaatccgaaaacgccgcgctgcgtaggcctcgtgaatcaattgatgctatactttcggaatccttcgtttcggtaaagtccagggttcggggcatacgacctagatcaacaaactcgtcagtcaaacgggtcaagcatctcaaacagtctttgctttagaaactaacctccccttcactatacgcccaaaaatagaccgcgatcccaatcagatagtagatcgctgcgttcgtgccttggtatataagcgccgcaagaatcgagctgagcgggtagagcaacagccgaaattcgatgctgcgatgcgccgtcgtccccgcgaggtattttagtggccattcccaggcgacgcccaggaggcccattaaaaggttcaatatttgcaggacaggtacgggggtgaccgctccgtcgaggtttcgggtccaagtgtcccagaaaatcttgggccagataaaggcttcaattgcgctgcctatttggtctggttttgttagattggagatgaatctgatggtggcagtggtggttgaggtacgtacagacggacgctgtgaggacgatgaggcgggcccagtggtttttgatgagacggcccatcttgaggtcgacgacactcctggtgtatgtagagaaagatgttcagcgcttccgtcctgcgaaagtgcggtcgtcaactcgtcgatgcgcagattaaacgaagcctcaggttcgggatttgagatcagccgtgtgtctcgttgaggaatatcactcgtcgattcgtcgtgcagtttgacatggcagatgacggtggagtcgtgctggtcttctactttgaggggtcgagtctgcagaaatcggtttcgggttcaatcaacgtggtttgccacgaccttcacaatcatgccgagatctagcaaacggattgagcaagatagtgtcttgacgggaatcatgccacgttcaggcgagggagacccgaccgcttgtgggaggccgcggattacatagcttcgcacggtagcgatgcatcccaccttcctgccgttgtgataggcgtgcttcaactggggcccgattcgacgccgggatgattagccctccaaccaataaggcatcagaagcagctaggttgtccgacgccgccgcttggcttcttcagatgcagaaggaggcaggtcactgattggagagggggcattggacatgtgcgaggggaacccctgcccggcgcttagaggcgtgacgacaagcaggagcagggcaaatgggcatcgaggacgcggggacgggagggactggccgcattagtcgcatgcctaaatgtgacggccgagaagatcccacagcgaattcgtggggcccacgcgcagtctagccgccgctcgggtctgctgcttgggcaatgtcattgatcagtagccaaccgtgctcgcaggacaaacttctgaagaatcggactgcgaagcggggaagcaggttcatcatggatgaataccctcatggtttctatttgcgtctcgtccagtcttggcggcggtcgaatgtatattttgtccaaggctccagtcgcaatttaaaccatgccatcagactcaatacctcagtgacgagtatagatccctcgcaaggtctctttcttaccgtcgaacttgaaacaccctggaggt

SEQ ID NO: 12829 - DNA, 630 bp, Emericella nidulans
cgatcctcctcatcgatctccgctaccttgcactgaaacagaccaagctgttacttttgaggaaagcgcggtaccttccactgaatgcgtttccatcaatatcaagcaggtacttataagcccaggcctcttcctgctccactgactctgttatgttgaagaactccatctgagcggcgcagtcattacgatcgcactgcccaaccgaggtaaactgaacgtcaaagaggtcgcgatactcgctgcgatccatctttttgacttcccattgaccgccatcagtcttggagagaaccttggcgtcctcaagagcactgatgttgctgaccattaactgtcggtggtgccgtcgccaccctccgcccttagagaagccccctgttgtcgaacccctccaatatagcttgtcaatcttttcctcccaatataggcattctgcatgttatatggtactttattagcccagtaccagggctggaagaggatgcttgaacgtgggacctgctcggagaaaacggaaagggctgaacatgaaacacattggccgtaaaaaccggggccccaccaaagggtggaaacatgaaaccggttataggggaacccccccaaggcttccgcgtgcccccggtt

SEQ ID NO: 12830 - DNA, 610 bp, Emericella nidulans
  unsure (1)..(610): unsure at all n locations
gtacccaatgtttngtgagacaccccgaccaagtcgtgcaagagggggtgagcacctcgggctcactgcattctttggctccgtcatcccaccagactggcgccccaagcatgccccagtccaatctgttgttccgaccaggcgatgcatggtcgatcactcttgagcctttgaccagtcaacgggaaacacagtagtagcatcacatccagctaacacgtgtattgcaaaatgatttcccagcatccatttcggcagaggtgcagtattccacaccgtcatcctccacggcgtatcgggtgaagttggaaaccacgaataccactgcatcagccttggtctcttcgcatcgccgtggagatccccgcaatccacggaacatcgtgctgccgttatcgggcaagctcaaagaggcacttgtgctttctggcgacattctagcagaaagctcatatgatgcttttgcgatcacatgagagggacttgggtagaagccacactggccgccatgggttttgatgcgagagtagaggaagatctgcggttctttggctgttgagggacgcgttagttagcttagtcttgctgtcgctagctgactagactattt

SEQ ID NO: 12831 - DNA, 223 bp, Emericella nidulans
aagaagtccaggaaatcagcccgaatctacggtatatcattgatgagcttgatcaaatctgccagcgtgaccgcagcgaagttgatcttaagcgtaagatcctcgacgacttacgtcacctggagtcagtcgtaaccaataagatcagcgagattgaagccgatctggaaaaactaacgcgtaaataatcccgaactgacggttaattcgggcattcccctct

SEQ ID NO: 12832 - DNA, 216 bp, Emericella nidulans
gatctttcggcacaatcatcgcatgaacgcctgcggctccgcactacgcaggcacgcgccgcggttgtgcggatcggttacgccgtcgaggatcagcaggaacggttgatcgagcgaagtttcagatccggcagatcgttttcctgatactgacgtcctggcttcacgcgggcgataatgccctgatgcacggcaccgtcgcttttctcgtcgaga

SEQ ID NO: 12833 - DNA, 1106 bp, Emericella nidulans
tgattagctctttctcttcatgtgcgcctgcacactaggtgtcttttgacccaacacaaaccccttaacccctcaaattacggagattcatctttccttcacatcgtcttcctagtcgacgaaatcctacaaacaagagttcgctagtatcttcgaagagtatccgaaacgatgcttggaattcttccctcactccatcttcctacttcctccctggagaaggatcttataaacccgcccattcaattgttcttcctctccttcctcctcctgcctgttttctctctcctcttcaaataaagtcaaccatacaaggtctccttcttgtcaacgacacttcaacctcgacctcctccttcattgatcttcttcaatacgaagatcatcctccacatttcgcaagccttcccaatctcttctagcagatagatcttctcctaggcaactctttcgaatcctcaggtacttttatctgtcctttggtaagagcagaacacattcatcgcccgtctgcctctgactttgtcaacagcgacccaatcttctctgacatcttcaacgcgttttcaaaattaataccttattcaaccgcataaccgcaacgatggcccagagtgaaactcgcaatgccggcgacccgtccttggaccgacttcgtctgctcacagatatgtgccgtaacatcgacctgccttatggcacgtttagcatcgactattagtaggtcggtgtttatctgcttcttagcacgaaatctcaaccctccaccacacactcctcttgcaattcactacactacggaattgttaaagcatcctcatttccaattctgttcatgccagttacttttccgtctctgcctcttgcgtcacttcgaacatagcgtgatcctgtccttcccatggaattcactcctgttgtctcccaagtggcgctggaatcgcatttggagttttcacccagacattattgtaccaagtctatatgcatcctgtctacctcattccccatttgcattaatgttgcacttcacatagcggcaccaacgacgctagcttcgagatatatatacacgttccccaggtgatcatactctgtcgacaaga

SEQ ID NO: 12834 - DNA, 530 bp, Emericella nidulans
taacgggccacagtttcattatgcccatggggcgacagcttgtgcgtatgactccctgagcgctagtagaggacttgtgtgaactgcctgggtcaaacactacgctggtgggtgcttggtgttaccatgctggcaaaatctctaatagcgtctcagtgccataatatggatatggtttaagggctaattagatgtctactgagtagagcacgaacaacaggccagggtgcaggtagcacaacattctactaatagccttatatcaaagcaagccacaatgggtaagatgacaattttaacgaccagacttgtcaaggcgttcgtgcgaatgtgcatacaaacaggagcaccatcataccactttgtgacaactagggctagacactgtggctgcctcacctatctaaacgcaaatatcacgcgccaatgcggcttggcagatagtaaccttgatgggagcatgctacttcaggctatcaccggccactgtcacagcatggtgagacggtcctcaaagagacacggggcat

SEQ ID NO: 12835 - DNA, 457 bp, Emericella nidulans
aaacgactgtaccgagacattctgtccatacccccgctgacgtgtgagcacatgtgaccatgctctcataggacagtcatctgtctacgtctgatagcctgcacgaagctctatgatctcctgacagtgactcaaagaggacgccatgttacctgcgcgtcaatcgtgatatatccccaacacttacactctatatcgacgtgacggtatccagcccctgcagaataaatcatcgacgcctgccttatcggccgagaaagcgataacgaccattggtatcactgcgcagccttgacccagggagcgtgtcaagcctaggccccagagcctactacatggagcacgctgatgcacagcccactgccctttgcgagtgggcgttcacgcgcagctgtggagcaacgcacaaagtgtcagcggaggactacgagcagccttcttgaactagcgccatccc

SEQ ID NO: 12836 - DNA, 1511 bp, Emericella nidulans
tcagtccagggtcaacaacttcccatccaacaacttcccaatgtgtgttttgtcaatctcttgtccgtcctttctaatttgcgacatgagtaccttcaggaacttaagcggacttttggtgaacttagtcttgttaggtgtcagtataaatccgtctggggccaggctcagaccctctggtgcagcgtaatatgcgattccaagaaagttgcatatctcatgatattcgccaatagaggagatatagagctgacccgcaaagagattcagctgtatcctaaccgcggctggtatgtccaaaacagcacaatccgcctgcggtacagtgtataggtcgagtttatcgagggccgagaagttgctgttctgacgcggcgcatataaatgtatcatgaccgtcttggacttcaaaatctcagagtgaagttcgtttgcttcataagggcttatgactatcatgtgcttcacagtctttctacccccttcggaggaaggacgggcgatgcctgtgagcacccattggacgggacgttggtaatcgtccatggtcgatgacggtgacttgggtacccgaactgtccggacgaaatcccctgtgacaagcaggccggaggtgggctcaggcacgtccgagtgctcggcaaactcggacacgttcaagtaattcgccgctgaagtatcgtccagcgcctgaaacgcgggcatgaatgcgtttgatccttcctttaatattccagttgccacaaagtaacgcaagtcggggtgaataaagtgatcctctggggtcgctgcaggtggcctttggacctgtcgttcctgctcaacttctggcgccagttgccgttcctgttcttcctgtagttgtgtggattgaaagtttatgtctttgaactcacggcacctctctcggataagacggatgttgtcattgtcgtcattattggatagggtaaacggcggcgtgtcttggtcagaatggggcctatatcgctgttcgatggactgggattctggttcaagaaattcctctgctagggtttgagtcatctgagtctcaccatcacgacgggccctgttccatagattgctttggcgctcaaaacgttctccctggattgcccataacggtatagtacgctgcatatcggcccacgtctcagagatcgcccatcggagcacgtctgatacattgatgtcgtgcccgctgggtttttcaacgatggagaggatcttcgtttcgatctcctgagggacgcagaaaacaacagactgcccctttcccaatttcctcatcctcatgcatgctgtataagtgatcagtaagcagtttttgcctgacgctaaccttggtggtcttaccttgcactagtttgtcttttgttagacctgctccaagagttacagcagctctatagtgctgaggcagtttcaaatcaatacctcttgtatgggcctcatctaggaacacaaggcacgcctccagctgctttgcaaagggcgagatttgcagc

SEQ ID NO: 12837 - DNA, 222 bp, Emericella nidulans
attgacagctgatgagccactgcgtaggagaccacggggttcacgccgcggggcagccaggcccccggatgcactcgaagcgcacatcgcggtagttgcacaccacctgaggcagggcggcaggacccctgcagcacgcgggtctggaagccgtgtgagtgggagaatgagcatgtgcctggggccagcgcctcagctgagctccccagctgcccccacagg

SEQ ID NO: 12838 - DNA, 214 bp, Emericella nidulans
atggtaatactcgctgccagaatattgtgtgctacgaaatgttcaaaaagctgggccctttcgtcacggaatcgtcagaacattttgctgagtacacaccgtggtttattaagccaggtcgtgaggatttgattgagcgttataaagtaccgctggatgagtacccgaaacgctgcgtcgagcactcggcgaactggcataaagagctggagga

SEQ ID NO: 12839 - DNA, 223 bp, Emericella nidulans
gcagtcagtgtctggttgacagacccccggaccgctgtggacttggttgtgctcgaggtggccctgttggctgaggtgcctgcagctggcagcagttccctccaccaacacttctttgtcacctgcttcaaggccgataactctgaagaaggtggcccaggggtaggtggaggggctgccgctggggtgtggaccggggggcactgggtgtctgagtgcaagg

SEQ ID NO: 12840 - DNA, 217 bp, Emericella nidulans
gcttgcatgctccagtttctctccacccccatccacatcgtgaaatgtgccctcccactccccaggatgagcaaggtggtgtcctctgtgactgagcagtcagcaacttaacaccaaaggtcaccaatgatcaaatccatgagagttgatctgaggagttatgtattagggctacgaaagagtaaacactcagtaaatagtggctattattatcatc

SEQ ID NO: 12841 - DNA, 218 bp, Emericella nidulans
gattacaggcatgagccaccacacctagcctaatcaattctttagtaccaagcaaacccacatgtggttgaagtttatgggtatgtagccaaaggtccagaagaccgtaacatagtccccacactccccaggaccctgggtacccactacccaagaccttcatggagaggccctcacaccccagcctcctctgctctacctgccgaggctccaaggca

SEQ ID NO: 12842 - DNA, 1570 bp, Emericella nidulans
gcacccgtcaggtgtcatcagacttttgtcacggccacgtcctgattggtatataccttcttcaggacctgggatggctcccttgtttacggatgaccccagctttggggctctccgtaaacacggcggaaggagacatcgtccttccagcatccagactgttgataatcgccagctgaaacgcatcaatttctctttgtctttgttggcaccgtacgcgatgttgatgagtccggctcaatcctttaacccgctgaatgggactttttcgacagatgcaggcctggcgactttcagtttggctagagcccctcaaagccgcgcgaagcaagtattaatggcacgcgcaacgttgatgctaatgaacccatatcaaacatttagtccaaacaacgggacattctctaccaatgcaggcctagcagctctctttatgtcaaggtctattcaaagatcaagccacaaccgttcgacgcgcaagcaagaggctcatctgccccattcactcgacgatcaactcatgcaagctgggagacgtaatatacgtatcccgggagagactgactcgagatcaagggacttcatccgagacaccaacgcgattcttcggtgggagcttcaaaatgaaagactcctgcaggagagaagcaaggatgtacgttacatcaatcatggaattagagattctttcgaaagtgctccaatcgagggtggtatccgatttcatcctgaggaaatgggtttcatctatgaggaaccggctgtcggcacacggcgtcagacaggttcttcaccagcattcaccttggaagagcattctgtatttccgccacctccacctcgcgacgcaatgcgcatgcgccattataatcctcccccgcctcctcgaccacgtcgcctggaaaaattgaacgagatgttggcaagtggaaacgaatctacatccccgtcggctagtcgaacacagctccgccgtaatcggcttccgctgcctttctcacgttcgtcttaccagaaactgatgacggcaattgtcgccgtacgtgcattagctggaggctccaacggcaacattgtcgactggcccttagtatcgtgttgctttccggagcaagattcgaaggtgatacaagataaaggcaagattttcttggctaaaaaccgactgcaaatcgcgaagatgcagtatgacttttaagaacgatttgttgactcgtacgcgaacaatgaagttccgtaaattgactacaacaattttgaagggtacgactggaacgcatttattgagtgggccaacgcgaatcttgatgtgccgaagtcataccggacttccgatctttctgccaccagggagccatttgaaatttatttgagcttcgcgaggaaccctagattattggatgaactttccaaacgacacgggagtcaccttattgaagaaacgttgtatttacatagcgttgcgttcgttcctccaggtggcgttatgtccgacgggctaagtttttgtttaggaggaaaatcgttgggaagttttaattggcttttccagtgaacaccggttcctttt

SEQ ID NO: 12843 - DNA, 190 bp, Emericella nidulans
cattccctggccccagggaccatgctgacttggctcccaatttcctctcccacgactaagtacactagcatgcagggctctgatcatcgcatgacactatcccagacccacgagccccagcccccagcctcctgtcatcctggagaccaggctcctggcgatacccggctgggtgttcacgggccccctc

SEQ ID NO: 12844 - DNA, 753 bp, Emericella nidulans
aaagttgtcggacgtccctgttccaggaccagagccatatcccccaccaccctcctgataatggacacgtagcggtttcgttgatccccatgtctcaccgcgactgacatctactccttcagcattcagaccatactggcaatcttaacatgccgctaacgccctgcctttggcgtgcgctattcggtcacgacgcgcatcgatgtagagtttaaaatccgtacccaggcgagggcttcaacgtcggtgatcaggaagtatcagaccgcttcttgacaaggaattgtgacttgagttgggttggaaggagatgcaatggtcgtgcatacagaacttattataccggataccgtcagtactacgttcttggtacctaggacgcatgattgatgcttgaagaatgctgatgatcaaggaatcatacactaaataaatctccccgcgcggtgtccctgggagacagtggtgttgaatattctgatccgcgcaaattgcagatgcctattgttattgataaggacggtgccatggggcgcgaagcgcgccatccctcgggagggctacgaggcattgtggtctttaggaagcatcctaaacacagatatcgcgcttgcagatggtgtaaggtgtgtatggggtctctgtcaccgcgctcgcagtttagggacggcggtccccgttgccccaggagagggttgatattgatacatgtgtggaaaaggcatgtcacaacaacgaatagctgtatgctag

SEQ ID NO: 12845 - DNA, 1972 bp, Emericella nidulans
tcgtcgtgtccgccgcttcggatgtactctgctcggtgtgtattcagcggaatcagcatcgccgctcatagctttccgtacgcatttaattaggctcggcacgtctacgacctccatgaggtcactctcaggcagcgaaattgtgaaagccttctctatctcatgtgccatttccatacccatgagagaatcgattccgaggtcggcaagctcgctatcgtcctttatctctgcaatttcgagaccggaaagttccgccaggatggacttgattcgttgcgtgagctgccccttgtctggcccatcgttcttgaccttttttactttggagaggctgagggcgggagcagactgctgggtaggagcaacagacagtgatggagtgctgaggttctctggagcatcaaacaggttcacactggctgattttgaaagcagaggcatgttggtaggacaactagcactatcattcactgtaaggcgagagagtaacttgctcatcgaggctttgggaatcttgacgtagctgatacccagaataacttcgattaagacaccagtagtcgagtcgaaagcgaacacatcagtcagaaatgccttatcagagggccgatggtgcgttgccagcacatggtacgactcgggtcgagggtcctgttgacgcattttgggtgaacgcatccactgctcgatgccgttggcgatgaacatatcatttggaacacgatccgtcatacagttgacgtaaatgcctcccacttgacagaaactgtcggctagatgcccatcaagccaggactcagggttgtatttcttcaccacatatccagcggactgattgcccttgctcacaagcttctggagcccacggtagtcctcgccataatcgacaatctcggcgaacatcttgtagatatttctgttctgtaatacttcatcgacttcaccgccgcgcattagttcgacacacgtttggtgcctgaagtgccgctcaaaccgggcaaactcatactttagggacacatcactaatggaccggaagataactcgaccggttgtatggatggttttggagaaaccgttctgtagatcgtcgctgtatacctggaaattccaggaggttccttgagcgacgtcgtcggctgtgacctccacccacacagctctcagtggattcacgcatattggcgccagattctctacggcatggatctgaggctcgtgttcagtgcttgcaagctccggacggatactccggatagactcgatgaccaggtcaagctgtacggttgctgggcagatgggagcggtttgtgcaatgatatggcctcggatgagcttgtcgtatttggggatcatagtattgactcggaatcttgcctgctgcctctcactgtcttggtaccccacaaatgtcaataaagtattcggtaccttagcctcttcttttttaacttcctcaattgctggtgcggctgtcagctttggcggattcttcaattctatccagtggcgagaaggctcgaactgatacggtggtagcaggagaagagcgtattccttggtctggctgggctgatgagcccagaaatggacacctagccccgatttccacatattcatagttgcatctacaaggttattccatccgttatggctcgtgatgttgattgcctggaagtgggagctgctgggattgccaagtgcacgactggccatgttggtgacggtcgagttggagcctgcttctaagaagacacaagaaggatacttatccgccagtctgtgaattgcgtggttgaaaaagaccggagaacgaatatgatcagcgacaaatctggaggtaggaagctcctctgtctgatactcggttgctctctggacgggaatcacaggcgcacggaaagtcagttcccgggcactctcctcgagtcgatcaaggaggggatctactagagcacaatggaatgca

SEQ ID NO: 12846 - DNA, 699 bp, Emericella nidulans
  unsure (1)..(699): unsure at all n locations
aagcgccgctatcgttgctgactccgagacctggggatggccggactttgttggatgccaacgggcgggcgcctgctgtgggcagacttatagggtactccatttcaaaccgaaccaaaatcagtctgagggtccatcctggagaaacttgcctgtctgctgtgcaaggtacacctgtgggagtgctcctaggccaccgattgccagctacctgagatacaattgcgggaacatgaacacatttctgtcgacaccgctgcaacagctgattctagctgttgcacaaactgcttgatcatcaacanagaaggcccggtatcgaacgtacacccatgctcgatcaggaagacccgcccgttgtgagtcttggctgggagatacaggacgggcgggttcaatctgggtgggtcgcagggaaggcgccattgtattgggaagcccgtttggtgcacagcaaagggcctacagggttcacgtgtatgacccaagggcaggtagttcgatattctttactacttcccttaatgggctttctacggggttacctagcatgtttcttgccctcgtctcgtgcttaagtgcgggtgtacccccgaagtcctttgttctacccttaaaagatatgccttgccggcccagggagagtgtgttccaggccttttctgaccttgtgggggggtactacggcgccccgccgtc

SEQ ID NO: 12847 - DNA, 893 bp, Emericella nidulans
  unsure (1)..(893): unsure at all n locations
gatagcaccgctctcgtcctcacaaatgctccagtgccgccctcgtcatcatctataattcacatccatatcctcctcatcgtgagaacccttcttcccgtgcttgtgcttcaacttcttttcctttgccttgcggatcattgcctcgtctcccgagtccaactccgcgtcaacctgcgtcacatctcctgatttgtccttcgtcttcctcttctttgccactggctctgttgtcggttcgtcgtcagaggacgatagctccgcatcgtcgtcctcagcggcttgatcaagggtgaagtcttcgtcctccgcagaattgtactgctcatcgtccaggtccatgtccgcgtctgctatcgctgccggatcgagaggcattttgaatatagctgtcttgaatgggagagcttaaatgcgaccatgtatgttcctcgatgtattctgccgggcggagcttgataaattgcttatataagcaaatgttactgcattcagtagaccactaggttagctttagttaattagcacagaccgcttgatattcaggcaataacccttttttcttgctgaggctcaagcctataaaattcctctcaagtactaccttggtggaccctcccattcccttgcatttatgagtgtttgacctggttgcgtttaacttaaccgcttttgccacatttgttaattgccaggattttaacacaataagtcaaaactgtttccaattttaaacaagcaggaaaactggcaatccccagggagccttggatagagtgttttcagggtttttcttccctcacaaataaactggccccccccggggggtgtggggcgccccttccaacacacacggttgggggggggcccctcttttntttttattaaaaaaa

SEQ ID NO: 12848 - DNA, 115 bp, Emericella nidulans
ggatccatcccgttcttcggctcttgacactgtaaagggacgcaacgacgttgctggcgtcctggagtgtgcttcaacggctcttgagcgaggtgagctgcatcgtgaatcggta

SEQ ID NO: 12849 - DNA, 487 bp, Emericella nidulans
ccatcgggatcaccaaaaacatgagtgatcataccgaatgtcctttttagagaagaaacaaatcatgcaggtgaggtttactgcaaaaaagagataggcatgaaacaatcttttagggcggaccatggcgaaaggtccatgagcattatatacttctagcacccgtaaagtgagaatgtacggaataacagtgactcagataatggtagatatggctggtctatataagtagaggagctctgcacagaaccagtatcaaatgaacggcattgatcaacgactaaagtgcaaagtgtactttgatgaggcagaaatatagatgcgatgtactctaagaaaccggatggacgattatgtaaggaaagaaaattcccacgcgtgacttataacacaaacataacccggtagtagggcgaattcccatcgtttgggttgacgtctaccgatactgctatttgaggtctaggcttttgttgcgtccacactg

SEQ ID NO: 12850 - DNA, 833 bp, Emericella nidulans
taatcccgtgttttagcatgctggactgacacttcaatctgcgtaggtgctgaaatcctactcaactctgaactgaatgtctgaagacagaagaactatagatcttattttggcgagatactatacaatatagtgaaatatcaatcatctcatgatccatcttccagatatctatttccatttcatcttctgtacgcttcattctccaacattttcccaaggcttctgttcaaaccagagacgcatattttctgcggccttgtggggaataacatacagagggtgaaaagccttcaggcggtcactttcatcaaagacattaacatcgtaccctttctcgtccgaatcccaagcaggccgatatttccatgaaaacgccgacgaaaaacgtccgttgggaacaacgctggaattggtgtggtagtggtagtgctgaacggagcttaggccagtaagagtgtagcaggtatgatatgagtctgggtgtctagagctcacattagtgtcttgcaataatcgaggccgtggtcaacctacttcccgggcttatcacggagccctccgttcttcgactgacagcagccaaggatatatcttgtcagtccctcgcggctgtaaagattgccaacagcaggcttagggccagcggcatcctgaacgccgtccagcgcagattggatcaacggccagcaactaccaacccagtgactataacatccatcgaccagcttattggttcttccggcgaatcccccctctggtgcgtactgtcgagcagaaagccaggaaaggagcatttggacatccatgcacctatttccattcagtaagca

SEQ ID NO: 12851 - DNA, 121 bp, Emericella nidulans
cgggaacctgagtccgggtagtcagtcctcagctctgccatcccgagagcgccagtgcctaacaccttcagaccaaggggtcccggcacccagccccttctctctcagacccagaagtcta

SEQ ID NO: 12852 - DNA, 151 bp, Emericella nidulans
acaacaagatatggggatactactaatttccatatcttcgccactttctgtgtcctatcgcgacgaggctccgaatctggctttattttatgtaccggattgtcccttaactatcaccgtacattatggatgcagctaagatgcccagtta

SEQ ID NO: 12853 - DNA, 640 bp, Emericella nidulans
tgagcactcccggcaaaacttggtcgatcataatccaacccgagagcctgccacgtcggcctccacgtcttcctgcccgagagtatttttttcgcggcctcctcgtatgcctcgcgcatttctgtattcggcttcataggcgcatcgggcttctgcgcctcctggatcttatcctggtacttcctcgctttgaagaactggtccttttcccacctgctagctgttagcactgaaccttggccaattcatatggagaagggacatggcaaagggacatacttctccatatcttcaggcgcgtccggccagacaaacggctccttcatctcaacagtcatcctcttccgcgaccggggacgtcgtagttttccgtaaccgtatcgacccattggtcggagccgtgtgaccttttgttgctcgacgtagctgcgtatgctgaggacgccgacgccgtacaggcgctgcaggtagtcgcgcatgtcgagcttgttgaaggtcaagggaacgtagaaggaggcatagcggggcgggagaaaaggtgttcggacaagggcgactgtgaaagttggactatagtaatttttgcagttcagtgacaggagccgccgtcgcgagcaatgggaattgaattgctgagtgc

SEQ ID NO: 12854 - DNA, 745 bp, Emericella nidulans
cctgatcgtcctgacataaatgtatttgttcatgagcgctaggctacccctgcagattaggagattgtattctgcagcataggaatagaacgctaccatcttcatgtcatgatggcttttagcacgcggtccatggccatgtatcggtggggctattgtgttagcacttggggactcagcgggattagcggggtgtcttacgtgtctgggactactcagtgtgggatgaggtagagtgaacatccatttataacgaactgattgcgtgcgttgcagaccgtacaatgaggtcgacacataaggtggtattcctacatcggaagcgtgctctacatgggtatcgtatgcacggacacggtgatgtaccacgccgatggttctgcaagatggaagtattttcgacagacgcgagttgcggcatgatccgctatggctacgtcttctcaacaaaggctgacttgcgctgacgttgaggccccatatagttaagcaggcacttacctgattggaccaaagcgacctactggccagccgaaggggagcttgtgccagacggctgctccctataacatttgatgctgatgtcgcttccgctaaaaggaacctttgaggcaaattctcattaggtttccaagttggttttccaggtccctttccactggaattgtggttctttgaaaaactatacttcccttccggcggttctcaggttttcgggtgcatttcccagaatttactgttccaa

SEQ ID NO: 12855 - DNA, 712 bp, Emericella nidulans
gtaggtgattaataggtagtaggtgggccgcgccccaatttgctggaaagaagggaagagaaaggcgtagagtattggtacattcataagcggcaggtcagtatgtatgtacgttgaatgtcgaactcccattagtgcatgcagcttaagcatgaccgtctgctgacagcatggttgatgattagtctatacaggaatagcggatcggcgaaaaaaagtgccatcacgtaagtcgaaggaggagtgagcgagcgagcgaacaggtgagaaaaatcggctgagactgctacatcatggtcgcgttaagtgtgtcattacccaggtttttgttatcgacgcaggaagcagagtagatgcagagcgtctgcagcttacttccttttgctcaaaaccttggtaatggcatgacggatgatggttcctgatttttcgatctccttcttcgtcaagccggtcgtgacgcatactttcagagcagcggggacattctgttttggttcgaagttgtcatcgaggcatttgaggcgggtgatcagcacaccgttcgcgatgcacttaaatcagagaagacatggttagtaagttagcaaaggacttgagttagcagagtcgtacctcatctactacgtcttgcaggacgtattgttggtcctcatgactaagtcttttcgcagcaaccacctcaggtttcaacacgaggacaaggatcggg

SEQ ID NO: 12856 - DNA, 450 bp, Emericella nidulans
atacgacactagattgggctgtgcccacccaccaagtgtggtacattcggctgaaaggaacaccattgctcctcctggttcacgatggtccccgtctgagggaaatggcgtttcgccaaacgacactggaggccccgccaggtcccccagggcacgagctgtccttaggcgtagcaatccaaagatgctctgagggtcgcgtctggaccgtctcaaatgcgcattggcagaggaccaggctcttgaacctggaggcccatgaaaactgcatctcggttcataagtggcgctcaagaaggcaacaaagacgatccatgcgagcaactcgctgggcattccagcacaggccaggcgtcgcgctttgcactgaagttatatgagcctaccagagaagagctgtcttagggtgcaaaaaacattcccaccgccggcgacatatttcccatgaat

SEQ ID NO: 12857 - DNA, 226 bp, Emericella nidulans
ggctgtttttgttctgcttattgacatataaacgctcatcggaagctttatacgcatcatgtaacgtatcgttttctttcatcgcgtaaataccggaagagaagccgatctctttctgcggcgcgatatgttgcagacgtttttcgatacgttcaggcagttgtgctgcaatttgcggcgtcgaatcgacaagaatgatgcagaattcatcgccaccgagtcggat

SEQ ID NO: 12858 - DNA, 226 bp, Emericella nidulans
gttctcgcaggggcgggttaacatcaggccattttcatcgggtaagttgatatccagcagaattaaatctaccgactgattctgcataatttcccgtagcccagcaccgctcgccgtaacggaaacggtatacccctcctgagtgaagtaggattgtaatcgcgcctgggtaaccggctcatcttcaacaataacaatgtgatgtggcatcagagggttttactca

SEQ ID NO: 12859 - DNA, 228 bp, Emericella nidulans
gaccaggcccctggcatgggtcggggcgtggctgcctcagtttctacgtctccttgttttccacctgtgactctggtcgtttttgccaccttcatctctttctctaacttccagtgtctgtcgcctctgggtagtactaatagctccctttccatcgtggtctctttcttcctccctgtctctcccctttcttgttgtatttattcctcactcatcaaagcccatctt

SEQ ID NO: 12860 - DNA, 227 bp, Emericella nidulans
gattacacgtgtgagcagccgcacccggtctaattttcttatttttttgtagagacagggtcccgctatgccgccagggctagtcttaaattcctgtgctcaagcaatccttctacctcggactcccaaagtgtgggattacaggcgtgacatctcgtgcccagcccacaggtctttcttctcttcttcccctagagaggacatgcagttatccagcccagaggaag

SEQ ID NO: 12861 - DNA, 217 bp, Emericella nidulans
agtttgcccagcatgctggcatctctgggaaggtactaagtcccgataatgtcctgcgatgccccggccccatgagcaggacacacctcttgtgggcctatgcaataatcagttaaatcacctgaagcacaagcatatccgcgggacagctccgggcatcctggcactgagggtagggtgggcggaggtccctaagggagaggctgggctcgggctg

SEQ ID NO: 12862 - DNA, 1419 bp, Emericella nidulans
atactaatcaccaaaaaaattaaatatgaaataaaacaataattaaataacgtatagttatgtgaaaagagagggtctttatcaaaactgtaaatatttgcccagatcatattcaaacattacaatggtaaatactagtaaaagaggttcaaatggaataagaacaaatgatctagtgaactcatgcctactatgacatctccatgcttgaagcaagaacacccttataactgacaagcagtcgaaaaagccaagagatgctgactccatagacagttcatgtaagaagtctgagaacgactctacgtgttccaaaccttcagagacagaatcctaaataacatcaaacctctccttctctctcgcctctctgtctcttcctccagcaaccaccctacttttactccatcctttcgtgttctttgtttctttgcaattttcttccgttcttcctctgtactctcccgctttctcccctccggctccggttccgctgctcgacttttagtgactgatcgacccagtgctgttcttccgtgcagatacccccgtttacctgtctcggcctctcccacgcccggcatacctcatatttatatcctttgcgtcgctggatcgattgataccccgagccgtttggttatcgccccaatcgtgtatatatcttggtttttttttaagtggcaatggcgactggacctgctactcagtccctgaaggtcaggaacactcagcctatcttctcttctcccacaaaccagaattgctgtactaataccgcaacagtgtgtcgtgacgggcgacggtgctgtcggcaaggtgaacatctgccgctcctccctccccgaaatcaacatccatttcgctaatcaggcgttcagacatgtcttctcatttcttatacgaccaatgccttccccggcgaatatattcccaccgtgtccgtcaccgcgctcctcctttccctctagcgcaatgaacctttgttgaccggttaccacagattcgacaattatactgctagtgtcatggtcgatggtagaccgattagcttaggactttgggatactgctggacaggaagattacgaccgacttcgcccattgtcctaccctcaaaccgatgtatttctcatttgcttctccatcgtcagccctccgtctttcgacaacgtcaagtctaaggtatatccccaccctttgcgaaatgctttgtagtatataatacttcagacgatatgttgctgacttcgatgtagtggttcccggaaatcgaacaccacgcgcccaacgttccaatcatcctagttggcaccaagctcgatttgcgagacgaccccgaacagctcgaaagcctccgcatgaggaagcaggagcccgttacttatgagcaggctctggcaaagagtggccccggttc

SEQ ID NO: 12863 - DNA, 3637 bp, Emericella nidulans
gccactcagaatgtgcttgaatgacaattcagaacgaaggcactcacatccacataatcttcaagttccacccgatgggagctgtcaagctcaacctcctttagtgtctggcgcacgatatcgtaaggttgacgttctgactgctgagtggccttgataactgttccctcgtccagatagcctttgtcgtccacgtccagttttcggaatgcatcttggagagcaaagatctcaccctgctcaaattgggggtacttcctgtaatgcgaatgattaggccaggtcgaaaagaacgagagccggagaaagatgggtgcggaaataggaataaacatagggagagcgaacctctggattttaatcacgttcattttcagaatttggctcccctctcgcaatggctgattgattcaggatgaacaggggataatagtggtagtttcggctgaagatatcgaaatcaatttgttaggcacctcgatcgaggacctattgtgaaaatgcggaaagttatggacggtatgtggctgtgggaatggagaaagtggtggtgtagttactttagtactattcataccaatccatattatttagggaacctaggtagggtgttaaggcagatttatatttacgtacgaatggggcggggcggggtcgaacagtccgtaagatacgacgtactccggaatcatcaacaggattagcaccgagtaaccggcgcgggcaggccttggagtaaaatgtgacaaacaataaaagtggtccactcccagtcaagcatggcggtagtatacatagatatgtgtgcacgatcagggcagtagtccttagattgctcgtagatttcagcttacaagtaatgatgcaatgataaatcccgggccttagataagttaccgtggacgtggctttggtcatattggcaaacccctcgcagtttcgctacgtcataacacttaataccttctccgtaccgtggtactactttaggtacgctggtatttgccaattcccccagcttatatttcaagcagagcaaaaagtttctatcttaagtgaccatgtctcttgttcacgttgctccgagccgcgtccggtaacaacgaacagtaactaatttctagggctaacttaccacgcagagggaccgctctcgggaggcttcgtaatgtttgcgccaagaaggcggaagtactccatgatttacgcaaagttagctgccaacatagtcgctataccaccacacaggcaacccttatatctacactattatatatcctaacatatcgagcaaaccaataacttgttatcgctttccagtctttcatcttttctcccggaacccgcctcgcgccagaacgaaaaattgctcccacaggtggatgcgccctgctagacagctctccattacgttccgctcgcttgttgtcagcaatttccatagcgtcggtcgtgattaccacacatattcttttgatgctgtcgaattcacggcgttgatggcaaccgattctacaaaagaagcggcatcatctgggacatccttctacagcacagcaagacccagtagcaatctagatgccggtaaagatgcgcaagaaattcttaggcggttccaagggagagaccacaccatctctcagagaaacaggcttggaatccgccactatccggccgactctcctcctctgaaggtcaggtggttttacgcggtggactcgcccaaatggaaaccatcctttctggaccaacccaaagagatctcgaaacctttgccagctccgaagaagtttgttccatttacaataaaggattcccaagcgattgaacgtgcattccaggacttgtgcaatgctgagctggagcgcgagcagggacattcacctcagccggtagaggatgaacctgtgaaagtacctgttaacgaggactatctcttcgatgtgaacataaacaaaagggagctttgcccagcttactggataggccctgtgtacgaagttcgtcgtgggacatggtttttccaagaaggttcaactatcaaaccctgcgaagagaacctggccgcccagctagaggaagggtacctaaaagtgaaaccgtggcgacctgcagataccagcgagagttcctctcagcctttgtcaaatgcaaataaccgcgagcaaggtatgttcgcgcgaaggatgatgaagctatcagccgttaacttcagcagagtgtaccggaattgtatcctcctcgcctgcagccgaagcacgaaaacaccgcctgttcggttcctatatgaacaatattgtcacatatcaagattctacaatagccttgctcacaagtgatgattttatgtccagggttagcaaaacggtatatcagactctcggtggagtaccaggcaccagactagttcgtggattctcagaaatgaagaaatataatgaagctcaggataagaaaagctctgataagaaagctagcgagccgctgccttctgatcagagcgcacagaccggaaataccgtcgccagaccaaccctggatctttcgaagtccaacacggagccgcatgagtcgtcagacacggcagaatcgagaccaatcacaaccctggaacggcgtgtttcgtctctagcaggcgtgcaggactccacggaaattgaagaacaggcccgtaaacaagaagaaaaggaaatggaagatctaagggagacagatgacgaggacagggagagagaaattgatcacttagtcctggtcacacacggaatcggtcagcggctcggcctgcgtctagaaagtgttaacttcatacatgatgtgaatgttctcagaaaaacaatgaaacgcgtctataaagcgtctccagatcttcaagctctcaattctgccttcccggaccgacagaaaaactgccgcgttcaagtcctccctgtgtaagtcttgacttcattgtctatttgaagtttctttgtgctaatccttttaggtgctggagacacttactagaatttcctcataaaaaggccggccaaaatcgtacagagctcgacctggcagatatggacatgctcgatgatgatgtctaccctactctgtccgacatcactcttgaaagtgttcccgccgtccggaatctcatttctgacctcgccattgatgttctgctctaccaaagtaagcaccgtgaccaaatttccgccattgtcaggaatgaatgcaatcgaatcgtcgagctttacaggaagcgaaacccttctttcaacggcacagtgagcctttgtgggcactccctcggaagtgcgattctattcgatattctctgttcgggggacacagggccaaagatggagaatattcatgatgaagctggtacagcttcattaacatttgagtgcgaggaattcttctgtctagggtctccagtagctctatttgagatgctcaaaggtaagaccattgctgggcggtcttctcaacggggtgggagtactagggaccttgccgccgccagcgtggggtccaggtctaaaagtccccctgcaactttaggcacagggactgcggttactgagaatcagtcctccgtgtctgttccaaagtgccagccactgtatacatattccatccgccgagcgta

SEQ ID NO: 12864 - DNA, 210 bp, Emericella nidulans
ggaggacgtgtggttactcaaagaacagctaagaattttgcactcggcctgacccgggcggtggtggggctgagcatatttaggaggagccaggagacaatgggaatggaaccaggagttccggacgcccgtcttccagcgcacgctcggtggagagggaggggcataaagtcccgccacgcccccaaaatatttacatagttatgagga

SEQ ID NO: 12865 - DNA, 125 bp, Emericella nidulans
gaatcacttgaacctaggaggcgagagactatggtaaaccgagatatgcaccattagcactccagacatagtgacaagagcaaaactccatctcaaaggcaataagacaagataacagtgggagg

SEQ ID NO: 12866 - DNA, 220 bp, Emericella nidulans
gctcccatggctcgtgagatgattgtccagctcctgcgccctctcgagtgcttggtcaaagaaaacctcgtgcaagcagttgttctatcatcgtaagcatgatgagaagactggctctgggagaaaagcccctcgagctgggccggggtacagagagaaatgcccacaatctgatgtgcaattgctgctgtcttgcagaaagcccgagtaacctggaccg

SEQ ID NO: 12867 - DNA, 231 bp, Emericella nidulans
ggctttgatatgtggaatttcggctttcggtagcaccatccagaactcttgttccgttcccccctcgataccatcttgatcgccataccagatgcgttccgttccgacctttttcccacggtgcaaaatttgcaccgtatgtacaagttcttgttgcccccaacgcagtaattttcttgcctcttcctcacgaccttttgcactgtcagcgcccattaccactgcaatgag

SEQ ID NO: 12868 - DNA, 229 bp, Emericella nidulans
aggctgtagtgagtgccggcatccagccaggcaaatccgcgcacgagcagttcaacggtcacccctgagcgcctcgaggtacatctcgttgatggaggtaatctccagttcaccacgctccgacggcttcacctgctttgcgtactccacgactttactgtcgtagaaataaagcccggtcaccgcccagtttgacttcggatgtattggcttttcttccagctagata

SEQ ID NO: 12869 - DNA, 135 bp, Emericella nidulans
agaacgacttagccgtatccaggcgaactatgtagcgagattacagcagatctgaaatactcccttgtgctggaaaagcctggattaccgagctggacagtcccgcaacaccgggctgcgcaatgccgtacagca

SEQ ID NO: 12870 - DNA, 187 bp, Emericella nidulans
  unsure (1)..(187): unsure at all n locations
nnnnnnnnnnnnnnnnnnnnnnnnnnnnnnnnnnnnnnnnnnnnnnnnnnntttttgacttggttgctttttttttgtattttgaattgcctgtattcagcatttcgcctggagtcctgaacgaaaaacattagaccgtctattcctcgcccaactatcctaagcgccaacactgctgacttggctt

SEQ ID NO: 12871 - DNA, 571 bp, Emericella nidulans
cggcacgttatggaaaggcctgaccgcacatgccctggtcgaaccattacttaatgcgctggtatggtacctcaggaagcttgctagactctgggcaccatttacatttgattgcggagcaaccattctacgtccctccccatctataatacctaccacaggacaagcgaccgtctgctagactccgactgactagctatatctcttgactacaaccataacgaactgccatcaccgtaccagactttacaacagaataaatcatacacagcttaacattgaaaacatacatatcgacctgtaccatgctgatttaggctaggctctcaaggacctgtagcacgctatccttccatactataccactcttgcccgaatctcgaaagcatggaccgattatctctgtgcacatgaccactttagctgagacttacatgtgatacgctagacgctctgatagctggccggctgtctgtgctatacctacagatgtcctgccggaactaacacagggacttgagagacgttgatgatactaattgaccttacaacctgataaaaacccgccatt

SEQ ID NO: 12872 - DNA, 157 bp, Emericella nidulans
acgagaggaagtacactacgactctaagagtcggccatattatccaggataccaccaggtataatacaagctgtccatgcacgagggtacaagaccgggtaaggccatagcatctacacacacgagcacaatatattgacactcggatatagacagt

SEQ ID NO: 12873 - DNA, 438 bp, Emericella nidulans
gcggcacgggctctaggttcggccatcttcttctttgtttcaaaagctgcttcgtcctcgcggatattgcacgcagaactgggtttgaatgccggttgatttccggcgcaaattaagttgctgatttgtcgattcaacgaccaagaggaagcgagcactgtaagcacatcaccgggatcgaattggggaaaggcctacagaagccctaaggtgcgatgaagcagttcccgattgtggtgagaacggctaggatatatggcggaattaagggtcgggtctatagaggcagcggcgaaccctgcccgccggcggtgagagccgtcgttgcatgcatcacggcagaacgctgaacacttaagatgtactgcgggatatgttcttaaagacgcctaaagtgagctaccagctgactctgcgccttgcgagataactttttac

SEQ ID NO: 12874 - DNA, 344 bp, Emericella nidulans
agaggtcatagtagtgttgacgaatatgattgttaacggacgtcctgcagaaagtctgcactagacttacatgaggctgagtgtttacagtgaagtccagtttggtacaaatgcaattggatgtctagcactggcatgtggcatccatgtgggaggcgtaaaagtaaagcacctcgtagtcgtagaaatcgatcagttcgaaagcgtctgtcgcggttgttctgcttgagcagatatgggttaacagatgtcctgttaatactcccaatagactcgactttcgagtcttcgttgaagaactatacggtcagatcgatgtagtggctcgaccacttcataaaaat

SEQ ID NO: 12875 - DNA, 1393 bp, Emericella nidulans
  unsure (1)..(1393): unsure at all n locations
tttcatcgaatctttaacacaaagggagtctgctgtgctgcaagaggtcccgcgaaacgtcaccttagacgatgttgagaagcgcttcgaagctcagctgctgacacgccaaaccttggatgaaaacagagctggatttgcggacatcataagccgccttcaggcacggctaaattccctaattacaaacgggaaccgaagcagcgaggagcgattggcactgcaggaagatatccagatctcaagacaatgcctagaagtgtgcaatatggccaatgaagtttctcgacagaaaatctaccggattggagaggtggttgcagatggtgacagtgaccaggtcgtggtgaatacgctagctgacctatttgatattaagaaagccctgtccaaagatacttcggcgcaattagtcggctcaatgactgacgcgtctcttcaaaacctgaccgacaaacgttacagcagccgcttcggcgcagttgactcgaaatccactgaggttgtcactcgaaactctccttccacacttgcgacgcagaatgacaaccctccggttggtattatcgacgggggtctctctcaacgaattggagcaaggcggagtaaaccatctcccaatgaaatgagaaaacgcggtgcccctggtacggcgaagagcgatgatgagtaattcgagaccccccagcgtgttactcgaagccaatccactcctctgtcaacttaactctggttctgaagggggaagggacattcggtcgctaaagcgacgatggccagtggatagaatattatatcgcaagatggagggatattccaaagcaggtgtttgaagtatgtcgaaaagggagaatccggaaatctgtatttactgtttcgtatgcaatgtcttctgcataagttcgtacaaatggtgagtaaaaatttattggataataccactctggatatgggcaaagaatttcaggctacggcatgatgatagcttgtggaagatctcacacaactgatttttcaggtcttttttatgtgttgtgctccatctataagccaatgcgtcttgtttaggcgccaatgtaaggacagaaagaatgactgtgacttttatcccacaaccatacaatctctacgggactattaccagtgcatacgtaggaaaaaggggaaggtggctccttaaaacggtgctcatatatccatttggcctagaagtgcttatgacaaagaacctaacatttaggcaaactgtcttagttctgaccctcgagagactgtaagatactgttcctttctgcagcgagggatatttttggatacgaagctagnggcatctacctncgcttactctatattggctctatattggcgccttgcttggacccaactcttaaag

SEQ ID NO: 12876 - DNA, 118 bp, Emericella nidulans
gtgagatctggatggcgaaagagagtagagctggaggagtaagcgtgctggtatactggtctggtagtcggcgactagacactgcgcggaaaagttggacagcataagttggagaatg

SEQ ID NO: 12877 - DNA, 162 bp, Emericella nidulans
  unsure (1)..(162): unsure at all n locations
tgaacagtagtcataattttatgggtcctagaacttcgccacagctgcgactcttctaggcaagtctgatcaggctagtactgatatatacacgcgacagtgagactcaacgtatgcgggatgnatggcagatagtctagagtgactcaattgggactggtg

SEQ ID NO: 12878 - DNA, 1569 bp, Emericella nidulans
tgcgcgggaaaaagctccaatggtatcaccaatggcagaagctgacagctgccgggcccaaagctatggagaagaaggaacagcccatcgatatccaccagcgacaatagcgttgtctgactccacagcggccgggaacgcgagtgggaagcgtcattgaggagccggcagaccacgccggctacttacgctcctgtgaagcctggtttcatcagaagccagcactcatagatgggcacgctcgcacgggcctgaccaggggcctggacccgtgggcatgggcccattgcggcagagtgcatgaaagccggtaaagccatccgactctgcggccactcctggccgtccaggacagccatcatgcaggctgctttgaaatatactccgttgaccatatgatcgcctggatacattctccatcaagctgaagattggctgtcaaaccggcgcaatgactttcgagtcagcatagccgagtctgccataattctgtcctacctgagcacctgttataccgatctcgttatctagaacaagccccatgaatccatcccattcctctgggaaaattttttctttttttttctctttttttttcttttttgaaggttctgaggtggcgggtatttgccattgaaacattggtctctgcatcactgcatccgagcgcagaagtgcctatactcaaccgctctactccgggccagtacccccttgctgaaagttaacgggagctgacgcgctgacaagtttgacaccatgataaggttccgctaggaaggtccgccagagcgtcctcaagttgatttgtagagactcgtatccccggtcccacctactagttctctgtgcgctgaaggatctccccgttgatcaccagaaattctccaataccgtctaagcaccaataccttccgaggcccgctgccaagtgctttggattcattcgtgacgaaaaggttgtctgcaagttgacaaatctttggtccatacgatcaagaaacgctaagcgccatatgcaaggatttcatttgcaatattcccggctcatttctaggcttttcgggcttttcgaatagctgccaagatccagctttcactcctgaagccccaaggcagcttcgtgatcggtgaaagatgaacacccctgttccctggaattgcgtcctcggcggtaaccaccagggttcggatacaagcccgaaccctattcaagcgctggccaaacagctttgcgcgacaaaagtacacatcaagcggcgcacggttgatagacccatgctctctctgcgcggacgccctggatgaggcgtagcaacggggaagttttaactagttctcctggttagccccatttttcatgccgccatctactttcaacgcgggcaatctctattattattacttattgcttttatatgccacgacgctctgctacgcccctgttccactcttatatcattttttctgttcaaccatttctaacctgtaagtccttacgtctcatccttgagtctctatcttttctctcctacctatgactcgtatacatattcttattgatcatga

SEQ ID NO: 12879 - DNA, 193 bp, Emericella nidulans
  unsure (1)..(193): unsure at all n locations
gctgttcgcagacggttctcgctgtctcacgtcgctgaacctcgctagcctcattacgggtgacattgacctggtctagaactcgctaccggttgatataaacagagattctttatggacgatcgggatgacatgtcggaggnattcatacaggaataattccagtgacgatcctctgagcacaatatgtcgc

SEQ ID NO: 12880 - DNA, 167 bp, Emericella nidulans
ccttcttcctgtcttgcaggttcggttgtctgaccccctctcgattcgtcacggtctactgctacctgttactttactacgatcgggcctcgtcatttccgagctggaccgctgactagcgagcgatacttccctcgattcagtgtctgaggctctgtctgagtccg

SEQ ID NO: 12881 - DNA, 565 bp, Emericella nidulans
cgccccgttgttgttggccttgtccatacagtactgctctgggatcgtgggctggatgggagatagtgttcttgatagacggtagacacgctggagtttacattgcttttgtctataccatgttggtcacagaagaccttggcccaccgggagacggattatcctacctggcacgccattctattcacgcgatgctcgatttgtatagtcctcgcacgattacacgtcagctctcgtcttcacatgaacctcaagaccctgctgcggagcactcttaacaggcgtgcgactgctagagctagggcttgacacaatcgtgtggaggtgggactggttcgtcatcagatggtccggagtcctgacgagaataccaagaccctggtgatgatgttgacctaaccgttgcgactacgcatcgggtactactcctctggcgctcacgggggtctgagatcagctatgaagtctgattggcaacctgataggagttccctagaagatggcggaatgaggacacgctcatgcgttccttgcacttgcttgcggactcctcgttcattttctt

SEQ ID NO: 12882 - DNA, 892 bp, Emericella nidulans
cagcttgattctcagaccgaattccggttatatagaacgcttttcttcgttgctgagttcctaacacatgaagctgatatcaagagttgatcaggtatataagcacattttcactcaatcttatccgtgacgcgctaagaacctggcgtttattgaagagcaagcaaaatcttgaagacgattgtttaagaacgagatcaagtgcccgatatagctcatggccccgcccacttcgccacccttccacccaacgtcagcaacctttaagttttatgatgcggagggttcggatttgttgtccgtattgggcgtctcgtttgcaatcacacctttctctattgtcgatagctcaatctcgctccaaacgaaatgacggaaacaagtgttcgaaagcatgttttagctcaataggccgattcgccctggtctttgagtcaataatcacgtagtcgctcacccttacacgaacttcgaagtattccagcgggatgctatggcgtcctgatcaagaccacattcagccgtacataggcgagagtatcattgagaagctagtatacacggaaattgccgataaagccaacaagaaaaccgaaagacgaagtcgtttaccgtccgggcaactgtccgctctgcatcatggcggcattctgttcctggaatcgctcgttgaggcgctgagatcccttcataaacttgtccacacagcgcataacacaaccctcctcacgcgagatgagcgacttggtggtgaagtcgttgacgcagtcgtcgaaacagcgttggacaagtttggagtacatctggagaggatatgcgtcagaaataaatggcagaaggtcatgacctcgaccagaactgttgattcccgccgagaactgtaaaatcgaag

SEQ ID NO: 12883 - DNA, 196 bp, Emericella nidulans
  unsure (1)..(196): unsure at all n locations
ctggtgacacatctaacgtgctccccacacggtgactgtntgtagtcgctgttcggctgcttatacgtcacgtatcctgacttcgntcccttagcagtggagacatggagccttgaatgcgagttcttggtagaccatgccttgacgggattcaacaacttccatgtaatcggtatgagccagtcgccactatttt

SEQ ID NO: 12884 - DNA, 243 bp, Emericella nidulans
atggcttgattccgcatgcactgacctgtcccggggtaacagagagattttggaattagagtcggtcctttggataagaattatatccacttatagggctcaacttctgagttgcttcgtcctatactggacctgactttggccgatcagccatcggtggacgtgagttggatctgggagctcattcatgacggttatcgcgtttacttagcgaactgctttgacgcttttgatttcgctgaa

SEQ ID NO: 12885 - DNA, 293 bp, Emericella nidulans
  unsure (1)..(293): unsure at all n locations
gaccttaatgttcaacctttggtattggcgagccggatggtctctgactactttctcagtngaaggtaggcacactatacaagatcagatactcatccttattgcggacgatgtggcagattgagatgtccacatgngtctttcgagtcacgcacattaggcgggtgatactcaaagcatctgcgtgntcaaattcacctacactactaccgaagtnattacgtctgactagaggatgattgatactatgcattctgataatcctcgacaaggcctaatggactatcttggtt

SEQ ID NO: 12886 - DNA, 3711 bp, Emericella nidulans
tcaaccctccgctggttgggtttaagcagcacgtcaagcaactgctgatatgccattctagattatagcgacgctgcgacttacagtcgtctagtccctctagagcaaacagacgtctccgcgagtccagggccgtgtacggccaagatgtccgactctcgatcggatacgcccgttgcgaagcgtgtcagtagatgacggccacgcataccacctctcactaataagggtgaatcgtgactcttgactcgcgagatctccagtaatcatcagtaccctcacatgtcttccggcttgtaaccatgtcaccttgcagggatccggttgttcctagctttgtatcatctagacgatgcgtctgggcctctaaggttctgcgttgggcagttcgtccatgatccgtagagccagggaattccttttctctgggctcccctgggcagctgttcagacatgattccttttccttcgtgaatcgtgatctggctcgcgattatcatcggctagtggacattgggcggcccttgcacgctaacgttcgtactctgcacgaattcgatgcgatgttcgctacggaaaattcaaccgggcgaattgcagattgtgactcgttcgcactgtggcggggatggaacgcaatgccgcctggtcatggccgagggccatcccctagtcatctattcctcagaaaacataataagatcgaaaaggtgaaagtagcatgtatgtgcaagcagcgctgctcgagtctgacaacagtttggcatcgaaggatgttgcccgaggatgcactgcattcttcactcgttatacctgaaagtggaacgcgacgctgccggactccccaaaacagggccgcctctgacggtctcactcgaccttggagctttggctcagtggctcccactgcctcccagcatctcgtggttctgaggggctgtagtggagttagaaacaggcactcgatttcttagtgtctctctccctgctcgccaagaccagatcacgtgaagatcttcttcatacgagactgggatggcttcaggcgagacacaaagtaccaagcttattgaatcatgcggtatggagatttaatgatatacagactattaactctatagttgcaacgcaacagactaaactcaactaaaagtacgactgcttctgaccgggctcccttcaagctatcaggtcaaagtccctaagcagatcgacataacctgtcaaagctctagtggatttccaaagacaggttaaataggggaactccgaatcgaataattaggatcttgatcgagcaagtctgagcactgattcgagtgggttcttgtatcatgtaatcactgacaaacccagaaagcgtgcaggcccatgctagttaaactttgcctattgagaccatcgaaccaagatttagcgtaaatcccaatacaacctgtctaatatcgtccaatacgattcagccagcggcagccagtccgccaatgacgactctcgatctccggtcatcgcttacttcagaaccttcaatgcgtcgagtctgtttggacagccatgcctatgtaactgtgtaacatgctcgtgtcttaaggtattccagggcctgcaggccccgttacacagtaacacccgacctccgcttggtatctgtaatcgtccttcaaggtgatctccgctggctcgcgcctgtattgtagaggtagtcaaacttgaaaaacaggtttacagactccactggctcagggcttcccgtcgtgtcaccgcccggacaaatgatccaccaatcaattccttcaaggtgatctccgctggctcgcgcctgtattgtagaggtagtcaaacttgaaaaacaggtttacagactccactggctcagggcttcccgtcgtgtcaccgcccggacaaatgatccagcaatattgattggtggagagctgctacgctcgctgaaaaactcggaattgccaagggcggttacataaaccagtcgacgttagaaaaaaagctgtactgcgtttcctaccaataaacctgatgaacagtgtccgggctactttaaatgggcagtgagacctgaatatacaaagcactactccgtaaggcagcactggcactgaggttaggcgattcgatgaacatggcaatagagaagcgggacggatgcaactgctcgatgcacgcacgactcgagctgcaggagctgagcacttggggggaattagtagtgaaactaatgcggatggaggtcaccaatgactgtagcggctgacagcttctcatattcctgaaaaggaggaatgcggttggtgtcaatagtggactactacagagtattatgcacggagacatgcaactgtccattgggggattctagacttcaatatacggatttatttcctttcaatggtatggggatattggataacactatgcggtgcgacaagagacggccgcaaaatccaatgtagatagccattgagtaaataaacatggaagagaataatagatacagtctgaattccaagcctaccaattcagtccacgaaaccaaaagatattgacgagggatcaaccaaagcgagaccgtcatgaaaacatcagccgtaagagtgccaacagtaaatgatcagtatatcggcctcccctcatcccatttgcgcacagcttgttgctggctgtcacagggtatcgcatccagagcaccaggggaacgggtttctggagttgccaagggggagaactgcgccttatccgtgcttccctcaatttgtcttccgacactgccaatgcctccaacccattcccaaacgcgggcaacgtctccaccacggccttcgcggaccgctgcccggatgttagcgttcccctcaacgacattacgaacacgcttccagatctcctcgcgccggttgcctcgcaattccgatcggagcacatcatcgcggagttgtccaattgagatgtagggttcatgggcatgacctcgtgcatgcaaagccgcctgcgccgctaggcggtctagagtcgttgcaaccaactcagggacgcgagcgaggtcggagcggcgtgcacgcacccgagcgcgcgcatatgtcgcggcagcgatgcatattattaaaagtgaaagaggtagtcgatacgcgaggagagagagcctgacgtagcggcggatggcgcaggagagggggaggcgggcgacggatgtagatgtgagggtaaggacagacgatgatctgtgatggtgttgtcgagtctgttagttccagtatatacgtcagaaatctgatccatcggatgctgccatctacctagacagtaggagcgcaaggattccatcaatacatgagtcatggacaacttactggtctgttttggccacaacttcctctttcgcaataatatcgcccagcgcccctttccacaaatcatcgaattccgcatccgtcattccttttctgcgtttctttgcaacttccttcttaagatccccctcggttatatccggccccgcggtctccttgctgctttcagaaagctgtccacactcccattttgccctccgatcgcgaagttcctctacagccttgtcggcaacagccttcacacggcgtgccttctcgctgtcgggttcgcatgtgggtgcaagaggaacaagacccccaagcgacagcgggtgaggagtgagaataaagtcatgctcgcatcgagcct

SEQ ID NO: 12887 - DNA, 660 bp, Emericella nidulans
cagtgctgcctccggtagcctgagacgcttcactatgtatgtggctcggcctgtttttgccagggtatacccaaacagagacagcagtgacaatacagtttgcctgggaggaacaactgagcaggcgatacaagctcgcttattcactgttgggttggctaaaagatcatatactgcggcctggagccagggcgattgtcccttacacatctgggcttgccaattcatgcgctatggacacagagacagacgttgccgatgcaataacatgcttacagcatactattggactgcctcccaaggggatctgaactggatactggagcacgtcatctccagcgccttcggatgggcctgcgtcaagcatgtcagttacatccaaggcctgcgcaactgtacagtgcgggctatctgcctgtcgcactgatactgatttttcgagagccaccccacgggctggtgaccatagacggattcgccaccccagaagcggccttggcagccacatgcccagatctagtgttcactccaaatcgcaggtagtgggtacatccctccatgagctatggcaggcgcccgtttggcgatttacgcaaacgggtccgcggcctgacaacacctcgattcccacgggggacgcaatgtgccaaaacatctgga

SEQ ID NO: 12888 - DNA, 112 bp, Emericella nidulans
  unsure (1)..(112): unsure at all n locations
ctcgcgcaataccagacggcganctcgcacantancgagaccgcgcctnctttgacntcagcgtagggactgatcctcgtactcggaatgatccctcgnggctaangcggcc

SEQ ID NO: 12889 - DNA, 455 bp, Emericella nidulans
aagggtcttagcacgtatcggcgtgagttccctccctcacagccaaccttttcgcaacctcgctttgtttaaacagactaacaagctgccgattggaacctctctggtgctgccagaggtgcgagcacacgccatgcgcgctgcgcatctggccaagtgttaaagtacccggcaggctagcgcttcatggcaacactctgtcggccacttgtgcataatactgcgattgctgaggtcaatattctggaacgagcagcatcggatcgaatgcgggacgatcaggggctcggacgtcattttcgagacccatctgttctccgccaactgagcgggtgttgcaccgaccgcgttctcgcgatggaaaaagatcaagccgccgtgagagaaactccttgagtgcaccgcactacagcttattgacggccctgtggatcacagtgcagtccgagccataa

SEQ ID NO: 12890 - DNA, 151 bp, Emericella nidulans
  unsure (1)..(151): unsure at all n locations
gctatcggganttccngacgttgcaaattgattcgctgagcggtgtgatcttgtnacctcatcggccgtatagtcatatcagatgtattagcctcgaagcagactagctgagnggatctaccgncaccgtcttagnaagtcggcactgagt

SEQ ID NO: 12891 - DNA, 543 bp, Emericella nidulans
ccggtctatcaaactagtttcatttttcaacctcttaatatccgataatccagctaaacgaattaagagtgtgaaatgtactctatatggtagttgtagcttccgtaaaaatgatgaatacgagataaggaattccgaaatcatcagctttaccgcacgatatacttcttcagcccacgaagtctttccttcgccgtctcgaggacgtcatcctccttgcaaactgcaaagcggaggtagtcctcagcgatatgtgcgttggcatcggtataaaattccgtcggaggaatggcagccacaccgacttcgtggataaggaaccagcagagcttaaagtcacgcggccggctagcaacgtgaggagggaaagggtagccctctgggagtttgacggaggccatgttagccagcacgaagtagccaccttcagggtcagaatactaatagaagtcagcaattaaacacgccccaaaaggataggaatggggacgtacaggaatgttaagctcatcgaagacctcgcagaaccgctccatcttcctc

SEQ ID NO: 12892 - DNA, 315 bp, Emericella nidulans
gggagattcttgccggtagctgaggttccaattccgacggatccaaagcctgctgcatcgatgccgttcttcgtcctcgggccgttcatgcgcacttcggtggaaagtacatggtgcccgccaacgtggctattggatccgaagactcatgttgctgggaacgctccttactttctgggaaaccgctgaatcaaccggtacatctacaatattccttgcttacgaacaggagttgcattgctatgtcctacactatgtgatatgcgaactaccgctgtacacatctactttcttggcggcttatgaacaggactc

SEQ ID NO: 12893 - DNA, 3259 bp, Emericella nidulans
  unsure (1)..(3259): unsure at all n locations
aacccttatatgaacgatatgccttaattattttctatgcctctaacattcaggttagtatgctttaggctctgaggtagagaccgcaagtctgatcagtaaatattaatatttgtaggcaaacgcttgcgatgcaagtaagtacttggagattgttatttatgcttcgaccgataattcataacacattgatcaatgcctctacaacttggaaagtcgcccatctggctgcaaaaccgacagatggctttcccggatttcagatatggtctggcacctgcaagatatcattattttcgtgctgtctagagcgaatcagctcatgtactcacccagccagtgccatcgtcaccctcaactcctgcctcagaatctttatagcaagttcgactccttcctgcccgttgtactgcgactgtcagcatataacgccacatattttaaagagaataaatcataaaaaacgttaaacgtacagcaagtccccagatgggaatcctccccatgaagcagtatctcgcacccagcgccagggccttgaagatatcggaaccccgccggatgcctccatcgatagccagcggtatacgccccttggcgacttcggcgcacagccgcagcgagtcgagtgttgcagggacgccatcgagctggcgcccgccgtggttggagatgacgatgccgtcaacgccgtagtgaatggcgagttcgacatctgcgggagagcacacccccttgagccatatctgcattgatgtgtgttcgcggagccacgggattgtactggcccagtcaagacttggatctggcaaggacggtcggttaggggcgtctatagttctagagatagagagcctcaccataatctgtcttatttgacaggtcactgccgttgctcaagatattcggccactccatgtcttctgggagaacaaagctgttccggaactcgtttaatcgcattcccaaaaccgggacgtcaacagatagaaacagcgccttgtacccagattctggcatcgttagcaaaggattcttcagacacgaaccgatacgcactttccgcccgctgcaacaactgcagcgttatagatcgatcacgcagcacgcacatctgcatgacatacgggttacccatcccctgggccgctacatcctcgagggaatagttcgagtatgaggacagccccatgcagatgccaaagttggctgcggcgcgtgatgtggcgagttcgccgtctggatgcgcgagtttttgcgaggccgctgggctgaatccgaaggggagagacacctgtgctcataccgtcagccatgttttcactggatctggtgtccggtcaggaccttcgtccccagtatctcggtgctcgtgtccactttggcgacgttgatcaggacccggggaaggatcttataccggtcaaatgccgcctcgttgtcgcgtaatgtgatcaggtccatagcgccttcgttgtagtagtctgactagtcagtgaataaatgcacagtccttatttctgtggctcaatcacctcgaaccgtggcaggaagcctactgcttcccaaggccttcaaatcggcaatgcaggatacatccttgtggaagctctctcctcggtgcgccattgtgaagtagaacaatgtgagatcaatagaagatgatcgatatcatagaagtcactgttcactcaatacagagctgatagacggtcttgtgcggaattatactgcttgttagagcacgaccaagcctagcccaacgatatggccacggcgtcagcttcctatcgcagaattgctggccagatcgttcggggtcgcctgccctctgtggtatatgtaactaccaggctctatccatagccgtttttgatctcggcatatagtatggccttaatgagcaggttgtctactccacatacagagcttcctaccggccttgaatttctgcctgcccgcgataggcgagacactttcaatgacgtattctctctgaaagcaattaaataatgctacgcatgattcagaggggcttcaacctgctgtcctcaattatggccctcaatttggagacgataagaggagcatcgtaacgggaaagtggttccgatgtcggccccgctgtgatcgcttccagtctcgcttcgactgtctctctcctctcctctcagcaagcctctgtccaccctcccggactgtcctgcttttctgatccagttctgtcagaatgccccgcccccgcagatcccacaccctgggcgcctgtcggacctgccgtcgccgtcatgtcaagtgcgaccagaaacgcccggcctgcggcacctgtcgaaccctcggggtgccctgtgaaggcttcgctaacgaggtccggtggatgcgcgacggtagtgacgacggcgatgacggcagcaaggccgaggagcagcagggagctcgccgtcatctctatacaggtcagttcctctctgcgatctatgcccccagatagtctattccccactgacatgcccatctaagaacaattacggcagtcgatgagcacgtcgctcggatcaaacctcgtctccggctctattagcgcctccctggccgagatagatctcaaaacacgcgatgctgaacatcccggcggcgatatcgtcatcggcccgttcggcgtgcttgatttcggctcgacccagccgcaggaaaaaaagcaggacagccagaaaatgacgccaaagcagctagagccaagcagggaagctcctcacagcccgccgcagacggcctctaccgcagggcaagagatacaggaattgccgactcttgtcaacgactccccctcgtacatcgatgactttttgcattggtccgatattctcggcctgagccctgagcagccaggcttcttccagccatccatgcttgacttggatacgtatctggccgatcccatcccagaatcctttgatgtagacatgaacgtggagacgcgcgcgggacccaggagtatggccaccccgacacctccaagtagcgctatggagatggcctctacctttctcgacgcggccgccctggcagatgccccatatctgttcaagcactntaatgagaatgtagtaccgcaaatgatgatcatgccccttggtgaccagtcgccgtggcggatacttatctctcttgcgcaatgcgacatacacgaactcaccattttggttccagagattaccatgcacggtagcgaactttatgccctctcgcaggttggcgg

SEQ ID NO: 12894 - DNA, 406 bp, Emericella nidulans
gtgcaggtagttatacacatacctagtcgggcttgagtcgcagttctatgcgcagatgatcggtggttttttgcggtgtctcaactcgcggacaggtgtatgctctgtctattatggacagcattgaatcgtcaccactgtgctatccagactcttcccaaggcaagccaccatcttgtacctaaacacttactctcaccacatgggtgcgcaatctacgctacctgctcacacgactgcagcgctttgctgtagcgctctcagggacagcagacccagatgccgagacgatcagccggcgagccccctagctcagactgacggctcagatggagctggcagacacgtgcgtcctggacgacggatcggtactcaatggacacctccagtgccaagaataagtgcc

SEQ ID NO: 12895 - DNA, 539 bp, Emericella nidulans
cggaaactgcttttctgctgcacagcgacgacagcgatgtcgcatccgctactttacgccaacggttgaagtgccgatttgcggtcagcacagtagctgcgcactatgtacgtgcgaaggtgttaggtttaggaaattgcacgatctggcaaacatcgctggcaggaaaacatcgcgtgactatcgaaaagcacaacgatgattatcgtatttcgctggaacaaggtacgccgggctttgagccaccgctggaaggtgaaacacgtgcggcgattatcaacgcgcttcatctcactgaggacgatattctgccaggcttgccaattcaggtggcaacaacaggacactcaaaagtgatgatcccactgaaaccggaagtggatatcgacgccctttcgcctgaccttaatgcgctgaccgctatcagcaaaaagattggctgcaatggtttcttcccgttccagatccgcccaggcaaaaacgaaaccgatggtcgcatgttctcgccctgcattggtattgtggaagatccggtgact

SEQ ID NO: 12896 - DNA, 1679 bp, Emericella nidulans
gacttacatcccccattaacgaacagcgccttctcccccgttactgggtgcgtccgcacgatcggatgctcattcttcacagggtcccgtctaacaacaccgccacgctgtctgctgaactccgcctgctcgaacccgctgtgcacggccttgagcccatgcagtctctctttgatggctggggagagccgccgatacgcctcgacttggtcgacgaacgctgtgtccccgcctacctcgggggtatcgaggatatagaggaaggttgtgccgggcggctgcgcttcgtacgtgacatccgagtgccatgcaaccgtactgttcctgtccgcgaagaacgcgtccagctcgcccttgctgctgtgtcggtgcaccagatggatctcggggtacccctcaggctgaccggaagtcgggtggatatgatggcggccaaagtatgagccgaacttgagagcatccgcgataggcaggtcggcgaaatcctggtctcgaaaggccacgactttgcgttgcgccacaagcagcgcaagctggtcctttccggcagccgaaagggacgacagttgcacgcctgtgacttcagagccaattgtaggagtcagtttttggatcctcgtgcccgatttcagcaggtcagggagggacgggtctgcgcgcaggccggggtcgctgtgtgtgaagggctccaagggtgggtatttctcgctgtgatcccagaccgggaggtagtggggatactggaaaagttagagttattctagagaaagaagagaatgatagaacgtacgctggccgtggtagttccgccttcttcatcgatgatacggcgaatcttgggcttctcggtggtggcaggaggagtcttgacaggcacgacgacgtcggccttatgtggttgctcttcagcaatggagggtgccattttctctcttgatcagtctctatgtggtgaaagaccggctggtctcaccagagagggagagtttacagcatatatatgtacgtctctccgcatcccttcttgcaccatctgtactctcaatcgcgtatgtatggaggtagtgatactttcggcgataaaagaagtatacaacgatgcgatcgggcttcggcgattgcgtgcttgcttgctcgcttgtctgcttgcttcagtggtagtttgaccaggcgaggtctgacaccatttaccccatggatgcggtaatggtttccttgagaaggtgattggtattgcgtgctatccgtggctgtagcatcatttttgaacgctgcgatcatacggccatttcatatcatattttgactgcaccttcacctagccctaggtaactatcacagtcggcgatagggcacagatcgagtgccgatatattgggcatttgcttgccgtaaagctggtcaaggagacttgacaaaaaataaaaaataaagataaaagtaaatcaatgaaattgaatttttaaggagacaaataaatacctacgatggcctgaatcaggatataagcaaacaaagcactacctaaatgtgtcaaccttctgcacttagccaattccctagaatcttagaaagcatccacagatcagtccatagacggcttgggatagctctggtagggttaactttgatgcctatattccccttcgaagagttgcaataccagatatgctctctgg

SEQ ID NO: 12897 - DNA, 277 bp, Emericella nidulans
gggatctttgggcaggataaggttggtgaatgggggtatctgggatgtctgctggcttggagcgtgacggatagtatacggtatgggttctttgttatgcaggttaatggcggggttgagagtgtacctgggtggtggcaatggttgaagtatgcgctagtttttttccgcatccctgtatcgcgccataaactaatgagcatgacaggtagaacacattctacgttctgtatccggtcggtgttagcagcgaatgctcattggcatttaaggcgtt

SEQ ID NO: 12898 - DNA, 333 bp, Emericella nidulans
atgtaacttgtcaagtatagaggtacaagcaatcctcagctgttggagtttttcagcgcaaaagacaaagcattcatccttcaatggtgggggtgctgcaaccggtctgtgagagatattttcagagaattcagatggcgaagcgcatctacacgagcacggttattttttttcagccgcgaactcagagccaacaatgggcttcgcactcgtgcctgcgtggaagggattcccaatctcccgtccattcctattgtgtcctggttgcgacacgattcggccaaaagttttactatcaccgcggctccgagagcatcgaatactgcatgattg

SEQ ID NO: 12899 - DNA, 1970 bp, Emericella nidulans
gaaagggaggagaaagaagtatgtagacgagagaaagggaaggtttacaggagagaagtgggagaaagtatagggatatgatgaaattagtattttacttagagaactgtggagatactggagagtgtagggaggattgaggataataataatgtgaaggtaaggcgcgaagcaaagagagagtaagagactatatgtcggaagagatttaaagcagagcggtgttagttttaaagtaagagaggggggacgtgaaaggttacagaatttggaagaagagggcccaagaccgagcgatagggtggggcatgttttacagaagaatatgagagagaatgatgggagacccccttaagggcgagggaatttcgaaacggtgggataaagaggggtaggaaaattagaaaatggggggcgcaacagatctactagaagaggacatgggctgttctatgttatgatatcaaagagccgccggtgtttggctgagtacatcagtcagcaaagattgagccctcaaggctgcaagtatttgcgtctccctgctcctaaccacggcgaagatcgatgagggacgtccatcctagcctaagtgctaggggaaagggtttggtcaaggtacgagccagacaaaggaagagtttttacagagaggggcaaggcaatggtcctggcctctatttaaaggatcataatgtcaagttatgtaagagcagagtttattaggaaggctttggcattcaggttgctttaccaagtgatcaatgagattaaacaacggtctttcatctatgtctgaagggaaattggtcgtgaactggcgagggcctacagacctgatgagtcagcagccctgcaagtgccgagattcgcgcctgtgacggggaccaccttttcttctccgatttgcggcacctgcaccaagttcctggctgctgcattctccatatcgcatgtgttcatacgcccctcggttcctttccggcgattactgagttctgatttataccgatggacctcgagtaccggggtatactggcacagaatggataccctccgcatgcaagcctgacggcacctcccggctcccctagcgaccttcggaacaaccctagacttccgcgcccactgacgggctttgacttctcagtcaggtcttcggagcccggagacatggagaagaccccgcctgttacggggaagcggcggggcgggtgtcggaaggcgtgtaacgagtgtaaacagcaaaaggtatgtccatcgccaaacccacctcggagtgcttgattgatcgcatgtgcaatgatgggtcgcaagcaacaaactaatagaaccgggaatgcccactaccccgtccctgtccaccggcacagtagacctctggcaaaatgcaccgtgctaaaactgtcatagctgcgatgtgatatcgttcagacacccgcggacgcctgctcgcgttgtcggcgacttaacatagaatgcaaggtcgagccgtccttcaagcgcatctcaaagagaaagtaagaatgcctttgccaaaagcgtagcagcctacactgtcccttactaatgccgccaggcgcaatgctgagatggagcgcgagattgcggctctccgccagcggctttccagcgaaggcagccatgcccatgttcctgagaatagagccagtaccaaggtgtcccagtcccctgagggcatctgctacggccctgatactgcgaatgtaagtcgagggcggactctgtctgctaagctggaaccgcagacattggccacacccttgactatgcacagcgaagggtccatgcttgctcaggacgacggtgtctggagactggaagatgtctccctgtccaggcaaagggtagcttggctgtttgaccagtatgttgtccccccataattttctccattaaaatatactggatgctcaaggagtccagaattttaaatattatacccggtt

SEQ ID NO: 12900 - DNA, 128 bp, Emericella nidulans
ctccagtttagcttctcgaacacccaatcggcgccgaacattggcaatcctgccgcgtttgcgaaccagccccaatcggcgtgaatgtcacgccgcggattaacccgcgtgcgacctcacggcaaact

SEQ ID NO: 12901 - DNA, 214 bp, Emericella nidulans
  unsure (1)..(214): unsure at all n locations
aacggattcgatagattttagcntgaggtaatttctattaccgtactgagcnngttgaagccggggcccggatattaagcnggtntgcggaatgtncatangacttanaagatagggagtgtaatgtgtagcgcgcgtagtgtgcataggacacgtaaagcatgaatatcgatatgaaccggtcttttctcgtttatngtggaccgtggatgta

SEQ ID NO: 12902 - DNA, 263 bp, Emericella nidulans
  unsure (1)..(263): unsure at all n locations
tgcccagcgatactagctctatgcgatgaggataattagaagataagagacctatcgcacaggtacggaacgncgtantttactgcgaattgagcatagtcaacttttatagatattcgcagctatccagncctgnaaaagaccccaaggcgcatgctatcgtactcatgtgggagctcccaatgcgacgacaaccaccccgaatttggaagntctgtggaggtcaaaactctacgtgnttatgagaattattcactgtgctc

SEQ ID NO: 12903 - DNA, 194 bp, Emericella nidulans
  unsure (1)..(194): unsure at all n locations
aggtctggatttttcagctcgcagcgtncgnctagtccgatatcactggactggcaaattgctnaattcaaggcatccantncacactgctttcgctagacctngcggctttgcacgccccatcatcngcctgactggacacgcatcgantcgagtagcgccgagtacctcctttactagtcacgagagcctat

SEQ ID NO: 12904 - DNA, 627 bp, Emericella nidulans
taaggggcctacagacgaacagcgcgggagctaccaaatattgccgtggctctacaatgtgtctattcttcagggcccgacaaacgacccttcggggtgctgtcggaaagaacggttgaacgatcgcgggagaacaccgtatagcgtatgatcaaactttaggcaaagatcacgaaaccgattgacctgatggagaagcatggctgttgacacatccggcaatgcgaccgcatcaatgacctgaggtgaaaaggtacgacaaggagcaatcttagcatacagagcacagatgcagaccgttgatgaatggcataacattggcctgggtggtgtatatgactgacacaaagggtagctttacattaccagactgcatagctcagaactaggggactcttactgccgcgcgtatcatgaagtattttgcagaaaagcatttatctggcatccataacaacgcttaaaatgccaccagcgcaaaatgctcgatcataggcagatgtttttttcttttaaagggcattgaggggtaggatgggctgtacttcaaggtagaatacgacctccttgtggtaacctgaaatttaacccactggcaaccagaaagggtttttaaaacaggacgcc

SEQ ID NO: 12905 - DNA, 341 bp, Emericella nidulans
cgctatttgcagacgttggttgcctgtgctttggccacttctcgtgccccagctgggggctcttttctgttgcacgatccatgaatcgcgccgatgactattacacaactggcaagccgctctcgaaatgaaggaccaggttttgtctcagctgtcagtcaggattctacatctcgacatttacaacaaattgtttttgcacgagatcggcaagccacgaccgaaagactccactgtaggacctatgctagctgcattggaggactcaactactcgctcatactgtgctgctacgctgcggtttagaaaacattcagtcctagttggggatcatctatgga

SEQ ID NO: 12906 - DNA, 588 bp, Emericella nidulans
gatgattgctattggtcgccggcccccctattgtcaacataacacggatcatgagttggcccgttttttttttgtaccagctgacgattacggatgctgagtactaccgttacgatctcatcgaccctgcatcggattctgatgagagctcggagcttattgaacgggctgcgctcgaaaaggagtgatcccggatcttggcccaagggaatggataggtatgtggtggtagctcatttatcagaggtcggattagtcagtgccaacagtgtggttatatcgaacgccgagtcacaattggcgtgaggaggacgctcttatatgccccctattactgggtctccaagtgtccaccctagcgcgcgctgccatttcgatacctgtggacatgtagctgtttactcgaccttgggtggagacgaaatcctggtctggcttttgtgacgtccattttcctgcacttcgagaaagctcttgccctatttgcttcctagaatggcctctggaagaattacgtccgtactcacagattctttataatttatacaacccttagggagcgtatcttttccattcgtattaatgtgt

SEQ ID NO: 12907 - DNA, 2321 bp, Emericella nidulans
ggtgggcgatcggcggatcgacatggtccaatcgaggcatccagcgaagtgagacacgctccagagccctcgaggggcagatgtttcatctttctgagatggatgacgaagacgaagagatggaagtgactgaagtctcacaccctctgtagtagagagctcccgatcaggcaattagtgggcctctagccccccgctgttaagccgagccaatcacgggcatcgtctacgacggtcgggcgtcttccacagacttcgacatttatggctgtagtcccagaggatgggcatgatggacataaacggatttcgatgggagagtcaaggctgctacgccgaacaattttcggcccaaaaagtggtggaagctgaacagtgtgaaaaggcgtatggaaatgatcttggaaaccctacaaatgccacccgcgcatccatactactcctgcctgcgccaggatcagggtagaacgagcgagaaagagataaggaaggggaaaaacagaagacctatcaatgctctgtcaagtgggccgctttattggatcgtcttcatcccgcatggacgtcaaaatccgcctctttagagagccgccgatctacacagctgcaaatgaggtttctggtcatgtcattctcacgacggcgacgcaagtagtcatctctgctgtgtcaatctggctatcgagggtgtcaacgtctcggctacattctctgcgggtcgtcgagacccatcaggtacgtctctccacggataccctcaagacttgccattctgatgctaggcagattgccgacataagagaacagctcttccctcccacagcatgtgccaattcgcttacatctcgatctgcaactgtatcggcaggaacacatgtatttgctttctcgctaagggtgactttcagtcttagatggctgattgtttgctaaacagagacagctgccccaagccacgcagtgctcaatgagcgcgggtacatcaccagccagtcagcagcgagatagcacgagcactggagggaagacgcaccttttacgcaagttacccccttcgacaggggccagctcgtcaccggaggagatcaagtatatcctcgaagcatcaatccggcggaacggtatcattcgagggtgcaagaaaaccgtatgtaaccatactcctcccctttcgcgaatcttacttggaattccgtataaatttaataggctcgagacatatgcatctaccctgtgccaacactagcttcttcgctcaataatagtcaagccatccagacagagacgcagagaatcgcatgccgctccagtgctggcccgaagcgtgtctgggctcctacagcctatgaagtcactgcaaagctgctcaacggtccttttctggtcctgggacggccggtcccccttgcagtagagcttaccggtcttgatagcagcacagatacagcccctcgcagtcgaggctcagtatcgatacctgtatcactgcatgagtttcagaccatgctcatcgaaacaaccgaggttcaagctcgaggcatagaagagacccaaacacagttccgtatcgtgcagacaatggcaaacctgcggcatcctctaagctctaggagtgatgttgcgagcaacaatgtgaatggggatactgctcctgtttttcgatcagaattgccggcaccctctggtctatcctatcccattgtcgctaaccccgtcctttgagacgcaatatcagccgcagctataaactagaggtacggctgggcattgggtctgacggaaataatgttagtcgcttctttcccttagatagttcctggattaggctaactcttgcccaaggtgagaatcatcgagttccaattccctgtttatcttattccggccgccagcatgaggttaaggttggagcctgggttagaggctcctgctggtatcgaggtgccggcaccggactactacgagaaacacgcagctgcagaggagttggaattggggctgtagttagagcataaaacagatttacttgacttggattgtacgttctttaacttggagtcctaactcggcgacggcagcgcgttcaagtcgtatcttttttttttactgcattaatctggttggttcaatggatactaacaggactcaccactccgagtgcgccctctatgcgccggccctcgaccagaccgtccaagatattatcaattgcctttatgacgcgcatgtggataggggtgatgtctggtgcacgggaggcacgaattcaacagcacaggaaagtatgaggactgctacagccacccctacaaccaagtcga

SEQ ID NO: 12908 - DNA, 4432 bp, Emericella nidulans
  unsure (1)..(4432): unsure at all n locations
aaaaaaaaaaaaaaatattataaaagaatctgattgggaatgacacgctgaaacgaatataaagatatcttttgcaagccggcaaaaaacggaaagaaggccagtcttattattgttcagcgggtggtcccccaaaaaataagtcacaacaataagtgggtcccccttttttctaaaaccactccccccacaataaaacacacggggcataatatagaatccacactcttttccgggagtttggtatcctggagaatcaccgtgcattcaacggtgataaccctttgcggcctgttcaactgaggctttacaataaaatctttatataccagctgtcccatataatagtgtacccttttggttcccctggcgggtttctgtatatgatctgggaatcgatcgacttcctccaatccgggccttccttattttgaaactcgcgcaccaatttccaaagcctttcgcccattcacatctcagagtcagtcttgtcctccatctttccacccgttctcgggaatatttctattcgcttccttgtgcccgattgcgatacccaagtcctttaacctccgtcattctctgcctgacttttcttattcttcgttcagcaaattgacttgccatgactcgcagtctacgcccatcgacctaacagttcatcatttggccctcagttcaggcgctgcttcgttttcggacggtcttcaacgcgtttaataagggatatatctgtttaccaatcgcctctaggccccggcccatattgtgcacctgtcaatgaccggcggttgatcctcaacaattgcacctgagctctactggcgactttggatatttattgtgtgatctcggtggctcatcgcctagcgagatacaccaggaactgagtatccctccgcgtgccgttccacgcttcttgaacgcccgaacccgatctttcacaaaatgtcggttgcgacaatgttacaaccagcatctagagcgtctacttcctcttcctcgtcatttcaaccgattgcgcgccaaaacacaatgtcatcacacgacactcggtcccttcgtcaatcgaagcggatgtccgttaccgcgctctacctgtcgatgtccgcgaaggacagagaccttgaaatctctgatgacctggctagaggttagttgccttgggatgtcactagactggcccatattaacctattgatttagcgcaaaaattcctacgtgaactgaaatcgaagatctcctctcaatcgaaaaagaatttcgtactggaaaaggatgttcgttacttggattcgcgaatcgctttgcttattcagaaccgtatggctctagaagaggtaaatcaaaccaattgctccacccatgattttattatcttacaaaaatcatagcaaaatgaagttgccaatcgcctggacgataccgtcgatcctcaagaaggattcttccccaatgacgagaaaacacaaaaatatggcaaccttcttttccttctccagacagaaccgcgtcacattgcccacctgtgccgactggtctccatgtccgaaatcgattccctcctccaaaccgtcatgttcaccatttacggaaatcagtacgagagtcgcgaggaacacctgctactcaccatgtttcagtccgtgctcacctaccagtttgacaatactcccgaatactcctcccttctgcgacaaaacactcctgtttcgcggatgatgaccacatacacccgacgtgggcccggtcagagttatttgaaacaggtcttggcagagcagatcaatgcactgattgagttgcgcgacgtcgatctggaaatcaaccctttgaaggtttatgagactatggtgagagatatcgaagaagaaacgggctcgctcccggatcatctccctcgtggcgtcacgggagaagttgctgcggaaaacccacaggtgcaggccattatcgcgccgcgcctcaagaagctgaccgagatcgcgaactccttccttaccaccatcatcaattcggtaaatcaagcaccttacggtatacgttggatttgcaaacaaattcgaagcctgtcgcgccgcaagtacccggacgctcacgatcaaaccatctgtaccctcatcggaggctttttcttcctgcgcttcatcaacccggctatcgttactccccgatcgtacatgctaatcgacgccacaccgacggacaaacctcgtcgtactttgactttgattgccaagatgctccaaaacctagccaacaagccgtcatatgcaaaggaaccatatatggccaaactgcagcctttcattcagcagaacaaggaacgtgtcaataaatttatgcttgatctttgtgaagtgcaggatttctatgagagcttggagatggacaattatgttgccttgtctaaacgagacctcgagctacagataacacttaacgagatgtatgctacacacgctttgctggaaaaacacaacgcggccttggcccaagaccagcattcccacctccaagagatcttgcaggaactgggcccggctcctccacagctaccacggaaagaaaaccgaannatcacggttccgctgttcagccgatgggaaacagcattggatgacttgacttctgcgctggacataacgcaggaggaagttttctttatggaagccaagtctacctttgttcaaattctgcgttctctcccccctcactcgtccgtggctcgtcgtccccttcgtctggatcgcattgctgaagccgccgcgactttgaagaatgacgcggtcatggttcgcaagggtattcgcactatggagctcctgagccagttgcaggagatgggagtcattgatcggtcggatgagttcagcctcctccgcgacgaggtcgaacaggaactcgtccacttgggttcgttgaaggagaaagttatggaggagactaggcagttggagtcggtgtacgccaccattcgtgatcacaacgcgtatcttgtgggccagttggaaacgtacaagtcttacctgcagaacgtgcgcagccagtctgaaggcaagtcaaggaaaacgcagaagcagcaagaattgggcccctacaaatttacccatcagcaactcgagaaggagggggtgattcacaagagcaacgtccctgagaaccggcgcgcaaacatttacttcatgttcaagagtcccttacctgggacttttgttatcagtctgcactataaaggtcgtgcccgtggccttttggagttggatctcaagctcgatgatttgctcgagatgcagaaggacaatctagaagaccttgatctggaatatgttcagttcaatgtttccaaggtgctcacgctcctgaacaaacgcttctctcgcaagaagggctggtaaatgttctcaagacctacaaatttctcactatttttactagtgaaatcgggttggctcaaacgtctaggaggcgaggtcgactggattctcagtcgccggctcttctcagcgccgtgatgtctacactgttacttttaactcgacggcgttgcctggctgggccgcagcattgtgctagcatacccttgaagccacaccttaactggccatgtcagactccagccagtaaccaacctcattcgaggcacattctacgacaaacgcctctcatttgccaatcgggactttccggttcaatgcaatactcttggtgtggctgctatttactttcagtgtgaaaaggttctgatctcgctggtcggggaagagcatttacacgttcagcagcccaccgctgatttattttattttgtccttacacacgttataccccgttgaacgatgttgcacgttttgctctctacttcatgacgttcagagttctgtttatggtttcctctcccttttatattttcgtatgttgctgtcggttattagtctttctggtatatgtaattgtatgtatcgaaattagcgtattcgctgctatgcaagctataatgaggaacaattttgccatgataccagcaatcttctctaacatggaatgtgatcttcgaccagttatagcggtgaaacgcacaataggtagagatgggcggcactcttgacgcatcgacgccacggtggctgatttcggcctgaggttggaggatgacgtgagggaggcagcattagcatgaagacattcctgatgagtatatagccagtattttgacgcgcacgtgcatagaaatcattctctccactctgctactcctgagaacgcctgatcaacgtggatggccacgagtatattaattattgtggctgaccgccttgagcccctccctgaagctgactagcccaactcattcttgacagtttatcctccctcttcgttctcgtttcctttcttgcactgccttttgaatatcctcgcctctaagctttga

SEQ ID NO: 12909 - DNA, 3153 bp, Emericella nidulans
  unsure (1)..(3153): unsure at all n locations
atgcaatgacttcatcttgaaataatacccgcttaggacagccagattgtccgtttgttgaaggtacaaggtgcgaacacatgcgctccccactgtacaactgtacataggtatatagcccagaatggaaccagctcgatgttggttgcagaaccctaattttgccttggcttgacagtcccctcctggaccacatagtaaaccaccgttccttctcctcccatgcccttatcaatcatagccaaaagcaacctcttcgaaccccacttgcccgtacgacgcgctttggcccggtactcgtaatactcagccaatctcgcagctttgtctgcagcaccgtttccatcccccaaagccttttcttccgcctccgccttggtatcaattttcgccgctgtttcgccctcctcctctgcaggatcaggaagcgcatcaaatactgctgccatcttctccagactccaagattgcccctgtacagtcgggacaacaaacatgcgctccagctcgacgtcttcctcacgcagaccccgctcaaccatgtacagttgttcgtctgggtgggtgtagaccctgtgcggaggaatcccagatatgagcggaattggaaactctgtcgtcacttggtggatttgtaatgatgtccaaaggtgctgatgttgcaagttgtggaggacttggtgggttatcgaggcgagggggcttgcgtcggtagtggtggagatcagggtagtgagggaagagagagctggcggttgttgtgggattgaaggtggcattttttccagtttgttgcttctcgatgtgagtatgctggttgatgttcagtgtgagctgcaagtcaatcacgatgcattcaaggccctattagttgacgggagcgggcggtcgaaaaaagttgggcggagataagcggagattcgagtcgaagtagaacatgtggcttctatgtgcccctgctccgcgtttcactttttcttctgcaacttgttccaagttgtttaaataccggcttgtcatggccttctcttgctaactcctgttcatttatatcttaagttaaaatctgtctgcttgtccttactcctacaatggcgcgccagaaacaagcagcgcccatccaacgcgccacgtcctcggagctgatgcatatgcttccagacgatttacctcaaaaacaccacaatggtgcaaatatgggcctcgcaaacaaagatacaactcgtgataaggtgcacgaagcggcagatgctccgggcttgtggcaactcgcgttctgtgttgcgggaatctatgcttctttgtacgtttagattctaacctacgacatacatgcgctgacttgatagtctttcctggggtgttcttcaagaagcgattacgaccgtctcgtatcccgtgcatcctcctaccgcagctgagccagagccagaaaaagagcgctttacgttctcgatagtcctgaacaccatccagtccaccttcgccgcagtcaccggttttctgtacctctacttctctactcccaaaggcgaaaaggttccatccatcttcccaacgcgcaagatcatatttccccttgtcctcgtcagcatctcctcttccctcgcgtcaccatttggatatgcaagtcttgcgcacatcgactatctcaccttcatccttgccaaatcatgcaagctcctcccagtcatgttcctccacctgaccatctttcgcaaacgctaccctctgtacaagtacggcgttgtcctcctggtcacactcggcgttgcgactttcacactacaccatcctggaacaagcaataaggctgctgcgtccgcgacgaagggcacctccggttcttcggcatggggaatttttttgctttccatcaacctgctgcttgatggactcacaaacaccacgcaggaccacgtcttcagctccccgcagctttacacccgcttctcggggccacagatgatggttgcccagaatgtgctttccaccctgctgacctcagcctacctcttgattatgccccacctctcctcaacaggcattctccacgctatcctccctgttcccatcccgccttcaacggagaccgagttgacagcagccgtgtcattcttatcccggcatcccgaggtactcaagagcgtgcttgggtttgcggctttcggtgccatgggacaacttttcattttttacaccctatctcaattctcgtctctgctcttggttacagtgacagttacccgaaagatgctaaccatgcttctgagtgtcttttggttcggccactctctgtctgctggacaatggcttggtatcggtcttgtctttggcggaattggtgctgaggctgtcgttcagcggcaggagaagaaggccaaagcggcgaaggcaaagaagacggagtgatttatgcagataatcgcttgtatttccatgtccatgtagagatagacttcttcaaatcggcattgcatcattcatccatttaagacattattgaatctgaatttgttacaatgaacattggtaataagtagtatcaatatataaacttaaggtatccattaaataaccagataaatcaattacttcctcccctccaccataataatatggtatccgtacccagtctttgcctccccaatcttcgggttcccagtcgtactctgctccagcgagaaagcaacctcctcgaacggaagctctagctcgcccttgctcttccaccctagggagccgcctgtagtcaaacgggcgtataagtacttgcttgcgcttgtagatagacacggaaatgcaaaaaggcgaatgagagggaaagtacttaccctgcctggctttgtcctctgaatactctctcgcaacctcatcgaacttcgccccgttacgaatcttctcgagggcttcttctttcttggagaacttctcgcactggtgaattccttgtcagctgtctcgcacgacggcacagaggcagaatgtagagtgatgctatgagtttaatcatagcggaagaagatcaacagagctgagaatcttgctagatgccgncagatagtagggtggagtctctgcaacggggttatgtatataccgattacgcttcgagctgactgctacctatcaccgtcgagcatgacaccgtcg

SEQ ID NO: 12910 - DNA, 459 bp, Emericella nidulans
acccagaccgtgatatgcccttcggagagatctcggtgatcaggaaggattttggacagcaggtgaaccaggacgtggaaagcagacatggttttgcggcacaagctggacgtaggaagctgatggcccaggcgcggaattggctactcagtgctactctccgaccaacccatagttgggtctactggcgagatgcagatgtgcttaccgcaccgtccaccatccttgaagatctaatgaggcacgataaagacgttattgttcccagtaagtattgcgtccatgttcgagacacaacctaatatcttgcagatgtgtggcggccactacccgattggctcggtggagaacaaccatacgatttgaactcctggcaagagtcagagacggctctagcgcttgcggagacactcgacgaggacgcggtcattgtggaaggttacgccgagtacgctacct

SEQ ID NO: 12911 - DNA, 3516 bp, Emericella nidulans
atatatttcaaacggaaaaatttgtctttctggcaaagacctacactgcatctggcttttcttgatgaatatatgacctgcacctcaactcctacgagaatatacgaactcacgattcgatggactgatagtttcaggcttctgagggctggcagcctgcccagtactccgtactctctattggttttgccctgcacgtgatgtgatacggtacgaaaatacgatggaagacagacgaactctcatctgagcggtgcgttcttgtaccaggacatctcgtgaacagaccacttcaaacgaggcagaaacttgtcagggcgcggaggatgtatatttactacttagatgatgaatatgtataccttgcctggagaatttggactatgatcactagacaacgaccttatcagtagtagcctctgcctccttcaatcaagaaacggaacagagcgcaggcgtctcagcgaagtgacggtactctgccacctaaatttgagaagtttctagagaggaattaccaccgatcatcccccctccgcctcgtcgccctccgatgcgtgaggcgtcccgaatgaaacgcctgaggattaaaataagacgtaagatccaactccccgtcctccatgaactgacaggaaagaaaacttagcaacccgccactgtcctccaatcgtctataatcggcgatagtctccagggcccgcccaaacgcagccccgtactgcccgcggccccttgactcgagccaccggttgagattctgagtaacggcgaggtcgttccggcagtggttacgcacggggaagtagacttttatcgcggggagattccttccaggcgcgatgtcgaagaagtacacgcatcccttgagcatgtccggggcgtcacgaagttggggattatgctgtcgccgttgttggggacgtatggaaactctgaagtctctgggaaatcagcgtgctcctcggtaacagttttaagtaggttgaagagctcggagaactgttttgtgcgggtctcagtgtctgcgatacggccgcctagggtcatgatttcgcgaatcgctctgaagttggtgtgcgggctgttgaaataccactttatacgggcttttgccgggctgcaattgtctacgctgagacagaatggcttcaggagcttgccttccggattcgtgcttaggaattcatggacagctgtgcgggatggagaatttggatgcaatccccggaaggacgcttcccagctgggtatatctaggaacgcctgctggtcaagcttgcgcgggtgaaagtatgtcttgagcccagttgacttgcgttgaaactcgagggaatacaccaagctagtgccaatcgagctacccatagtagcggccttttgagtgtacttggcatagtcatgatcgaacagagtggctaggaaatgatgtgtccaggtgagatcagagcctgggacagccgaggagagcttgtagaggatctcgcgcatggccaagtggttcaaaggatctaaggacgttcctgccattggtcctataggctctaaaccgaagcggacatctggctcgccgccgggattgttccatttccatgagaattcgaagggcgtgccgtctaactggagcatggacttccaggttggtggcgaagccccttctcgaggcgcggggcctagataaggcgcctagacaacttcaagttagtcagtgaccttatatactgaggtcgtcaaacatacagcgtagtggtaatggtacagaagacattcgtactgtttctcgataggatacgcagcagcgtccaagagaactgcgaggtgtctccccgtaagctgccaccaagcatcgacatctggcccacgagatgggagtgtctgggacagaaccttccaagcctgcgtagatgtacctccttccgacaaggaccgtttgtgcaaaaccatcccgtcagttgctgtcatcgtcaaagcctatagctgctctcaatggtctctcagctgcaaaacctttagaacatatacctatgacaagttcctgctttcgtagactgtcagggcctgaagaaaaagcaatgttctccacctcttaggaaacacggaaaccgaggctgctgtagccagacggtgtcaggcaacaaacccatgctggtcagtttgcatgatggctaatttgcaattggagcggagaatattgctgccaatgcctctatgagcgacaaacctggtggctgacgtcaggacggtaaatattccctgcgttcactggtgtgttgaaccccgagccccgacctgcagaggatggctatccgcatatataacccgcacatttgggtctgatgatggctgcggcaatttgtgccgattaaacatgaacctttcggaagccgaatacctctgcagcagcagtcagtcatagtatgtaccttgggaagagttggaaccttggaaatggtggattggtgttgagaaaagaactgggctcccagagaaaggcaccaaaggcggcaacggggttaggagtcagatccttaacgccgctcctttgattcgcatggccagcattgccttaaccactggggagacgatattggatatctaggtaacactcactcctttctcggtgcctcaccccagttatctccggagagccagcccaatggcagcgtgaaacagacgcatcgtctctggatgccatggagagaatagcgactagtgacatctatagcaacgaggggtgaggggctttcgtgaagataaaaggcgcatcggcaacgactatccgactatctgaaagcaacaagaagaatcaagcatcatccaaatccaaacatggcatctccctacgttgtccttgtcacgggcggcaataatggcatcggatacgaagcctgcaaggctttctacgagtctccgaagtcctacatcatcctcatgggctcccgctccctcgagaaaggcgaagcggccataaggaaaatcaaggaggtggtcccaaacagctcaaatactctcgagctcattcagctcgacgtcaccagcgacgagtctatccagaaagcgtacgagcagattctcaaaagcccggggcgtttagatgcgcttgttaacaacgccggtatatacttccctctatcggtaatcagatagtgcagagtcgctaatagacaaaaggagcaacctttgatttcgactacaatgccagcaaagttaccctccgcgagtgctttaacaaagcctacgacgttaacgtaaccggtgccacagtcctaacacacacgctcgccccgctcctcatcaaatcctctgacccccgcctcctcttcatagccggtctttccatgatgaccgtcgcaatgaaggagtacttcccgacgcctccgctgccagcgggctggccgaagaaggtcgaattcgagacaatcggggtaccggtgctctaagacggcgctgaatatgcttatgcttgactggaaccataagctcaaggcggacaaagtcaagggtgtggggctgttg

SEQ ID NO: 12912 - DNA, 727 bp, Emericella nidulans
gggagagcccatggacccagcggggagctgtccggacgcatcacccgggaggagacgtgcacggaccatatatgtcaaccccgagcgttttagaccaagcaacaggacaacggggctctcgggttgcctactaagatctgggaagacacccgggctgcatacaactacactgaacccacaacactaacattacacgacctgctaagagcaggctgaccatactaactcctaccagggaaaaagaccgccaagaaaagaaatcgcctaaccacatctcaaacgctgataccctaccaagacagcacatgggaataccgtggcctcaccgacacaaacaacaagataggagtctacaggccacaaccatgggctggctgcacagccatacccagtgccacatagagagacacatttctagccatgcggcgatcacgtcagacacgagccctgcaagaacagatatcctgacactcatgcctgtcgtttgccgcatgcacagaataagatcatgccaggaatacgaactgcttttagccgatatactgacagctcacgatactaagactctgtcatgctacggactagccatcacgcgcacggtagtcagcagccgtgagagacagctgccaaacaagcgagagtagtgttcacagtctgacaggcagcagcgaacgaccagcgcaacatcgacgcggcacattggctgggatgctaacggcccgggcga

SEQ ID NO: 12913 - DNA, 4906 bp, Emericella nidulans
aaaagttggacaaaaagtggccgttttttaaaattggaacacaaatttctcagggtgaagggtacaagggacttttcccccatttaaggggaaataaattcaattccgtcctttttttaaaagggggttttccccccctcaaaaccaggtgggggcctccaaaaatccatccataccaaggttaagaagtacaagtttgccacgccaaaaacctttggggccaagctcaaaatgtttttaaagcctcggttgaatgttaactggtcaccacaataactaaatggaatcgatgcccattttcaaagttaagcagtgtccatccaatcccaggaagttttaaggtagcgcaaacagacgctgactaccaaagagtctttcagaattgttaagtcccgaatgtcagctggcagctttccaattgttttaccatcaacgacaagatgaccttggagaaggtggaaatagaacctctgtgataaaatatcgtctgatgcatcagtttgggaagtaacccagttctcataagggtgcgataacaaccctccactctccatatttccgtggcttgttgtctgcttggggccatgcagcgtcaatggcagctccaatgctgttaggttcctgcatagcactagtacttattagaactgacatctgactagtcatcttgatgtcccggattaacatattccttgttatatttgaaaagaggctcaaatcggcaactaaactctcttgcatggccaaagatgcgtcaaaaaaacacctcaagctttccggatcaagcggcgcttgactggttaaccaaggcgtaaaggaccttcgacagaggagcgctgaaaggaaacagtatctggcggcggtattgaccacattcacatcatcagctttccttgtttcatctcgcagtagtttgatccagctcatagttatttgccggatcttttggaggaccctcttggacgcgaaacgggactctgcagagcccagagaaaatagccgtaaacagagcgtaagaagggtttccatcatattgtgctcacggtggtttgtggctatcgattctgcatgccggctaacttgttccgtcattctttgacaaaactgttcatccctgaacataacatggacggcccggaagttagtgtgttccagcctagggcctgcttgcaatgcaaggtgatgaaacaggatcattgtctcttgtaagccgaaattaatatttgaagaccctaattcggctaggatagatagccagcgcctgttcctgccgccggtaatggtctgatgtgctgtaaactcgtgcactgtaagagccgttggacattcgctaatgttagctgcgattttgtaggaagaaggcccctctgtgtcaggagcaaagcacgacgaagaatagagacatgagaacggggactctttcgggatccggagcacaaaatggtgtgcaaagcttagctgctgagggtagtcactgaaccataactccctcccagagtcgtagaaatagtactccgggccatgcggaagtatgatatcctgaacgtcagcaggaagccccttccacctataatgtgttcctatgaagctcttctttggcgaggccaaactaaaagttcctgctcgtttctccctgtatattttgagctgggtgtaatcggcgagcaataattctggattgcccttatcggaaggacttggcttagcacagagtctattcacaatattccaagtgacttcacgataagctgctaaggctttcggcgtctgaagctcaaaaaggatggccttctgctggacttcgccccggagatcaaatggtagataattttcatggacgtcaattttgagtcggcgtcgggatctcaaataatagcaatgaatgcagccacgaatatcgtgagatccgtcggggttgcgaaggaaagtgcaactggtggatctcagcttgtcagtcagatgagtaaaagacctattgatttcctctaattcttttctcttgtaatcttcagcctcttgtgacgctttcaatatacgctgtcgcagcttgtgaagcgggcctgcgctaggtgaatcgaaataccgctcagcaaaacagccaggcatcgggtctccgaaaatcgtcatcttgccatatttggcttctgtacagcgagactgaagatgaaattggatgctttgaagacgtctcatatctttcaaacgttctagaagtaatacatcaaggagctctgggttgaaccatggatggaaatccttcaaaacaaggtatgcttttattgcagctctgtccatggctacccacatgtcgaagatgctgagaataaaaagtgaaaactgctcagggtcatcgtcgtacgcatccccaacggtctccatatagtccccaatggaggatgccaagtctatgcattgcttggtaattgcttccggtgcggatggaagctcaaatgcgtcggaggctataagccgcctctcgatccgcaagtactgaatacctcttggtcaaggcggcgaactgctttgtcgtactgcttgtcacaatactatcaagatggcatggctctataaagcttgcttgaggagacttgtgttgacgtggatggaaaatgttcttgagatattcgatgctattaggaagtgtcagataacagtcactgggcgtgcaagagggcagtttcggaatttgccgctgaatatcctgtttccagaaattccattccttatggatcgctgaggtcgcagcatcaatcgaggccatgcagtaaggttcaatcaagcgaagagccgcagtgtatgccatgtgtacctgggcagaaccggattctttctctgcttcgagcttcgccaggcggcggcacagcttgaccttcaataaatgatagtgctctgaactcaacactctcacgcagtcatctaataactttgctaaaagcatgcacatcaagtttttgtactgtacacgtccagcctcttcgagttgcaagtgtagcagacgttgaaggcagaccctcagagtaagccacataggggagcgcctccagggaacttttgcctggttccagcagacatcatcattgacgcgcttcctcaaacatggcacagacagtcgttttccattggcctcgaggagagtcattaaacattgtgttatgagcgcaggatcacatgtgtctcgatcctcagtcacatctttacctgctttgcgaaccttggcagcaaactgaggaagatattcgacacttgccttctcaaggaacatagcaaggttcgcttgaaagctgtggtcggagaaaatctcgtgcggtaaagaaacggcacacccaggaaagtcccattgtaaagcacctttagcagcaagggtttgttcggcagacccagagatctcgaaggcttcgaaaataacacctgcttcatcatgtctagttttcaggagaagcattagcgatctggtgactgaatgaaaagaacggaattgaaaaagcaagaactacctgataagaagacctgcattctgctcttggacacgaacaatcacggcattctctgaacccactttcttcagagcttcgataagagctgccttgttgcagatcactccttcgttcacgatggaagacagtttcaatgtattttccaggatctgccaggttggaaacagctcttcgtctgccttggttttcatcaacgtcactgtattgagcagccgacgcatcaattccttttcaactgcctcgggatgttcatcagcatgtccaggtaactcagggggcaggacaacgtggttgaagatagaacgaagaccactttcccacgtaggcatcgtgggtggtggtccagtgggctctgttcgggagaggagagaaagggcgtaacaggaaagggtgaagagaagaaaaagaataacctgttgtaaatgaagaaaaaatagaggaaaagatgcagtcagatcagagttgtgaaagagaaggaatttattagaaaaaaattatagaagaaatgtgtctgcgtttgtcgtgtgtgaagacaaacagataaacacaaaaaccaaatccattcacaagaatcactctagtgaatttcatcattagtcgcagtccatcttgtagcagaaactgaatctggtctgtgagttccatttcaactggtggcatattgtcaggaatcggtatccttattagctttattccattcactttgggagcaagaggatctaagtgtcttcttattccaccaactgcttggagagggctatcttcagatagtgcatctatcctgtagcatgagcatgaaaatagtggtatcaaactgatacagaatgaataggcactagaatccattgagtaataacgttcttcacgaagtcctctgaaaaatgggatgatgtacgcctatatttacgtgcactgatttgcctgactatcagaggtcatgggctctctctctggtgccagatatgcttattagccacgcagcgcgaatctctaagtgcaggatgacagttagcctactggcgaatgtgaagatattgatgtgccttggcatccgctacttgactcaggtatctgatctttaggcgggatccagaaagtcttctgaccgctgctaacttgagggagacaaataagggatcaagcgattgaacaaatattttgggacattttggtcagcataagcaaccaaagtcgaattatcgtcgatgttttcactaaaaacctctatatgctcatgagtacatgctcagtcaggtacaactgaacctgcgccgacggttccgagaccttcttgggtcgttgttgattctggttctgtggggcgtgcagctccggcgacgattattaatggagtgctctagtggaccatttaaatgtgaggtcattccttatcttgaactgttttctgccgt

SEQ ID NO: 12914 - DNA, 643 bp, Emericella nidulans
ggcggactgcctggacacttacgcaaactcccagagacatagtgtcaatcggaatcatccggcttctagacggagcgcacccgctccttatgcgagaaaaccaatttactagtactatgcttgcgtgatgacacctaatcccactgggctttgataatatgacatggaattcacccattttactgcccggtttacaaaacacagctgtcagcggtcagtcatgattactagaatccaacgcgactaaagcatcgagctaattgagtatattcatcgtatataactgtctaaccatctgaatcaagggggctcttatagcaagccaccaactaacctcagacaacgtacactgcacactcataccggcctctacattaaccttagctgattaatggtaaatacagaatatcatactgtatgatagccctaccaacgggattgccacgtacagtatctgctgtactgactagtttctggtttcgcgtacatgagcttgactttgagtttataacgcgtaaacttgtactacacgctggaaaggccgtacagggatgtgacgaacgggaagactgcaggagcacctgagagacttattcaaagcgagaacgcaactaattatagcaggtgatactggcacatgatc

SEQ ID NO: 12915 - DNA, 506 bp, Emericella nidulans
gatgatggcatggatgccgaattgcaccgcgcgcgcgagctggggcgcacttggcgcatcgccgacccatggagctccatgatgcaggggttagaggcccgtaacgctgacgagccaccgtcttcgaacaccacaggccactcctactggctggccatctgcctggatactgtcatgcggctctttccgaatgctggcactaactgctagcgaccctgccacaagagcaaccccggccaactgctcactatcgcgtccgttattgaggacaaccaacaaatcttggacccagggcacacactcctggcttgcctctggcccgaggattagtacctgttcactctcgtgtcacttattgtcttcaaagctcttggagggcacatagcacgggctccggataggtcggcggaccccggcgcgaagaagacttcaactggactactgcccaagacagtccgacagcttcgggctcttgctttgcggagcaagggctgaattttctcacc

SEQ ID NO: 12916 - DNA, 553 bp, Emericella nidulans
  unsure (1)..(553): unsure at all n locations
aaccattcggaagaggcgtctgccatacggtcccagagttcaggcagatttctgcttccctttagccaaagcgtcctccttacaaggctggcagattgtcgctactacttcacggtgatccccattctcctcgtccgagctcaggttcttgtctggcacttcgagcataggctgatatagatcgctagtggtgactatcaaatcatttgggcccaatccccgcttgccgcgcaaggccgcaggactttccgggccaatcgtggcatgaacaaggctgacggtaaaacatcgaagacaggcaccggtcgcgatgctggcgaaactcgctgcagttgtaagagaagcttcggcctcaacttcagccgtttatggcgcgcattggtcgccggatgggctagctggtatgtagttttcggccgtgaagacgcaggggncttgtggtgtttatgctggttgagttggcgaactggtggaggtacagcggttgagtgcagatcttcatcgcttgaagatctaggctcgatagcggtgattggcattgaccgacgttgct

SEQ ID NO: 12917 - DNA, 1682 bp, Emericella nidulans
tgccacgttattattgctgagagtgtgccgaatggctgctttgccagcctggatcactgttcttgtaatatgagaacgtatctgatatccatctgtagatttgcgccggggtcaatcttctattaggggcgcgtagtatagacattccaataagcgttgcatagctgtatggcggttttgtgccatcatcttcgatcggcggcaattcgtggggctctggcagttgcacggtggtgacctcttcccccttgggcttctttgtccgctcttttaatggtgccgcatccaggagtgatcgtttgaaagaatgcttggctagctgagatggctcgggaaaatcagcgaaagtatctgctgagggcacgtccacgtctaggactcctgattgctgtatgcttgacattcctaacactggagaatgtcgtgaataaggcagactgcggcatcggagcagacgacggggtagggtgggaataagtctcgagtggtatcttttttatgggggagtcggttgtaaatgtaggaggagcaggagcagtgattggaacatatcccaacctcgcttgagcacagcccgatgttcgcgactcccgactaaatttcgtgggcgacactctgttgggggaagtagaagtcgggttaaggacgtatttatgatgggaagggggattttcagtcgactggagaggcaatggcgatggctctaatcggggttgtggcttgatggttgtcgtcctatcctgtgatgaatgcgctcccaaaaccgtttgcgggctgtttggggctcatatttaacctgccagcctgagaccggcttgggctgacttcgatgaccgattgacgcgctgcgggttgagacggagcgattctaactccgctatcgctcgtccaacagttgatgtagggtgtcagacggttgcgttatacacactgtgtaagttgcaagggaagatcacagtatggtgatggccagatagcattcaatacacagacagtgcttggaggtcgcgaggagggggttcagttactggacggtgaggcggcaatacagtagtgaattagtcgcggatgcgcgcagagggacgatgaaatggaatgaaggtgaaagggtaatctggaacgcggtcgactttggatcgaatgaagattgcgcagcccaagtggggtggtgcacactctggataataaaacgatttattttgaaacggtgatggaagggaaggatgagggtatgcctgaggtgtgcctaacttgttgataacggacgcgtcgcgtctctcagcttcccactttttttactaagacaagagtagcgaatcacgtctcgtctccttgccgcccgatgatctgctagggtaacccgatcggcagatctgtgggcaccgtaccctgtagttccattcaacgattcaaacagtcaagacacagatcatgccagatcgtccaacccctaccaagggaccaaccccttcaaagacaatacaataatgggtagccacctcctacgggcgcaaggagtaatctacggcccctcaataaaatcaagggacctactccagtcaaatccacgctactatcgcaatattaagcacaaggaccagacacaagccacagaggacgatattggtcagcgtgatttcttgtacggctacccaacaaccctccagccctttcaaggagct

SEQ ID NO: 12918 - DNA, 333 bp, Emericella nidulans
gccaatacggacttgccgccgacttccgtggtcacagcgcgtctccgcgtgattcatcaggtgggagtcttgtgcgcagcagacgggccgtggtatatagagcaagatctatgcaggggcacagggggaacccaaccgtgccctctcgagctggttggttctgaaaccaaaagttgtaagacgatctactgacacgacaccactcaagtcagcaccacttcaaacaactgatccaataacccggggcggtgtggacacataacgcagggtaggcgcccgtatcaacactgatcgggcactacacaggtttctgatgttgggcccacgattgag

SEQ ID NO: 12919 - DNA, 585 bp, Emericella nidulans
  unsure (1)..(585): unsure at all n locations
ctggtcgcctgtttcgcttcattggcgtctgtcgagtctccattgacagggcccacaggtgcgtcgaaattgcctgcggttaacgactccagttcgccttttctacccaggccaagagaaacgggggtgatttggctgatagcatatggagaggctaagacctcttccatccattcatgatgttgttggtacctcatcttgctcacttctcgtggagtaagcaggtccatgatatcgcccgcagatacatcttcatcctctagagaaaagtcggtagtagctgcattaactgccgctgatggagcacggtgtccgcgcggcgcctttggttgaactgggccagtgggaggctgcacccctgggccgggctgcgggtagaatggttgccgtccaaccatggcattcggatacggcccctgtggttgttggtagccctgttgaactgccatttggggtggcaggccgattgtgggccagttgttgcggtcgtgcagcataaaatccttgcgcgctagtataccctggctttgcaaaaaccgacgttgggccagcatgccttgaacttggngtaaagaccggatccga

SEQ ID NO: 12920 - DNA, 221 bp, Emericella nidulans
ccgtgatgaggcacagaccagctctcacgaactcgctctacacgctagacatctccctagacaacctgcgtcaggagccacagcggaatgtaatggtcggcgataaacttcttgcctatctcagccgttgcacattcggtgcatgagcccggggatgatacacgtagcctacgtgccactgtggagtacatgaccgccatgttcgaagaccgtatgcttgt

SEQ ID NO: 12921 - DNA, 615 bp, Emericella nidulans
gacatgcctgagcggcctttcttgagggtaccgtatttcaaaatactaccttgtttcatgctcgggtccagctcttttcgtcttcgaggaccttgtttccgggccacagttttctttgttgcggactgtttcgctgattgctcgttcttccacttctctacaacctgtggaacgcctatagatgcaactgtctcgaaaacccacactttctcaggggcgtaaggatcatatcgctttgtctttcgtgttttgctcggtgattgtgggatgaaattctcgccctctccgtcgtcgtcctcctcatcaccggaggctgtcgtttcctgcgaagggagcggaggatttggctcctcggctagcagatccaacccgacaacatcgatagggatcatctcaaattgcagctcagtctgcccgtctgtgctgaagctcgtccggctcttgtaaaccttccgtaagacctgcgcatcgctatgggatagcctgggccggccggatgtcgggtgctgcccaagacgaagtctgtaggaaaccaagggttcagccaaaagtctaatgacctttctcgcccctgaacgatagttccattcgaatgcataagctgtgaactgtctc

SEQ ID NO: 12922 - DNA, 404 bp, Emericella nidulans
atttatttggaacaatggttggcggatagtgtaagcaaccagattgcatatcgctgatttggttcgttgacacaagggagggtgagtggccacttcgcgaacctcagatacttttgccttccactgccataggcttaatgctgtatgacacattgatcgtatcagcagaagcgagaacgggtgatctgtggacggaggtttttgagcaccgtatttgattactgatcttctggagctgaccaacgaggccgatgacgataggcaagccaaccttatgagagtcaagcgcctgtgctatgaatatggcgcacgactacggacttactacgggataagggacaaaggagaatatgtccggcgcaactagcttgaaacttagctctatttggcgcagtacaaccacg

SEQ ID NO: 12923 - DNA, 101 bp, Emericella nidulans
acctggactagctacactgaaagtcatgaattaacctctatgggtgcgaagatacaaagtagtaggtacagcggttatgtaggttcataactacacaaagg

SEQ ID NO: 12924 - DNA, 163 bp, Emericella nidulans
gtagatgttagacgccttagtccgtggatcaagacgggtcatatacgacagttacgccatcgtccgtggcgaagcgcgtatcctcggtctgggatggcggcattataccccaggctatatgacaagcccgaagcgcaacagatacctgggacctttgaccggc

SEQ ID NO: 12925 - DNA, 152 bp, Emericella nidulans
ctcgactgtacggcgcaatgcacgataaggttgattgtggagttgctcaggtggcagtttctccaggtatggcagagtatgcaatagggtcagggggggcaaagacggccagaacgtttgtcgccaggaactcgatcagcttgccaagtctg

SEQ ID NO: 12926 - DNA, 455 bp, Emericella nidulans
gccgtacaggctttgtacttcttcggatttcagcggtaacggtgctcccatggcgaagcgctccgctgcctaattgttcttaacgttggcccgcaatccatatggcagtaaaatactcacatcacaatatggttctagaagatccttatatcaacatacgtgcatacagataccaatctgacacattctgcattagctgcagagcatcttgcctgtctagaacttaacgacaccccgctgttgattccaacctacttcagtatcattggtgtgatactgatacgttgcacacaataaatttagctgtcaagcgtctgatgagaacctacttcaccttggcacagtaagcagctgcacagtagtgtagtgatacatctagaacgacgtgctcaacacacgttgagaccgtctacccgaaccgaatggagcgactacatccttgctgaagcccatgc

SEQ ID NO: 12927 - DNA, 802 bp, Emericella nidulans
gttttgcgtaaacacgcttttcgtatcaccagagttgttatacttagcaaccgagggcagatagctgtgggattaatacacgagtagggccgatacgaacgacgacgcaggcggtctgtgcgtgcccaatcccataaccgatatcagtgggctttgcgagtacgatctaaatgctagctcttgggcctggcttgctggactgagggacactatccacgtaggcgtgtaggggaaggcaccattgatatgtatgtcttagactctcgctaacaacataaaggatgatatgcgatcgaaggcatacgatatatccaaaccagtcgatacatatacaggaccgccaagcgatagcattcgagtggggatctcattgccgacgacaaccagagcatgtgcgttcactggagcgacagagaaaccttccgaacgcatagaggtacattgacagactatttatagttagccagtcatggattgcgtcagtggttagattttggccacgtacgaagctacgaactcggagattggccacacgcgttgacacgacaagggcccgtaaggtgccagacaatgatgactagaattgcacaaccgagggcggcagttcacgtcgtagggtagccagcaagtaaaggcggttaataattgtgtaagaccttacagatctaatgaaacgccgatgccccgagcttgcactggggaagctaaaaaaccgtttgtggagtaaacacccagagcgctggcccttacagaagcttgatgaggctgcctctcggcccaacggttctgtgactccgctagg

SEQ ID NO: 12928 - DNA, 138 bp, Emericella nidulans
gtgggccaacacgcggctcacagctccagtgaggtcacagagatcatacgccaccttgactcgaaacgacgggacagcagcatcatatagcttaggttcatgaagtacgtcctgatcactgacatgtggctgagcgat

SEQ ID NO: 12929 - DNA, 279 bp, Emericella nidulans
gctgtctacccgagagcgtttggcgaaaattcgggagagctttaaggataaggatgaagcttcacacacacacttccctctacacgactcacagactgcacaatatacaccttaatcagcgtaagattggtgcctatagacttcatattcatgctaagtgatagaacagagctcataatacttgggaagtgagatgtcgaccagtcagcacgcactcgccaatgctcaggtttacatcaacacgatactactagacgatcgagttcaggactgcaaacc

SEQ ID NO: 12930 - DNA, 148 bp, Emericella nidulans
caactatgcctacctgatgacctacgagccgacgaagcagtcagtcaacatcgatcctgctaacacgcctcagtagaatgctctctgcacatatgggaataaatgaacagctgcagattaatcgctgcgaacagtgtcgtcccagaac

SEQ ID NO: 12931 - DNA, 755 bp, Emericella nidulans
  unsure (1)..(755): unsure at all n locations
gaacaccaagagccgacacccccaaccaccacgaaaacaacaccaaaaccaaacacaacggcaacagacaacgcacaccccccncaagagcgcagcacggggaattcaagcacaaccgcccggcggccaaacaaccaaaaagacacgaagaccagagcaacggtaaaaacaccaccagaaacggccagcaaccgggaggaacagccagagcaaccgccaccacagcccgacagaaaacgcaacggaccggcaaacagcacaaaaaacgcaacgccaagaaacgaccagagcaacgccggaggccccacgaccacaacgcccaacaagcacacggcggacaagaagcccacccgggacgcaggaggaaacacaaagcgcacccgccgcaaccgcaccggacgaggccgccagaacaccccacacaaaagccaccacccacacaacccaagacaccacccaagacacgacaagcgaccaccccacacacaacacccagaccccaacacacacaccacaaaaaaaacaaaaaaacgggggggggggggggggggccaccccccacagggggggggggggggggggaaaaacaacacaaaacacaaaaaccaacaacacccccaccccaacaccaacacaccacacccccccaaaccaaccaccaaaaaccccaaccaaccaccagacaaaccccacacaaacgccacaacaacaaacaaaacccaccaacaaacacccacccgcaacccacaccaccc

SEQ ID NO: 12932 - DNA, 1557 bp, Emericella nidulans
  unsure (1)..(1557): unsure at all n locations
atctagggtctgggctccacgacggcttctgagttgacgatatattgacttctaagaataacaactttcaagccactcattgtcactctatggcttcatccctgacgctcgcccagtcaagcgtcaacggcacgtcacgcagttcacaaattatttttcagccacagctgattcctagaccaggatattctgaaccgttcccctgatgatcggtggagcctggacgcttttcctccgtcctggcgcctatcttgcgaacgcatgtggttgaggtttgcgtgaaccgcagcagtagcggttattcgcgaacggacgcgattgcagccggtcaacttggtccagatccttccatgcttgaatcgcttcaggggatgtccgccaagatcgagcgtcaacagttgatcgcagcagctggacaaacttacatggtgcctctataagaacttcgggcctcattttcatgatcatcgcaatctagaagacgatagccgcacctgcttgtcgctcagcatgcgacgggaatacgaatattacggaatatctattgatagtcggcatactccgtggcaacaagcgccggctctccactaagctttaattaagcaaaagggaagcgctctaagctgtttgaccaatcgcccaagttcagtggcagccctaaaatatgaaacctcaatatagctcaacttattaccagttcgagtctactgttactccacgtccgtgtcgcttctgtgtcgcagactctagtctggaaaaattctcgggaccgaaggccgcaaatttgccgcataacctttttctgcttagattccggtctccaacacccgcgtcacgctcatgcccagatttaagacttcactgcgcaaggaagaaagcgggggtcaatctggaacagtggctaggctccatgtttctcctgcccgcagcccgcgttggcaaccctttttccgcgtgggttcctctagcggacataccgatatttcgngcggttttccggaccatcgaaatttcctgattagtcgatatttttcctggtgttatggctcttgagctgaactaatctatacaggcaggaagtaattatttggtgtctccattcaattgtgatataaatggcagtgacagagacaggagaaagcggaggcggttggctgtccttgcgtgattggcctgaaagagatggcaaaataaagagtgggctgttgtggatgctagattaatagctggcgtcaggaacggagtttgaggtcccacactaagcaggacaattggctcaagggtggagctgaaacacgcgccaaggccgcgttgcacaacgctttagacgcttctcttcttggacgagacagtcggtatcagaacatggaataaggctgagcgaatcagccacagtgctgtaacggcangacacgatgtcatcaacagctgtataacccatgaagaccgccgagggaggtcaatggcaaggacactcaagacagctatgtgaagcgaataagcgactttcatacctgttcaggggctttattacccagatggactgattgacacgtc

SEQ ID NO: 12933 - DNA, 878 bp, Emericella nidulans
cgctccgatgcatagacccccgatggcccgattttaaggagaggtactggggtatgatgatcatcggcggttggtttcgattaagaagaaatgggatccaaaggacttattcattgctagggtgggggtgaggagtgatggttgccctcaacctgccaatcctccaacatcccactagtaaaatgcttcagccctaccaccccaaaaatccctacctacggaaagcggcccttcagctatgccactgacgcttcaacccttcgtaccatccaactacttgccccatcttcctcacccaggtctcgctccactgaacacacccaacacccccctacccacatcttaaacccacccaaaccccagtgttcccctactttacaaggagctacgcccatcccccctctgcccccccttgccaacccacctaacgcctccaatatatcacccccccgtaaccttccctaaaaccctttaaggcagttcaaaaattggccgctgccatccctacccacccccattcccaatcccacttcatcaacccctcttaccaataggcccccccccctcctaccccttatcacatagttccccctgccatttcccctaccaccgatccattctccccccttataaacccttttcccacccaatttccccctccccctctttatccccaccttttcccacctttctcccccttttccccctctactctcttcaaccatctttcacaccccccctttgtccttccccccctgtcctccatccctctctgtcacctattctttaccccctctcccccctatcatattaaacttctctccgccctctcctcctcacctccccttcatgcaccccattaattcctccctcatcct

SEQ ID NO: 12934 - DNA, 605 bp, Emericella nidulans
  unsure (1)..(605): unsure at all n locations
aaaaaaatacacgaagacaacaccaacaaaaaaacaacaacacaaaaaaaaacacaccacaaaacaaaaaaaaaagccaccgcacacacacactaaacaacaaccaaaaaaaaacacacaacaaaaaaaaaaaaaaaaaccggacccagccaaaacaccaaaaaaaaaaaacacaaaccccaacggaaaaagaaccccacaacagaaaagcgaacaccaacggctccccccaaacaacacacaacaccaaacaaaacaccaaaaaaccacaaacaaaaaaaagacacaaaaaaaacaaaacccaaaaacccaagaagggcaaagaaacaaacaaaaaacaagcaagcaagggcacacaacagaaaaggccacaaaagcaccccaaacaaacacaagacaaacaacataaaaacccaaaaaaagccgaaaaccccaaaaaaagccaaaaccagcaaaacaaaagacaaaaagaaaaaggcccaacccccaacaacaaagaaaagcaacaaaaagcaaaccgagaaaaggcccaccaaaaactgcttcccttngaagcaaaatccaaaccaaaaccaaaacccacaaaaaaaacaaacaaacacaaa

SEQ ID NO: 12935 - DNA, 664 bp, Emericella nidulans
ttttttttaacaaagttttttttttttttaactcccccattatcccctgtatttttttgcttatttgtctttacttagtataattttgtctcctatatatttcttctcttttattcttttgtcccttctatttttttttcttttttttttaactttttctattcattatctatatctcttaactcgttgtttttttcatttttttttccacttcttttctttttttttctttttcatatttcttttttttttctaccctatttctttttgtgtttttttccatttttcttttttttaccctttttatattttttatcctttccttttttccttttcttatcccttctatttttcttttttttttatttcgtcttttttcctttttatatcctttttttttttgcatatcttttatttattatttttggatttttttatctttttttttttattctttttaattatttcattgtgcattttttttccttttcttcttttataatcatgcttctttctctccttatcatcttgtttttttctccacctttttatatttatatcttttttttttttctctttttaattttttttttttttttaattttatctcattttttcaacttataaactttctttttttcttctttctttttttttttccttt

SEQ ID NO: 12936 - DNA, 591 bp, Emericella nidulans
ggggccattgacttttaagttcacggattggtactagcattcatcctgtcaatcgtgattggcgggttgatccagctgtttcagcatccacatgctttgtgcacttccacaactgtctagctctttgtggtttgggctttagttgtgccacaaatctgtctctcagttttatgttttacaacagaatagagctttttgacagcccttgtagaggtcaatattgacagctgtgggctaggagtcaacccacaccttgcgtctctaatcatctcgacatgttctcagccgctgagcagcctttcgaattacgtggatctttcatccgcataggcttaggacaaacaactacattgttcaggacttattaactctcatatatgtttattgtcaccctacttaggtcctcatcgtcgacacaaaagttgacgggtttgccactttactggcgacaccattttattgggcaagttcttaattcaggtcattagcttaatggctttctaaatgaacggaggaaagactactattttgtactactttctaccgtccccatctggcgcatgccgtcacatgtttttaagagacattatt

SEQ ID NO: 12937 - DNA, 584 bp, Emericella nidulans
  unsure (1)..(584): unsure at all n locations
tcatatctcctctctcttnttctttttcattcttctatttttacaattctattctcttcatctatatcattttttatcttctctctttcctatttctttttttcntaaccctcggtcctatctattttttttatcttttctttttgtttttttttttttatttttactctttttttccgtatttttcttttttttttttttatttttttttttcttttcttttttttttttttctttttttcttttttttttttttttattttttttttttcttttcttattttttttctctttttttttttttttttttcttttttttttttttttttttttttttcattttttttttttttttttttttttttctttttttttttttcttttttttttttttttttttttttcttattttttttttctattttttttattctttttattttttttttatctttttttttttttttttttttttttttttatttctcttttttctattttctaattttattctcgtattatatattccatatttttctttcctcttttatccttcaatgtttctctctctttattctctatac

SEQ ID NO: 12938 - DNA, 636 bp, Emericella nidulans
  unsure (1)..(636): unsure at all n locations
acgttccagaacctgtgctctattggctttctaatggctgtcgtatgcgccgatgaggtcggcgtatccaacgttgactcaactaaccaggggacgccaaccccatctaccgctctcgagaattgggtcgttagatgtagccggccacgtcgagacaaagtcccgcagacaaggatataatctagcagaaagctgtctcagatagtgatctcgtctaccgattccctgggatctgggactgcaagcttgaacggcaaacgtctgacgggtgtgcagactccgtatcgttccgatcatgacaggcccagacacggacactaaggagaggataagcttggcgagcaggccaatagcctgtatgatcgctattaggaccccggatggttagtggcgctactgtaaaatacagaaatgggaggccttaccgcagcagtgctgaccgatcaatttgtatggggcccgagaaattgctcaccaagaccacgggagngggatcagggcgctaaaagggaaactgttgagagcggatagttttgggttatccggataacgagtctcttgtccttgatgatggagcgtgatcttgggagttgagaacaatgccacttttgttagggaaaagggaggaacagaggg

SEQ ID NO: 12939 - DNA, 549 bp, Emericella nidulans
tacgagaacgaatttgacgatcctatcatgccactccgagggcaacctcactgtccccaccacaacaatgtgttcgaagcttaagatgacgcttatactcgcgcaaaaagtacacgctggaatccaatgaagtgccacataaacaactagttagaacggatgccctcgcttgagctcgtcgcgttcacagtgccaaagcctactgtgaacaacaggacctgagcacccttaacactaccactgctgactatatagacctagaacatgctcaatagagaagccctgccacgataagcaaaggaccatattagcccgctgaataagagagatgttagttttactaagagtaagagaagccagactgctgtcggctgagtaaaacagcgtcagcgataagcccccggcaagccgccagaaccacatatactccgtgactgctgctacctaagccacgtctttaattggaacggactggccggctcagactcatgattaatggcgtgtgtatatatgggggcggaaaccatcatccgatgatgaaccaaacgc

SEQ ID NO: 12940 - DNA, 490 bp, Emericella nidulans
ggaatcaaccctccccgcggcctagcaggaaattccccccccccctcctctcctactctcccctcccccccccacacttccttctcccccccccccctccacccccccccccctcccgtcctcccccccctcccccccccccctccccgcccccccccctccccccccccccccccacccccctccccccccccccccccccccccctcccccccccccccctccccccccccccccccccccccctccccccctctcccccccccccccccccccccccccccccccccctcccccccccccccctcttcccccccccccccccccccccccccccccctccccccctcccccccccccccccacccaccccccccccgccctccccccctccccctcccccccctccccccctccccccctccttcccctcccccccacgacctcgccacccccccccctcccctccccccccctcaaccaccaccct

SEQ ID NO: 12941 - DNA, 537 bp, Emericella nidulans
ctatccccgcgcgagggaatctacagtagcctgctggttttgtcacgtcccattttttgccctagggtctctccttactaatggagcgggttgttgtcaaaagaatgctccctgaggactacacagcggcctggagacccgatagtcctctgagactaatgtggcagccgtgaggaaagtctgaacaggcctagtaaggccactatgccaggatggcgactctagctcaagagaggtctagtacgcttgggtgcctatcactgggcccacgagggctgaagcgaaacttgttctgaagttagcaggaccccctttgcccagtcccaccatcctaagcttgacatatcagaggaaatctacgctaacaggatcagggctactatccccgggtgcatgatttcaggaccttgcatgctagctagccggcaagtcagcattcctcgcagtgggtaataccgctttatttaacctgcctatgttgaacatcgctgcatagggaacatggagaacaatcctcccatggcccctaacggacct

SEQ ID NO: 12942 - DNA, 680 bp, Emericella nidulans
caatgttcgtgctaagcgcgacgggcttttgcagagacttctaagatgtgtcacgaagatccatttattcttcgatttcttgttttctttctttactttcttatacgaacacgttcgcccaatgactgcaaccgaaccccaacccccaaacagattgcgacctcaactcttctcgataagtgaaagtaaaaggggtatatagtacataatcattcactcgtcagcagatattgactttagtagctgcattttttcaagaatcaatttggaaaattgcagcacggtggctgtatcaagaggatgagctcggccacagaggatgaagacaggagaaggttctgcgctggatacctaccaggcctacattagaatgacacaagaactgctagttaggttgacatcagtcgtgggttgggctgggtatgtagatacacaggctggaagacctaacggaggtgattctacccaagtccaggcaagtaaataggttcgtaattcccagaccatgacccttaagtacggaataaaaagcactataacaatatttaagtaatccaagagattcaggcgactgaagatgtcgaaaatcacgaactcaacacctataatcatcattgcatgctacccaaaccccacgatccaatatccgttcgttcattagcaaggcacgtcagtctagt

SEQ ID NO: 12943 - DNA, 276 bp, Emericella nidulans
tctggcacagacgttcacttctacgaggggtcaattcccgttaatgagtcagtggcagtagacagatgggagatcagatggaaaaacctatcctatgattctacggacggatgtaccaccatgagccagcaagactccttagagctaccctgataggatgaccggacatagaagagaccggctgtgactaagagacagacttattacttgctcgactgaccagctcttgtcgtgagagcgctacccagctctcactatggcctgacgtcgatcgca

SEQ ID NO: 12944 - DNA, 320 bp, Emericella nidulans
ggtttatcccgctttggcgtgacttgaactcaacctctgtccgttgcggataacgccaggtacacacttgatctcaggaaccgagtgcgttgaatgagcgtagacacgggagactcgatgagaggggtgcaacttcgcatcatcacgctcactacgcgccttttcacccacagatcgtactgtgcaatgagtactatgctctgctaagtatgcgcgtacaccgtgttcatgggatcaatatgaacgagccagtttttcctggatgcgaacgcataggggtgtcttcatcgctgtagacgagattgttcttgttcagtcga

SEQ ID NO: 12945 - DNA, 656 bp, Emericella nidulans
  unsure (1)..(656): unsure at all n locations
gagggaaaaaaattntgaaaanntttaaaaaaaaaaaatttttaaaaanaagaaanaaagaaaanattaaaaaagaggatttaaaaaaaaaaaaaaaaattatttaaaaaatatataaaattaaaaaaaaaataataataaagaaagaaaaaaaaaaaaaaaataaaaaaaaattaaaaaattaaaaattgttaaaaataaaaaaaaaaaaatgaaataaaaaaactaaataaaaacaaataaaaaaaaaaaaaaaaaaaaagaaaaaaaaacagaaaaaaataaacaaaaaccaacaaccaaaaaaaaatcacaaaaattcaaaaaaaaaaaaaaccaaaaaataataaaaacaaaaaaataaaaaaaaagaaacaaaaacatacaaaataaaaaaaaaaaaaacaaaaataaaaaccacaaacataatacaaaacaaaacaaaaaaatacaaaaagaaaaacttaaataaaatcctaaataaaattatataacaaactcctaatcccattaaaacaaaaaaaaagaccaacttacaaaaaatataatcaaaaatctaacaataaatataaaaaaaaatactaaaacattaacacagaaaaaaaaataaagacaccttaaataattaaaaaaaactaaaaactcaaaaaaaaaaa

SEQ ID NO: 12946 - DNA, 479 bp, Emericella nidulans
ccacaatcttaccctagtcgcgcgatgatgataacctcatccttatatgctcataataacgtatcctgtaagcgagtgggctgtgttagttagcggcccaccacggtgtcccacataaaagggtggatgcagctaatatgttaacaacacggaggttgcaaggggtattctgaagctgagatagagtctgggctgttggaatgacatgcagccaacttgcaagctcaggagccgtaagcggtaggttggacattgtaaagaagatgaatgacagaactacaggcggggttgaaacgagccagtactgtacttggtatagagggagaaagattgtaatcgtaaatagaggcggcttcagagagaggggatgggtacttagacacttctgaaccaagttcgacgagaaatagctccgtatgacaatggatcaactggtggctgctgtaatacctcactgggagacctgtatgaacccgtac

SEQ ID NO: 12947 - DNA, 946 bp, Emericella nidulans
  unsure (1)..(946): unsure at all n locations
aaaaaacaaaaaaaaaaaacaaaacgaaacncaaaacaaatacaccaaaaaaaaagaaaaaaacaaaatcaaaaacaaaacaaaactaaataacagncccgggcgaagccggggacaaaaaanannaaccccaaccncaatacttggtaaagatcaacagagggnnggaaaaaaaaagggaanaaaaaacaaaaattaaaccacccaataaaaaacaacacccccccaccccccggggcgaaaaaaattgaaaaaaaaaaaaaacatnaaaaacccccgaaacaaaccaccaataaaaaaaaacacaacaaacaaaaaaacaaaaaaagaaaaaaacaaacaacaagaaaaaaaaaacaaaaaaaacaaaacacaaaaaaaaacaactacaacaaaaaccaaaacaacaaaaaacaaaaaaacaaaagacaacaaaaaaaacaaaaaaaaaaaaaaacaaacaaaaacaaaaaaaccaacaccaaaaaaaaaaaacaaaaaccaaaaacacaaaacaaaaaaacgtacaaaacacaacaaaaaacaaaacagataaacaaacaacaaacaaacaaaaaaccaacaccacacaaaaaccaaacaaaaaaaaagaataaaaaacaaaaaaaaataaacacaaaaaaatacaaacacaaaagacaacaacaaaaaagacaaaaaaccacaaaaaaacaacaaaaaaaaacacataaagaacacaaaaacaaaaaaaaaaaaacatacaaaaaaccgaaacaaaagacacaaacaaacaaaaacaacaccaagaacaagaaaaaacaaacaacacgaataaaaacacaaccaaaaaccgacacaaataacaaaatgcaacaaaaacacaccagaaaaaagaaaaaaaacaaccaaaaaaaaacataaacacaaacaacaacaaccacaaaacaaaaataggaaacaaaaa

SEQ ID NO: 12948 - DNA, 149 bp, Emericella nidulans
gattccacacttgactcgctctacttatatcttcccatgtggagtcgtcccatcaactgggactgtcgggctgattgtctcgtacatctacactaactgcgctaatcatccagaccctcatctacccggctctggcactctggcttggt

SEQ ID NO: 12949 - DNA, 615 bp, Emericella nidulans
gcagcacacgcaacagaacacccccccatggggacccgagcttagacacaatttggtccatagcaaaggaaggcgaacacccccggagtccattgtgtattgggtgcagccaaacacgactaaggctgaccccattcacccgggcgtgcgcagcgcgccacacatgagttcggccaatgcaagagtagtacgtaggcgcttgacttactcaacgccttgacggagaaccgaccctcaaaaggctgagatgaagcgctaagtcgatcaatacacctaagctagtggactacggagcccactctcatgaggcagggattcacactatatacaataccttgagtaatccgcggggaacgttggaaaacgactcaactcgccaattgacgttctgtgatctcgcgagagggaatcggcgagcctatctacagctgagtgatgcaatcgcttaatccacacgatgcgacctgatgccagacaaacccccacggtatggcgatatacctgtcctactatgtagcatatatcgaataaacaacgcttactttagaagccttatccggagttggggggcttttgtaacagcccacacaagtagccagtgggcccggacccaat

SEQ ID NO: 12950 - DNA, 119 bp, Emericella nidulans
aactgactgcatccgagatgtctatatccagttaatacatgactacctcatacactgaggccctggacagtgcccactacggagtcatactcggacagtgaatagctgcgccgaatcga

SEQ ID NO: 12951 - DNA, 147 bp, Emericella nidulans
tagactgcaaagtatccaggatcgacgtcacactgggaacgaccagccaagtgagctgttcagagcctagcggtagcaacagatcaatgatgctctggttcgtacaggaccaagcgtagccaacagggctggtcggatgtggatgtc

SEQ ID NO: 12952 - DNA, 690 bp, Emericella nidulans
  unsure (1)..(690): unsure at all n locations
ataacgggcctgtgctggctatgactctcgcgctcgggagaccacgtcgcctcccgcagcgaacattctcttctgtgaatagaatatatcctggagaggtgggatgaaccaagccaacgcacggccaagatagtagccagggggagcgaagtgcttgagcagatgcgcaaggtctcccatccgccgttctagcataagaacgaagggttccttgacacctttggcgacgatgcctgcgccaccgccgaacgtaagctggcagactatttcgttggccatgagagtccaccaccccatgatctcggcctcgccctttacggcgtcgcatttgatcttctccacggtcagcttgatgatatcccggacctttggctcccactcgtttcgtaagctctgcagcgtgaaaccccgggcgtaaagtttacgacgcgccgcatggagntttggatcccgaaagttgaagatattgtctaccggccctggtgatagaagctcatagaagggagctttcatgaagccagatcccatgcggtggatctcgcgtcctgccacaggatctgccacgtcgattcttgaggtccgttccgacgatgggccatactctggggcagctattgactagtggattcattgttggcaagacgaccagacagcccagcctggcaacaccatccagggacctgaaatgtt

SEQ ID NO: 12953 - DNA, 720 bp, Emericella nidulans
  unsure (1)..(720): unsure at all n locations
aaaaaaaaanatagaaaanagaaagaaaaaaaaaagaaagagaaaaaaaaaaaaaaaaanaaatatataaaaatataaaaaaaaaataaatataaataaataaaaaaaaaataaaaaaaataaaaattaaaaaaaaaaataataaaaaaattaaatataaaatgaaaaaaaaaaaaaaataaaaaaaaaataataaaaataaaataaaaataataataataaaaaataaaaaataantaataaaatataaaaaaaaataaaaaataaaaaataattatttaattaataaaatataaaaaaaataaaaataaatataaaaanaaaataaataaaaaataaaattaaaaataaatatattaaaaataaattatataaaataataattaataaataaatatataaataaaaaaaaaaataaaaaatttttatanntttatataagaaatataaatataaaaaataagaaataatgttatattaaaaaataataaaaaaaaaaaaaaaataataaaaaataaaataataaaataaataaatatataaaaatgataaaaaaaatataaagtaaaataataaaaaaaaaatataaataaataataacaaaaaaaaaaataaaatataaaaaaaaaaacaaataataaaaaaaataaaaaaaatataatataaaattataaaaaattaaatatacaaaaataaatataaataaaataaaaaataata

SEQ ID NO: 12954 - DNA, 903 bp, Emericella nidulans
cgtgatggcttacttcggagtggtacagaggacaagcttaacttttttacgcctgcggtcaacgtcttgatatcttcttctatctcagatatgtgtgctcgcattctggaagtcatgtctgagtctcaaatagacagcacggcacttaactctaatacagcagaagttagggttggccggaccgctgacgtggggagtgacgattagccccaggaagcctggactaaactgactgataacgcaatcccccaagctattagacacagattaaagcacctgatttgttgccgtagtcgaggccaatctactggagacagaaccctgccggcacagccacggggaaggcccacaacggctcatgctcatattcagggtctttgccctcattccgcacgatacgaagtatcctcgtatctctaagatcgagctgattgtcctatgtaccatttagaatagagcagaactacgcacgagtctttgtcagatacctttacaagccagtaaagccctgctgctcgagtctcgcttctcgagtcctgcttctcaagtcctgcttctctttcgtgcagatttgcgtatcactgcagctgttagaatagatagtccgtcgagacagagatattgttctcacgcggaaggatcagacaatctagttcattcgaacccggcaaccgaccagttggttggggccgtcgccgaatggatgcgacccactttaagcaaccgtcgggccaaagggctgtgtgaactgactccccttcaagttttctgcaaccattcaggaagcgtagaaaattggggagcactacataggctaactgtcaacgcttatttctattgtcacaacttgggcattagacccccctgccactaactggatggtcgtcaaggggtttactttga

SEQ ID NO: 12955 - DNA, 888 bp, Emericella nidulans
  unsure (1)..(888): unsure at all n locations
agaagaggggaagaaaaagaaaaaaggagaaaaaaagaagaaaagaaaagaaaagagaagaggaaaaaaaaaagaaagaaagaaacaataaaaaaaggggaggggggacatatgggaaaacnagaagaaggtgagggggaaaaaccgagaaagagagaaaaaaaaaaaaacgcgcaaagaaaaaaaaaagaagattagaacccaaaaagaacagaaaggaagaagagggggggaaaaaaaaaaaaggaaaaaaagaagaaaaaaaaaaaaaaagaaaagaaagggggaagaataaaaaaaaagaaagaagggggaagaacacaaaagaaaagaaaaaaagagagaaaaaagaaaaagaaagaaaaaaaaaaaaagaagagaagaaaaaaaaaagagaaacgaagaaaaaggaaaaaaaaagaaaacaagaaaaaaagaagaggaaagaagaaaaaaggaagaagaaagggaagaacaaagagaaagaaaaaaaaagaaggaaaagaaacaaagaaaaaaaaaaaaaggagaaacaagaaaaaccgaaaaaaaaggaaagcgaaaaaagacgaccgagaaagagaaagagaaagagaaaaaaaagaaaagaaaagagaaagggaagaaaaagagaaaaaagaagaagaggaaaaaaaaaaaaagaaaagaaaaggaacagaaagaaagaaaaagaagaggaaaacacaacgaagaaaaaaaaaaagaagacgaaggaaagagaagaaaaaaagaaaaaaaaaaaaaggaagaaaaaagggaagagaggaagaaagaagaagaaagaaaaaaagggaaagagaaggaaaggcaaaaggaaggaacaagagaaaaaagaagaaaaagaagaaaagaaagaaaaaaaaaaaa

SEQ ID NO: 12956 - DNA, 930 bp, Emericella nidulans
  unsure (1)..(930): unsure at all n locations
caaacaaacaacacaaataacataaaaaaacaaaaaaaacaaaactcttcacaagataacaaaatatagaaaatatacaacaacaacataaaaataaataaaatattaactaacctctaacacaggcagatagcaagttattggcaaaaaacaaccgccgaananaaacaccaaaaattaacaaaaataaaaattttactaaacaaaacaatttttttttaaacaacccaaaacaaaaaaaaaatacaaaaaggggggaaaatataaaaaaaaaaaacaggggagaaaaaaaaaaaaaaactaaaaaaaaaaacgaaatacaaaaaaaaataataaaataaaaaaaaaaaaactaaatgtaataaaaaatataacacaaaaacaatatataataaataacaaaaaaacaaaaaaacatcaaaagaatacaatacaacataacaacaataagaacacgaatgacaaaaaattaaagactaataaagaaaaaaaaaaaaaaaataaagaaaaaaagaacataaagaaaaataaaaagatacacaaaaaaaagggaaaaaaagtgaactaaaaaaaaaggaagcaccaaaaactacgcagcgaaaaatataagaaaaaaaaaataaaataaacaaaaataaaaaaagaactaaaacaataaaaacaaaatagacaaaaaaaaaaacacaaaaataaaaaacaaaaaaaaaactaaacataacaagaacaaaaaacaataaaaaaaaaaaaataaaataaacaacataagaaaacaaaaaaatacaacaaacaaaaaaaaaataaaaaaaaaaaaacaaaaataataaacaaaaaaaaaaaaaaaaaataagatacaaaacaaaaacaaactaaaaaaaaaaaacaaaaaaaaaaaaaaaaaaaaaaaaaacataaaaaagcaaaagaacgaaa

SEQ ID NO: 12957 - DNA, 784 bp, Emericella nidulans
agccccagcagcccaagaacgagaagaggaagacaaaccggaagggggaaggaagaaaaacaaagaaacggaacccagagggggcgaacgaaagcgaagcgagagggggaaaagggaacgaacggaaccgaggagaaaagaaaagaaaacaaggcatggaaggagaaaggggaaagagaacggaaaaggaaaaagaaaaacaaccaccacacgcaaaatgggggaagagacaagggagaagtaaagaaacaggcgcaagaagggaaaatgaggggcaggagccaagaaagagggaaccagggaaaaatcaaagctgacaaggaaagcggcgagaacctgaaaggaacaaaggaaaggcgggaagcaaagaaaagagagagggaaaggcggcaataagaaagaaaaaccaacagggaaaagaaggggagccagaaacgggacggaagcaaggaacgggacgagagaaaaaaggggaaaaagaaaaaggcggagaagcggaaaaggaagaagagggaaacggcagaagggagaaaaaaaagagggcaggaaaacgaagaaacgaaggggaaagagccaagaaggaaggggaagaaaccgaaagggggacaggcaggacagaacagagacgaaaagagaagggaagagggagcggagaggcgcgaaccagacaagaaaaaagacgacaagggagacaaaaaaggacggaaaaaggcagacaggaagaaacgggggggaaagaaaaggaaggcgagggaaaaagacgaaaaaagggagaggaaagaaa

SEQ ID NO: 12958 - DNA, 523 bp, Emericella nidulans
  unsure (1)..(523): unsure at all n locations
acaaaaaaaaacataaaacatcaaacatcttaaaaaccaaaccccttcaaaaccccacaaaaagagaaaacaaaccccaagaaactttttaaaaaaanaaaacccctttcaacaccccccacaaaaaaaataaaaaaaaacaacaaaacaaccacaaaacaacaaaaaaaaaaaacaaaaaaaaaaaaaaaacaacaacaaacaaaataaacacaaaaaaacaaccaaacaacacaaaaaaacaaaaaacaaacaaacacaaataaaacaacaaaacaaaaaaaaccaaaaaaaaacaaaaacacaaaaaaaaaaatacacaaaaacctaaaacaaaaaaaaaaaccaacacaaacaaaaaccataacaaaaacaaacaacaccaaaaaaaaaaacaaaaacacaatcaaaaaaaaaaaaaaaaccaaacaacaaaacaaaccccaaaaccacacaaaaacccaaactccaacaaaaaaacacaaaaacaaaccaacccccaaaaaacacaacaaaaacaaca

SEQ ID NO: 12959 - DNA, 562 bp, Emericella nidulans
atactactatccagtccgtacgcgtccgtggtcaaaacagtacaggtgaggactttttttttttttttcttttttttttttttttcagtgaccacacaggggtttttttaggcaccacccggctttgcggcaattcgaatggaaaatgtctgccctcatttttcttacttggttcctgattgaagtccgctccagcttctccgtctactttgtcatatacttctcttctcgtgatgctactttgtcctacatccccaactcattatttaattatcacactcatattcttctttcttcctttttctccactctttactctcatatccttctttcccttcctacttcctcttcttatatcatatccttatattttttattcctctttttattatcacatctcttccttcctcttctcttctccctctcttttcctatatacatcattcctctttatattcatctactcctcttctcttctctcctttctattctttataagtatcttgctccattctccctccattcttctctttttcttctactcctccttcaatacttcatc

SEQ ID NO: 12960 - DNA, 582 bp, Emericella nidulans
cgaaatattggaggttaacggcgaagagtgccgttagaggaatcatggggaagggaaaggggcttccataataccccgacaaccacacccccacaccctatgacataacgggactagctcccaccacatccccacgacgctaccaaaaccccccaacaggccgccccccaccccgaccaaacagctcccccaccgcacccgcaacgccccacataaccccaccaccccaccaccactcaccccaacaccaccccactaccccgaaccccaaacaccccccccccacccccacaaccccacccaaccaaccccacccacccacaaacccaaaccccccaacacacccccccaccacctcaccctccataccccacccaaaacccaccaccaaccaccccccaaccacccacaccccacccaccccacccaaccaccacacacccacaccccaacacacacaaccaatcacaccaacccaaaccccccccaccacacatcccccaatcccacacaccacccaccaaaccacacacacccaccaccaccctcacacccacatcaccacatccccccccaaccccc

SEQ ID NO: 12961 - DNA, 162 bp, Emericella nidulans
gggacaggctcgctcgctacttaggtaggccgagacggagccttgtagctcacggtccagattctcacctccacgatggggtcgatcgccacgaacgcagccgtgagcttggacatacaagagattgcatatcctcgtcacgtacagactttggacgtccgt

SEQ ID NO: 12962 - DNA, 476 bp, Emericella nidulans
gtgtactttttggaggtcacggtcatgctggcccgcttctagtagcaagatacgcacagcccgtgctcttttgccagacaggacggcaacgacgcatgctgaggtcctgccaatgactgtgtcttctgcactgccatcataacaaggttaggaacgtgtagatctaaggtacaaccgcgacacgatgtactgaatgaggtctgagccgtaaagcactgacacccatgtttgcacagacttcctacgacatgacgtattatgaaatacccaacccccaacaggggagtttcgcacagccttgaagcgcacaggaaggataggcatgagctcggaatgctgaccacccagtgagttcacggttcggcagcgtccggaaatccgactgtccgtatcgttaccatggtgcgtacatcgaccgaaccggggcttacaattccaattaagggtgctgaaacatcgatcgatcccccgctcgc

SEQ ID NO: 12963 - DNA, 687 bp, Emericella nidulans
catgcatcgcggacgataattgctgctatggaaataagtgcgttgaagggctttgtgtacgtggttaaatgggtagctgtgttgttgcgctgccatggttttcctataggggttgctcgtctcagtagttgttgccaatccaagcatatcttactacctttggttatctgaacatgcctttgcttgagctggccgttgtgggaaggtcgactgcatgaatgcagcctgtattccagcaaatgattgggcaccatatatctgcactgttgaacagaacatatcctttgactgtcctcgcaacgcaatgagcatctaggctttgtagccctttattcggataatggaagcaaatgtgatatcatgactcttccagctgataatcttatggagtaggaaagaaacaagtccctgaaatcatggtatggactgtcgggcatggcgtcccgttacaaaattgaacttgggtataacgtaagagaggaatgattagagaaacggtgacttgccagttccatgcacctgaaagacagtcaaagcaagctaggtctaggggcaattttgccctcaccactcctgcaacttgtctagatagagcttaaagttctagccacttgcaaaccaaatgaacttgctacttgatgcaaaagacccgcactcaccgactactgtaggggtaaaggctgctgg

SEQ ID NO: 12964 - DNA, 851 bp, Emericella nidulans
accacggtccgggtggcacggcgatatgccaagccgtgaatccggtcagaactagcccaatgtttcctccgagaatcgacaacaacacgacgggcaccggtagtataccgtgggtataccgtgtgtcattaaaaacctccgtccagatccagattgctgagacaccaaaatcaacccagcaaaacagcgacgtgtaaatgaggaaaagcagaaacgctttgtagttgcgtagcccaacgcaagtcgccagccacggacaatgatggtccatcttcagcacacactcgttgcacgtggagcagtgatgcgcccggtccggcttcggacattggcatttcttgcaaaaccgcgaccccccggtaggagtgacggtgtaagaagtatattcgggtaacttggtaatcggtaacgcactgaatgggagacccccaccactgggcgcactaaaagggggaccgggatctgtgaagaccggcggtgttaagaaaaggtgagggcttgtagaggaccacccccagatcaactggggagttccgaaaagggagcctgagttgagtaaacggttcgagactgcacaacaaccttttcagaactctggttgggttaaacccaagctggtttacgtcaccggccggtgggaactgggaccaacccccaggaaggaatttggggcaaagaataccttgaaagtagggcctgtttggtgggttttgcagttggaccaggtgtgcaggcaagggcctaccgtttttttaactcgcctttggggggacctgcaaaacttaagggggtttttgggtcttgttcaatttggggttccggacttaatttttttaataggcgtaaaagct

SEQ ID NO: 12965 - DNA, 936 bp, Emericella nidulans
  unsure (1)..(936): unsure at all n locations
aaaagaaaaataaaaataagaaatatgagaaaatgaaacacaacataactattcatacagaaaaacggaagaaagaaaaaataaaaacagaaaaatgagaaaaggagtgtaatnaagaaaaaagagtagcacaggaggaaattatganaaaaaacaccggggggaaaaaaaaaaaaaacaaacaaaaaaaaaaataaaaaaacaaaccaatttattaaaaagagaagacaaaaaaaaggaataaacggggggggggtaaaaaaaaaaagaaatagggggggggaaaaaaaaaaaaaaaataaacgaaaaggaaaagagaaagaaaaaaagagaaaaaaaaaaaaaaaaaaagagaatgaaagaaacaaagaaaaaagaaagaaagagagacgaaacaaaaaaaagagaaaaagagaaaaaaaacaaataaaaaagaaaacgaaaaacgaagaaaacaataaaaaggaaaaagaacaaaaagaaaaaaaaagataaaaagataaaaaagaacagagaaaaaggaaaaaaaaaaaaagagaaaagaagaatgaaaaaaaaatgaaaanagaaaaaagaagaaaagaaagagaaggcaagaaaagaaaataaaaagaaaaaaaacaaaacaagaagaaaagaaaaacggaacaaacagaaaaagaaaaaagagataaaaaaaaaagaaagacaaagaaaataaacagaaaaacaataaatacaagaaaaaaaaaacaatagaaaagagaaaaaaaaacaaaaaggaaaaaagaaaaagaaagaaaaagagaaagaaggaaaataagtgagaaagaaaaaagaaaaaaaagaaaaagaaaaacaaagaaagaaaactagaaagaacaagaaagagaaaagcgagaaaccaaacaagaaacacatagaaaacaagagaaataaagaaaaggaggataaaac

SEQ ID NO: 12966 - DNA, 274 bp, Emericella nidulans
tgcccactactccgcggggggagactggcatggccgtcgcaacccatgctggtcccttttgtttcgttcagagggccctgaaaaacaaccgcgggcttataaagatatgtccagcggtgcaccaactcaatatctcgggtggcctcagctgcacgaccggtactaacagagctcggtatacttgctgaggaaccgaacaaaggaacaccaagagtctgtgatcatgcaagtacacagcataagaatctgtatcgtgcttgacgtacagactcat

SEQ ID NO: 12967 - DNA, 552 bp, Emericella nidulans
agttgccagcatacatgctttctaggcgcccaataaatcatctacggaccgtgtcttgcggggtctttaactttcttggcttaccgcactttttgctacaaatataaacagggttggttaaattacccagacaaaggaatatgtcgggcgcaatcaaggcatacggggccaacaatattcccttggcagaagggtttggtgtggtaggagaaaacaatccaccgggacacctgctcgtcccggggaccagcgtggtagaagcctgatcgggaatggccccttttactcctcacaatttgagccgtttaccaatttttgcagttgatcttcctgcgaccgagtgaaacacccaggagcgaacctgttgggtgaatcttagaaaacaagcccttggctgagggcttgccaacatgaccatggcaacttactatgagcatttgggggtaccttttaactggtattgaaagaacacccaaactgaggtaaagataattcctcggaggcacggtaattcttctttaacatggctcctgatctgtttgattgaggggc

SEQ ID NO: 12968 - DNA, 815 bp, Emericella nidulans
ggcatctcctttgcaagcactgcgcgggcaggggatcccgcctgaggtctccggcctcacggccgagttgttcatggtgggcgtctgctctatcagggtgtatgctgttttcgttttggctgggtgatatgcttgcgccgcaggagccgatcagggaggccttgggcatctcgagctcgcagctaccgtggattgtaggagccttcaacacggcgaatgggctgtctgttgttgtttcaggttctctggcggatctggcaccgccgaaaatgcttatggtgagcgcatatgcgtggctggcggtgtggaatgctgtcggtgcgttctcactcaaccatgagcgttatatcctcttctttgtcgtgagggctatgcaaggtctcgcgattggagttctagtctcggggagatgaagtgtgctgggacttttttataattcaggaattcgcaagaccgggtcttttttgcgatcgcacaacaggccggttgggatactgttggtgcctcgaggggggcgccttgccggcctttgaagggatttttggccaatgcttttcttggccttttgcgggtggcgggtttttaaaatccgccctttcccggggggtggttacccggggcggccaccactttcggaggtaattttttaaggctatcccgttgaggattttttcctttttcggcaaccaggccctgaatggggcccataccccgcctaaataggggttaaagtctgccttttctgggagggggcccccccttacaccccgtttggccccaattcggggggggcaatttgttgttcttttgggggg

SEQ ID NO: 12969 - DNA, 1166 bp, Emericella nidulans
ttgtacctcctccttgatttggggttcagaccctgttttgttgccccggtccttgcgctcccagtcaccattgaagggctcaatatcgtccgtgcatctgttgttacaccatcaatcaccgctgattcggagcccaggaggtccttgaagtacttcacatcttccgcagtgatctcggcgaactcggggctcctcttgagcgtgggataggcgtcgcttgtgtacttcacttccttcgttgcttgtcgtgcagatgcttgggaaaagcagcgagtggccggcacagagagttgagagacgaggggccgcccactgaggcgcggcttgggcatgcgagcccgtcgaagggcgattgagaaatttctggctccagacatagcgcgatcgttgacaataaacccagagctcggtgagaatcttcgggctgtcaaaagattcagtccgttcggagtccgctccgaaaagctcgcttattcagcgcccgctcttccccggtatcggcatgtatgagcagcatacagagatgcgcaaatccaacgaataagaacacgttaacacggcacatctctgaatcgcttagtactaagatatccgctatggcggaaccttgctcgggagcttccatattctgtggctagaacacggaaacctgggtattgagttcaggcagctaagcaagcagctatataagcagctatataagcagctatatgacccccatcttgccttctggtctacaaaactctaaggttatcctttttcatcattccctaagcgaatatgtccttgggaacaatctatacacacatgatcagctaatcttctgataatcaactctcctcaactcttcctttagcaagacacgcattggcgcgctttcagatatgaaaggatatttgaataggacgtcgaagtgtagattaagctgctgagcattgttattctccagaataggattgtatgccaacgagtccggattttgcgagttgtctacatggccttgctgtaggagaacatcgatccaatcgtttgcttaagttagacaagctcttttttgaggctcttgccaaatttctgagtcgcccagcaaactatacatagtaaccggtgttgatctggcgtaatctggtggattcttcgactagtcgattcttggacatggaggg

SEQ ID NO: 12970 - DNA, 615 bp, Emericella nidulans
ccaaaaaaaccaaaaaacaacacaaccccaaacacaaaaaaaaaatacaaaaaaaaacaaaaatacacacacatcaacaacaaaaaacacaaacatacaaaaaaaaaaacctacaaaacaaaaacaaaaaaaaaaaccaacaacacaaagacacaaaaaaccacaaacaacaaacaaacaacaacaacacacaacaccaacaaacaaaaaacacctaaacaaaacaaaaagccaaaaccatacccaacaccatacacacaaaaaaaccaaaccaccaaaaaaaaccaatcaaccaaatcaaaatcaaaaaacaaaaaaaaaccaaaaaaaaaacaaaataaacaaaacacacaataaaaaaaaacaaaacaaaaaaaaaaaaacacaaataaacaaaaacccaaaccacaaaaaacaaacacaacaacacaaaaaacccaaaacaaacacaacacaaaaaaaaaaacaaccacaaaaaaaaacaacaaaaaaccaaacacaacaaaaataacaacaaaaaaaaaaaacagccaaacaaaaacccaaataaaaaacaaaacaaaaaacaccaaaaccaaaaacaaaaaactaaaaaaaaaccacaaaaaacaaaaa

SEQ ID NO: 12971 - DNA, 585 bp, Emericella nidulans
catacacatacgatttagtgtgacactatagaatactaggatcaggctgttaaatgttagaaaaggctttttgtgttgttagggtggtggccccctactatacgttcaaactagaggcttgggtttctcatcaccaacatcatgccacccccacctccgtaccctgtttctcacactccatccaatccacatggaactattcaatgggcgaacccaaatccaacatccaatacacacagtatggctagcctatcccctttccttcctctgcatcaaccaaaaaaagaatcttacccaggtgggcttaccccaccaataacacgctcgttaaacaaacccccttcacaaccaactaaatctcacagtgccgataaccgtatttactcttcccatccaggctactataatccctaagcttgctaagcatcctgtgcctcccgcctctccccgtagttaaaaagtcatgctcccttactccttttatttcttctcccatttccccaaaacaattctttcttgtgcccctacccccgcccagaatttcaaaggggcgagcaatcctccctctcttgcccccccccattg

SEQ ID NO: 12972 - DNA, 614 bp, Emericella nidulans
tcccagttaccgacgactccatcgcatagacagaccttcttctatgagcttttgacatctgacagtcgcactgcgtcgggccaaagcaatacatgcgacctcgcgtcgcagccatggctataatttatcgtaacgcccgatctctcacggagccgctagcgacctcgagacgggcttgaccagaacacggacagacgggtcgggcacgtttccaaatccagagcggcaagcggggcgattgattcggtcggttcgagaatcggtcgactggtttcgactggccagaagtgatcactaatgcctcgccagtcatagcaagctgttgctgacagctgctgggcagcatgaatcaagacttgatggcggttcgttccgtgggtgtccgcctctgtccagaggaggcggagacttgtactgggcggttccggccaaagtaatcgctcaccccgtatctagatgatcgccgcgtagggcgcattctgggcacagtgtggcgtattttgggactcacagcaccctgcatgggttggtgtagcgtagaaacggcagcttgccgttttgtccgaggagcggctggccatgtctttgaggagggcccccattaaggcggggca

SEQ ID NO: 12973 - DNA, 583 bp, Emericella nidulans
gccagtttgtggggtatatgccccaatgcgtgccggcatctttgttctgcttggagagagaagttgttgtcgtatttaatgacggccacttgaacctgccagagggagtctttcttgcaatcaagcagggtgagcgaccacgcttcaatctcggcgatgtcctctagggttggagcagcggtttctgggtcggcatcggtgtctgaagtagggtttcgggttgcgtcagcgcggtttatctgcgtaagttagtccaatatgttcttgataaaggtgtatagtagatggacaaaccttctttaatacaccaagaatgaaggaaaacgcatacacagctaacttgtgcggtgtctcctctcgtaaccaatgcacaaccatccgtttcgccaaagtctgaagcagttccttctctggctctgagctactgatcagattgctcacccaagccctttccttcccatcggatatatcagcgatagccaccgacttttaactaaactctgcgccatccttagcagcattgctcagaaatgtgcgcgggactcgcagatgctatgtgcctcgacacctgagagggctcacg

SEQ ID NO: 12974 - DNA, 781 bp, Emericella nidulans
  unsure (1)..(781): unsure at all n locations
aaactaaaaaaaaaaaactaaaaaaaaccaaaaacataaaaaccaaaaaacaaaaaaaaaaaaaacaataaaaaaaaaaaaaaaacaannnnnaaaacagacaccccgataatnnaaaaaaccgggggaaaaaaaaaaaaaaaatatttataaaaaaaaaataaattancannnanaaaaaaaaaaagggggggataaaaaaaaaaaggggggcctaaaaaaaaaaccnccaaaataaaaaaaacacaaaaaaaaaaatcaaaaaaaaaaaacaaaaaaaaaaaaaaaaaaaaacaaaaaaaacaaaacaaaaaaaaaaaaaaaaaaaaacaaaaaaaaataaaaaaaaaaaaaaaaaagaataaacacaaaaaaagaataaaaaaaaaaaaaaaaaaaacaaaaccaaaaaaaaaaaaaaacgaaaaatacaaaaacaaaacaaacaaaaaaatgaaaccaaataaaaaaaaaacaaaaaaaaaaccaaaaaaaaaaaagaaaacacaaaagaaacaaaaacaacaacgaaacaaaaatacaacaaaaaacacaaaacaatatatcacacaataataaacaaaaaaagaagaacaaacaaaaaaatataaaaaacacaaaaacaaataaaataataaaaaccaaaagaaaaaaaaactcaaaaccaataaaaaaaaaaaaaaaacaatgataaaagaaaaaacaggaaaaaacaacaaataaaaaagtaaaaaaaaaaaaaaaaaaaaacactttaaaaacaaaaacaaaatccaaaaaa

SEQ ID NO: 12975 - DNA, 124 bp, Emericella nidulans
aaaaaaatctagaaaaaacagcaaataaaaacaaaagaaaaaaaaaaaaaaaaaaaaaaaaacaagaagaatatatagaaaataaataaacaaaaaaaaacataaaaaattgtacaaggaaccc

SEQ ID NO: 12976 - DNA, 638 bp, Emericella nidulans
aacagtgcagcgttttggatgagcaccattggtggttatcttgaacgttgggttttgcttcgccttcttcgtcatcgtttccttctttgtccgagtcagagaatccttcccactcgtccgcctcgtagtctttccgagctttcttcgctcgcaacttcgagtccttgtcttctttgcgttcctgatactgctcatataacgagtcaagttctctctccaaccgatccccctcatcatcgctatcatcgaattccgtttcggactcggactcttcgctttcgctctcaatgacaggcaattccttgcctgatgccctggcagcgggcgcaccggccttttgaaggcgcttgagagaaaatgtagcattctccccttcgggaacccaattgcttctttccacaattcctaaggagttgtgatgtgcattctgaattcgaaccaaacttttttggcgtatcccttaatatttccatgggcccctttcccttttatattttaagaccttttctttttcttaataacggggaaaatttttcttgtgttgtgccggttttctttcatatagggcacactttggggacccctttggggttataaatcactgggttgtggcctctttactcccaggccaaaatttt

SEQ ID NO: 12977 - DNA, 555 bp, Emericella nidulans
gcctatgctcgggtgtatcaggggcacaatcgtgtcagaagtgctacagtacacaccgggcgagactcaacaaattgcaagaggaccttctgcagcacgtaagccatgaactgcggtcccttttgcattgcaaggtgcgcaatacccagtagctacaatacaccaaccttgaccgcactcagcatgaaatgggcgacgaacataagacgtgtctacagacctctgtggcgacggggggccagctgtccgtgcgtaccattgccctgttacatcgggatgacctaacgctaatttcgcactcgccgtggcaagccgatttccagaccctcgacgctggaatggcaagtaatcgccgcaaacacggtctttgacttcctgtttggccgacacaaattaacggaggtcgtgagcagcgccactaccgggtttacctatttgtgtaaagatccgtaatttcccgcaatgaaatgactgaacccctcattttgagggaagcggtatcataccttcttatatgcccttagcctatgaactaaatctatggaaatctttctg

SEQ ID NO: 12978 - DNA, 565 bp, Emericella nidulans
cccccgcccagcccccccccccccccgcccagccccccccccccccccccccccccccccgccccccccccccccccggcccaccccccccccccccccccccccccccccccccccccccccttcccttccccccccccccccccccccccccccccccacccccccccccccccccccccccccccccccccccccccccccccccccccccccccccccgcgccccccccccccccgcccccccccccccccccccccccccccccccccccccccccccgccccccccccccccccccccccccccccccccccccccccccccccccccccccccccccccccccccccccccccccccccccccccccccccccccctcccccccccccccccccccccccccccccccccccccccgccccccccccccccccctccccccccccccccccccccccccccccccccccccccccccccccccccccccccccccccccccccccccccctccccccccccccccccccccccccccccccccccccccacccccccc

SEQ ID NO: 12979 - DNA, 109 bp, Emericella nidulans
tccttatcaggcccggctgtgtgtttcttattacagtagaggcttgtttcgacagggtcctgttctcgaccggtctcctcccaagtgccaggccccgatgatgttccct

SEQ ID NO: 12980 - DNA, 828 bp, Emericella nidulans
ccattatcatttaggctgggcgcacgggttacctgttgcacataaaaacgcccactcactcgggttttttaggaaagatcccaatcttgcctgggaggggttttttagacgctgccgctatgaatactgactacgatttcacggctgacaccgtttctttgacgcatggctactctgctgctctccttttcatgctcgcaaccctctacctccggtccaaattcaccgtggcgaccgacatcccgcatgtcacgaaccttcccatgatgccaggtgctctccccatctttgggcaccttattaaactcggtggagaccatgctaccgtctgacaagtggtggcgggagttcagacactctgaattcacactatggctggccaacactcccattgtgatcgtgaaatccttcgatcactgcctcaagatgctactgagccaccataacgcactcatcgatcgtccaaaacttacacatgttactgtgtaatctcaccacctagggtacacgatgacttatcaccgtgggactagccatgcattaagaagcaccaggcccaggagacaggacttcgacaacagttgtcggaactaccaccacgctagttccatctgagagttgcgatttacggatctattctgacattacatgtgagccacgtcctcaagacccttgagtgggcccctaccataatgaatttgctcgtttcgcaggtgggtccctatttttcttattctgacctgatggaatcttcctccaacattaaactcggttatggtttccttggcccccagaaagggcttataaaccttagggtttttttttttt

SEQ ID NO: 12981 - DNA, 509 bp, Emericella nidulans
cattttctacctcttgaatttcataaacttgcagtgtatgaagaaacactttacatttttctccccacttgctttgttcagaaaaataaaagtaattaggtttattgaagtgtcattaaaaagataaaacattgtacctaggtatttgcatttatttcaaatcttttctaagtggcatattagtttgattataaatctatgagggattgttttgctttgtattgtaatgaatttttagaaatttaaattgtgtactcttacaaaagataggagagcatattgtcagcaaggaagatgtacttgaatcttctccacccactgtccagagcactcttcgttttctaagatcaacatataaccagggatgaagcagggtaagggattgctttattctacctgttctggtccaaacccacactaggtctctaatcttactattttggaatgtcaaagaacacagcagtcaggaagaaggtgtaagtacaagacaatagtagccagaggagaaa

SEQ ID NO: 12982 - DNA, 904 bp, Emericella nidulans
  unsure (1)..(904): unsure at all n locations
cttaagatcgcggccgaattaaccctactaaagggatcctcccgctctcacgttcagatatcgcacaggctgtagaatgcatccagaccgtctttgccgatgatcctttcttccagtacatgtttgaccagaacaccgtaagtcgtgcactctcctcagggaatcctccttatcagcatgtgattatcacacttataatgttgttgatatcgataatgatgacgatgttgatgatgatcatgataataatggagacagtataacatcgcccgcaatgcagcctccctctcggcacacttcctgcacggactagctatccacgcccccatctacgtcgccaaagcaacagccaaagcagcagcctcagatcgagcctcagatcggatcgtcggggtctgctggtggcatccgcccacgcccgcgggcgtccccgcgcccctggcccatcgcacccaggatctcttactctcagtgcgccagctccttttcaatatccggtaccgcggccgcggcgggcttcgactagaccgctaccggcagtggaaagctcttgaggcacagaaacatcgcaggatctggaccgatccacgcggctactacttttgcatgtgatcgccgtccgcgccgaaatgcgtggacttgggtctcggccgccgttggtcgagtcgncactgaaagagcagacaaggagggaatgccctgttacttgagagctcgangggatgccaaacctgcgacttataaaaactcggttttggtggtcgcgaaaattgagtgtgatggatgagtatgatcttattntcccttatcttttattgaagggtgcgtaccatggacattattattatcttattttaccccatanttttcttttttttatttctgtgtagccttccctcttctt

SEQ ID NO: 12983 - DNA, 919 bp, Emericella nidulans
  unsure (1)..(919): unsure at all n locations
gtcctcaatacgattatgagggggctagctcccccaaggacaaggtgcttgagcgccggcttcaacgatttgttgatgcnaattattgactttcttctgatccatattgtcctaagctgattgtgttatgtctcagatattatcagccttcaaatattgttttgatattttttttgcttaacgtttcgctccttccgactcttttgtcgttctcgcatataccctttcatttttacaacttgactgttcatgttgcgatccactgtatgtttattttattgtattgacttagctccataattcacgccattacctctgatatgattttgttctgttcttcttcttttccaatatgtcgtatttattacattctatttctctgataaggttttaatatattggaggtgtatgccttaccctattttttcttcttgtctactctctttgatcttctgtcttcctatcttctgttttttttttgctttgtttttgtccaaccatattttgttcacttaatattctttttatcttttacttaatagtgtctctctatgaattttttgtatatttgtattgctttttttatcttcttcttttattatatatctcatttacttttttatcctgttgttcctttctttcacattttttattatcattgccttcttctttcatttattattttttgtatacttttcatcatttcatttgtttcttacttttatcttcttatctctacttattcctgcttcattattcttatttatttctcgtctatactatttttactttttattctcttcctaatttattttctatttatttctgttaatttcttctaacatcttttcttcttttatgtttttctttttctttttatcttttcacttttgctatttatatattttttgttattctt

SEQ ID NO: 12984 - DNA, 575 bp, Emericella nidulans
gcggatgaatgagtgggaaggtaatgggtgtttacgtatccaacacttaagagttgttcaacatgctagctttgtagagaaataagactcgagtaccaaaatagcctcctaccaatgacatccatccctaatccgattgactttaccggcccatatgctgagccttgacatggaacagcctgccataagagagaccacttgcagtgagtatgtcctttatgctttgcatatgctaacatcgggttgcttcacctcggtcttcttcgcattgtcaatcaattttgcaggttatccggcttttccaggatccattcacttttacaatatcaatttaactggccctaaacatgcccacactctgaaggacatattaagatggtcctggtccttatagtccactctcttctcatgttccataatccttccgccctcatttttttatgtcattatcgtgcacaacattttctatcttacttcatgggtacttttgatattaaccgttctactgcgctgtgtccttaagtctccccgattcttaagtaaggtgattcaaagcacaacaaagccgatcccat

SEQ ID NO: 12985 - DNA, 901 bp, Emericella nidulans
  unsure (1)..(901): unsure at all n locations
actcctatgacagatacggcgcagacaaggcaaaagaattctacccgacagcattcgaacggaaacgacgatgcataccacagtagcacttgggccgtacagactgtgaggccgttataccaaacaatgacaagagcctgaagctagccaccgagctagccgtgcttctccgacaggatctggcaggctactgtagccattgcttggctcgcgagctgacactacacggactgcttctatacagatacatcgttgaacatgcaaaggctgccgtcaagtctctgctgagacaggatagcattgacagctctagtagactagggcacacacacatcgtgtggcagggaactatatgcctagagatctagctggaagggacttgccatcgcatggcctcatgataggagagtcaggctctcatgcacccgcgagagcatattcataagctcagtgcgcatagatgcgaccatgctcaagctttgcacagcactgattgtcaccctagaataacaagcacggccttcacaagtagctgactgatcaggtgaaagactacactggatgaaagaatgcgaagggaaagtacccccccaacggtgtaaggcgtaccgccaaccgcatgacccaaaggcttccaagtaaatgcgggacagggctcgggacatcaggtcatttacctcggggattgtgacccaaaaaatcattgcagccaaacctatgggggggccttttggcaaaactgggtagagattttatattggggattcgttcagataaacagagcttctattttttttttttctttnnnttcttcttttttttnntnttcnnntatgtaaaatatataattatttttttctggagtgttattcttnatatcacctcctctactttctttata

SEQ ID NO: 12986 - DNA, 489 bp, Emericella nidulans
acgagctcgccttcatgaaccagctggagaaggatatggccaaaatgatgggtcaagcggcgcacaatccggcgtttcggaccccgcaggtttcgaggacacaattaatcagggcgcggatgcttcacaaaacagttagaggagagtgggattgcaccgggcgatttcatcaagcagcttttagccgatgtcatggcagaagaaggagaaaagggtcagtcatcagcatcagcgccaaccggcgcttctgttggagcagcaccagcaccagcaggaagcgaacgcggcgcaggtccagaatcatttaacgatgcaatccaacgaacgatcaaccggatgaaagaatccggcgacaaagcgactgccgccgcatcagaagataatgcagacgacctcattgcacagctcctcaaggccatggaagctggcggcgacgggtctggcggcgatgaaggcgacctgaccataatctttatgggtatgatggag

SEQ ID NO: 12987 - DNA, 537 bp, Emericella nidulans
cgataatacgactcactatagggatcagattaggtcccttcaggagcaagtcaacacatggagaagcaagtatgaagctctggcgaaactttattctcaacttcgccaggagcacctagatttactccagacaacaaaaagcctcaaactgaaggcagcgtccgcccaggaagcaatagagcgacgagagaaactagaacgtgagcttaagacgaagaaccttgagttggccgacatgatccgggagcgggatcgtgctctgcatgacagggaccgcctgacgggaagcaacaaggatgagctggaaaaggtcaagcgggaacttcgtttcgctatcgagcgcgcagagaacgcggagcgccagaaaggcaccgaaatctcctccttgctctcgaaatataacagggaaatggctgatctagaggaagcactgaagttatgtcgaaaagacaattttcctttacgttgtactgaccgaactccagaataaaacacgcgccttggaggaatataccaagaataacgagatgcgaacgg

SEQ ID NO: 12988 - DNA, 860 bp, Emericella nidulans
agctattcaggtttagtactggtcgggttcgccactatcctgttctccaccaacgattctgtcgttgctggtgcgttgaaaagtgtaggcagggagggggcctctgaactagagcagatatatccaagtcagcaaacctatagaaaacaatcaatcaaccaaggaagaaacagcgatgggagagacgaacctcgctccattcgcaagctagaaaacccagaatgcaaacttagcaagcacgtcgcaacgggaagaaaccaactcaataaagcagttataagtaataggaaatgcttaccggaccatcctcaggtactccagcccatcttccgcgggaccgtaaaagagctcatcgccagctgctgtatcgagaccgggaaaggcgcttttctgcccgaagacagggtggttgccaggtttcttataaggcgtcactgagttctgtggttccttgtcatcctggtcatcttctgtgtatgaggagcgggcacgcttcgtgatggcgagtagcctgaatccgatccggggaaaatgggtttatgccacatgcttgggctaaagaagggggtttggggtgcgttttaaggggagcagttcctgatcaggcgctttttaagagcggagcttcgttaagcttgctcaatgggggggggggccaaacttcatgtaccttgtaattccggacagctaaacaactgactggttttggaaccctttaacgtttttgaggacccatttttaaagggcaataatattctttattggctctgtttttaacacttaaggcgcaaccctgggcacaggaaaaatgccaccgatttggaatcataagaaaaaatcggtaaacaatcccccggggg

SEQ ID NO: 12989 - DNA, 697 bp, Emericella nidulans
ctgggtatggtctggttctgggtctgtctctgtcgacgtaagtattcagcttaacaattaatggttgctaatatcatccacttcctccctatctccccccatatctccatcttatatatatctcccacacatctttaaatccacatcccttcaatcatacttattcaccatctaatcatacaatcttatatttatactatctctaccattattatcatctcaatcaactctctaatctaccattacattctaccccctctctcacttcctatatacacatctaataaactctctctacatcaataatttaacctaacttctcacttcaatactccctaccattatcatactaccaatatcatatttatcataccctaatcctttaccctaactctattaactatactttatatcttccacatcactatttattccactaacatttacatatctttactaaagatactactcacctacacaattcctcatcatctctctatctctctacttctctacattttcactatctcatccaatcacctcaattcttatcctacacaccatcattataatttcttcaaataattatattcatacttattcctcatattccactaatcctttctctataccttatacttaatcttaacattatacatactattatcctatttctcctatcacccctataacaaca

SEQ ID NO: 12990 - DNA, 835 bp, Emericella nidulans
tcggacctctttgctgggagacccgcccgggtgttcagggatttttactctcagaagagcttcctttctttcccccaaggcagcgcgttccgcaacagaccgcatccggtcaaaatccatatttgctcccgaggtgattgcaaccagttcacggctggtgttggggctggggcgcttggcgacatatttctttaatcctgcaatggccagcgcaccagcgggttcgatgatcgagcgtgtatcctcaaatgcatccttgatcgcagcgcaagtctcatcggttgaaaccaagataatctcatctactaccttcggggccacgcgccaacatttcgaccccacactcttgaccgcagcgccatctgcaaagaggccgaccttgttcagcaacacacgagagccttcatcaagagactgggcccttgcgttggcgtcctgggtcttcacaccaatgaccctgacatgcggcgcaatgcgcttgttgtataccccacacccgggacagaacctctcccccaccgggcaaaaacaagtttcagtttttccgattctcttgggcaggactccatcccatggtcctggccagaataaccttcggttatttaagggggaatctttagaccctctgttttcccgggggggttttttttgggaggcgaatggttccttaggcaccttcccccgggcgggcttcaaattttatcttgggccgaggcttccatttttcgaattttgttgggcataccccacccgggcgttgcctcagtaaatttaaacccccctttaccctttttgtgtttttttagaataccctctcttttttgaaaaaaccttt

SEQ ID NO: 12991 - DNA, 796 bp, Emericella nidulans
  unsure (1)..(796): unsure at all n locations
cgaaacatccttgttgcatcgaacgactgataacttggacgtctgctccgtcagatctgcaaatatggtatttgcatcagtcgagtctccctgactacgcgaatgctggaatagactagcctttgtccacaggaattgacggctttaccaaaacttctggtacacggggccatgaataaactccctttccttgcagtcgtcatagcttactccataacgtatgacgcgaaactcaattcagaatctgcagctcgggggctcaatgtcgttgacattcgtgaccgtaaaacggcagaatgactccgctggtccttctcaatcgatctgcggtgggataaatcctgaacgcgacgcctatgctgatctgtagcttcctcttttccgacgcaaaggataaactccatctcagatcacctccgctttgacaaagtagatgatcgcgtcaccgtgccctcgctcacagtcttctaattatcttggcttgtctaaaccagcttcgggtttcaagagaggtcgagactgatctgcgggcttctcaaaacccgtgtcgatcaaaatctttctgtcatcagccccactgagattctcgcctttccatttctggcggtccgatggggaaggctgggatgtctcgggcaaagagcacggtgtgccggcccatctcagggcatgtngtgcgagaatctataacagattagcataatgtgtgggatgggacgacatcgggttcatcacctagaagacacacggggcacgttacgtattccagtgtgatacaggttccttgcgtttttaa

SEQ ID NO: 12992 - DNA, 319 bp, Emericella nidulans
gcgatttgtctaggcccatgcccgatgactgcacgttcgtcgacagaagcgaatgccacgtttctttttggcaagcataaacaacgtaagggcagggaaaatgcatggaagaagcgggaaaagcccaaacagaacgctagcatattaatgtcaggacgctcagcatggagatgaccagggccgaattggaccggaaaccgatggagaaaaggaccgagaccattggaatgaagaaacccttgaggtgtttcacaggacgccacactctgacagcaaccgtaaggattctaaagaggacgctacgggtgtagagaccggg

SEQ ID NO: 12993 - DNA, 618 bp, Emericella nidulans
tggcttagggctgacatacttattggcaccacggcagcttctcagcgccaggatagccgtgaaagccatggtgtactcatatccacccggcgcaatcaccgcgacaaacacctcatggtcattgtttaaatccctcagcgtctctggacggagacgacctctcagtgcgcgccgcagggcaagcgcgtcagtcagcagttgggtatagcccttttccacaccagcatgcacatcgcgaattgagatagtcggcggtcgacgatgggcatagcggaggagtttctcaaagaaagggaggtttgggaggacagtgtctcccttgtgcagtgggacagttagggttctgtcgccgggagtggcgagcttgccagccattgcagcagggtgcctagaacgaatatcgctccggatcggacacgcgcagcaatattatagctctcgcacatggcatttctaccccgcacgatctctctgattacccaggctagggtagagaatgctggggtgccagaggcggaacccccccggttactcgtcggggttttgtataagccttctcggtatatccagaggggggagggggattatactgcagacaagcacagtgcttacataagt

SEQ ID NO: 12994 - DNA, 774 bp, Emericella nidulans
  unsure (1)..(774): unsure at all n locations
gtccctttcctggttgttgagaatcttgggttggtgccgcgctgcggatagtgagtgtggcaactngcgttatcggactctggtactttgatggcagggggcgggtgagagggcgctttgatggaatcaagagcgaggattttgggcggtgagctgtgaaggttgggttttgggttggttcttggggagctgacatgaggaaggtctggctggagtgggagtatgaggtgtttaagttagagtgaggttgatgactgagatcttggatgggtatgcggaggataagatcgacgtagctgagacccacacgatgtgaccgatttgggttagtctgtgtatatactccaaaacccttatactatctacagacgaggctctactgtccgcaaggaaggagaacggacttgtttgagactagtatgaggtctggataaaagctaaagtagtaaatgaggttcaaggatgtgaaatgctagctggatagttccgtcgtttggcgagggcaccaaaacttgtttaatcctactatcttcctatctggatggagttaggatacactgcacccgggcttctaccttgtctgaatcactggaagaactgacaaatgccatctacttcgttttaaaacagtttatactattccattaaatgaattaagaggtaattaccaaagttaacgtgaccctttttttcaagaggaatcgacttgaccgctaacgcttatgtttcttaaggatgccttatgcatttggcacgaattttttttttgtaacc

SEQ ID NO: 12995 - DNA, 999 bp, Emericella nidulans
  unsure (1)..(999): unsure at all n locations
tattctagatgatggactacatttttgtgtatcatgctcggtcgtggttttaaatgagcgttatgtaattgtgtacgactgctctatatatattctggcagcggtgttcgaataacgcatgcccataactcccgaagtgaaagaatgaaacaaaagagcattaattcaggaaaacagagaacattataggtcacgctagaggctgattgcatggtctaaaggacatcacgctaaaaagcgaaaacgagctgcgctaagctttgtgatgagaagacccttaaaacaagccacgcaagcgaaaaagcaaatctgcgcttggtcgtctcgacgaatgcgaggcgcagaagtacgagttgacagcgtctcgtgtccttgcatagatgcagcctgagcttgataggctggacgcctatgtccccgctcgtattcggcaactaggctagactatcttgcccgatgatcatcatagtgctttgaaagcctcaaccttcagcccgtcagcttgggcttggggttcgcagcataaataggggacatgagtgactcctaatccttcgggatgaattcacttgtacgaataccccatcagatcatttatttccgattcaatctgttgtacggcaaccatggaccccagcgccagtcagaacagagctgcggccagtggccgaaaactaactcttcaattgtatcgtcgctgctttaagggccgcaagcagctgtttgcagagtcggacacggccgcagcgagttactttgtcaccaaccctgttccgcacaagcatagcagcaactggaaaccgatattctaccgcggggataaccccaagtatacgccgacggcaactgctatcggacgggcacgccgttctgccatgtggggtacctttcgagtctggataggggacggcgtactagaagttctcgacaatgaacgtcngcgactagagaaactggaaagcggaagaaaagacaagtggaaggaagccgtttgggaga

SEQ ID NO: 12996 - DNA, 590 bp, Emericella nidulans
acaacgttcgccgaatctcagcgactgaacggccccgtttatttatgactaggggctctggcacccacatttgtctattgtgaatctgactcgttcattagagcgaagaaagctacatctggagaacgctgcaagacactaccatttgccataatggatcgacttgtgcagagcctgcggatggccaaagcccactcgaccgagctatggagcaagcgcgagcctagcactgactaacgctaaactaacggaggcattgctaagcacacaaccatgttaagtaagcttcttactgatctaacaatacactggccagacataggcatgaccaataaaaggtgaatgctcgcatctactcccaacaagcgcagagtctgacctgtctcgtgctatggagaacagacgcagaagtccgagcgctatcgttaataagcgctcatcacacgctgcacgtctactgatctacggctacacgcttgattagaggcgagatggtcatcgacgacgaataccaatcgatggatgtgcaccagattgcttcgagtgtcgaacgagatcgcgatcagaacacttcgttgcagcactgccga

SEQ ID NO: 12997 - DNA, 603 bp, Emericella nidulans
tagtatcgaaaggcaagcatggtttcttcttcagacagcaggtatgaagagacccggtgaactgttaccgcctaggcgaccttgtaccaccgcagcagtctattgtctcgaccaccccgctcctcacaactcataatttccccataatttaatctacacacccccctattctactttcaccttattctccaactattacatctactccctatcccactattaccatttaccactacccctaactcctcgcagtctcttacaccaccttccatcattactctatacacatctctcccaccacctccctctccaccccatactaacctttctacctaccaactcatctaccactaattctatttaaatatctactaccttcctctctcatttcttccttctacttcacccaccattctaccccaactctcataatcatatcccaccaaattcactctttataacttctctacctattatctccaccttacctctatctatcttccttttcctataactccccttcccactccttatcccacctattacttacgctcctctcatctcccattccctcactaacctctaccaccaaccactctcctc

SEQ ID NO: 12998 - DNA, 615 bp, Emericella nidulans
acggccgataatacgactactatagggatcctgatctgtcagagttcaataaacgaggagggaagctcctctcctttcacggcttggatctctcgccatctttgcacaatataatctcgtgctgatgcaactattaacaggccgaccccatgatcccttctaagggcacgaggagctattacgagaccgttgcagaaagagaccctgaagttcgaagctattatcgtctctttgaggctcctggcctcgggcactgctggagcccggcgggactatatccttcaacgatatttgacgacttggtaaactgggtcgaagaaggacaggttccacgttctttaccggcttcttttaccgatgcaaggaatgttaggtataacaggatgatttgcccttacccggagcgggcaatatatgatggaaccggagatccaacattgaggagcagttattcctgttcggcagacggtctggcatttcacagcaacgttcgcttgtatcaagtaatgaaacctggcgaggcatcttgctacaatgtgtctgctgaaaaccgcaccaggatgggcatcatgagggacaaagaaaaaaaaataaagcacccagaacttgcctata

SEQ ID NO: 12999 - DNA, 677 bp, Emericella nidulans
  unsure (1)..(677): unsure at all n locations
gcacagatactcacgagacgcccagtactactagcgaccaggcgcgcctccgacaacggctgaaattatgctctccagagcttcctctccaatgattgtccttctatcccgttgctcctgagatgagaccgtcatccttcacaaattatcacaggccctattactacacccttaaatgctttatacccaatggaatcgggactgggaacggtgcctccgaacaaagtcgggccctggtgatacctatgtaggttcttcgcttgcaatatccatcacaataagtctccctccccagttctgttattcgagaaggctacgagacctaccagggactgtaaatcatatatccatacactaccaactcgtacactgtctaggcatattatatcatagctagctcatgcgtcgncgtctgatatctgtgctgctgattttggacgcaaagtcctcaacatcttctggaggcacttcgcctgtatgaatcacatcaacctcgaacacctncagctgctttcaccccgtttggctcgctcctgattgaccgcggcgccccctgagcgtgtctctttgagacgaccaggcgcttaaatcctctcgaatggttggtcctaccgtcatgtatttgcgcatttcaggtaatncaggctgacttatcatatttgttccgtcggcccgat

SEQ ID NO: 13000 - DNA, 996 bp, Emericella nidulans
gcagcggaagtcccgcaagtgtatcctattccatccctcctccttatcgagtccggcacgcacaattgcgtgtagaatttgagcacctgttgaattattgctgagggaacttacatctagctagctcctttacatgataccaatatatacctgatgaaagcttgtgcggactgtctctctcaacagctcgattacgttggtagcatcggtctccgtagcagatagcgtacaatagtcggagtgcgcgagaacagcaaaacgataccaaagcaacaacattaagcaacgcgcagctggccatggacgggtataagagtagaaagtacttgcaggagcataagaaagctaggctagtagttcttcgcatccttcaccttccccacaatgttgtagcgcttgctgaagaaggtgaaccactcctccagcacttttttgtccttatccggaaggtcgtaccactcaggtttgcagtcttcgggtttcaaggacgagcaggccagggcgcgagaggcgtctttaccggcgaacactgtgacgttatcagttagcagctattggaagatttttttttgggggggggggggggggtgctctacacatctatagcatgatgcgttctctttgcgcccctatgtttctgtactggctaccttcattggcgctgtctagtcggcagtgccgcaccagctgcccttatgttctttgggctcctgtatctgaacacggtatggttttttggttttatgaagagggtgagtgacccaaatgctctaggtgtgccttggacttctaacggtggttgagattgtggtttccacaactttttattcgtccatcgccgttgtctatggcgttgggattattcttgagaactgcacataattgtggttgtcccagtaaactttacataatgggtatggccagtcattcttcaagaatgctggagtttttgttgatcttgcctatcttaacgcttgaatttcttttcctattcct

SEQ ID NO: 13001 - DNA, 668 bp, Emericella nidulans
  unsure (1)..(668): unsure at all n locations
cttcaatgtattgtagtaatcgatactgcntcaagcaagaagcgatttatcgtcaacaagtgagtgtttaaatncccatagggggttctaacctctagaggctactttcacgtttttttcagnccccctccacctcaacctctctaatctccaaatcctctccccacctgatcaaccctcccttaacaacccctacctcccactcccccccgccccctaccccaactctcccccatccaccctttccccctacccactcttaccctttccaactcctcttctccaatcttacacatccttttaattctaaccttctcacctactctcactcttcatcattccatcctaattcccatccctttccctcccaaatcccacataccccttactctccctccctcttcaatattaccatctaactccctacccttccaacacctctcattttacttttctcttccatttccccaactaatcccaccctctaccttaatccccccatccaacccataaattccccatacccccatatccttccatctcactccttctataatccacttcccctatttctaaacactaactccccaatcccaccttcctctatactaacctctcttcccaccctaattctccccacccttccctctctatacccccacttcccc

SEQ ID NO: 13002 - DNA, 604 bp, Emericella nidulans
gatccggccgaattaaccctactaaagggatcaagaattgagccctgacgtcgaatcgtccagcgatatcataaccatttccctcgtgtcgggattagatacagctcggcaacgcgtattctccgcatcaaacatactatgggcgcgtggtaagactctttctagaagaaacggacagcgaatgagagcaaaacggcccccaacatggaagcgggacttccaagcacggcagcagcgccatcatccgtcggcgtcggggacgcagcactgccctcgctaccatcagagggagttgcagtggcagtggacgaagtctcggcagcaccggagcccgattggtgggttgtagtagtagcaaccacagtcgtcatagatccagccgcggagcccgtagggtcggattcaatggccgtgaggatgtttgtagggattgacgtcgtggtggtgcttggggcgtccgcagttgtttccggctcagcgctgctggtgctgacactgccagagcctgtgctggcgttggagatctcggtctcggtctccgaatccgagtcatcaagccgagggctgctagtcgcgacagggccgctgacgcccacgggtgcac

SEQ ID NO: 13003 - DNA, 654 bp, Emericella nidulans
tgattggcgaatgcttcatgagtcgtcctgtccttcaatgtcgaagcctgggacgggagtccaatcctgtcaagggaaataaaaacgaagacgaggtaaatgtcgcgttgccggacatcgccccactgagtatagcgcgtcgcctctacattttcggctgatctttgtttgtggcatggttataagtctacaataacggtaatgttgcgaagtaaattgaccgcactgattgtactatgtatcatctttgcgacaagaaagcagtagtacagatcacatacggcaataggggcatatcggcggtgacctcaatctatcctattcctctgcccgcatctgctaacggcgaccaaattgtcttggccgacacttcggagtaggtaaattcggctagcaggaccagatgtagtatactgattgttattcgggtcgatccagaattattattgtttagtttgtagcgccaatttaattccttgttgagggtgacggtattagtcattcacaggataatgaactctatcgaaccgcaagttctcagggtcgacatccttatcattctccagatactactactaggtaattgcctcgcaattatgctcagaactccgccctttggtgaaatgacagatccttgatatcgtgtgattcaag

SEQ ID NO: 13004 - DNA, 784 bp, Emericella nidulans
gaacggtgtggaaaaacccacaaggcgcaaagactccacgcaggaagaagaccagcggcagggtggacgccgagctccgaacacggcaagcggggcctcggacaccgaagcgggacggagagcaggcaggcgcgaactcaagaccaaaggcacgcaggccggcggcaaccgaacacgggggaaaggggaacaaccaccgaagagaccgcgccgacggcaagggaaggggaacaagccaggaccgcgacggtgaggaccgagccgtaggagcggacgacgagacgacaatgccgaatgaggggactaggaacgacgacacagttaacagaaagggcaccagagcgcacgaggaacgccagcgctttcaggaacggagacacgacgggaaccaggacgaccacggatgcgggagggttgacggaaaggccgacaccgaaccggacgaaggccaggaccgagaagccgggattcagcgcggcgaaacgcaagaggaaaaggcgggggagggtcgcaacccagaagctgcgaagaggccgaccagggaagaaggataaggacgaagaaagccgccggcaaagcaagccagcgaagggaaccgggggggccgatgaaacgaggccacgaaccccagcgggggagatggcaaagatgggacagggaaggcccaaaacgcccggaggaaggccgggacaaagccaacaaaaaacaaccgaaaggcccaaaccgaaccgcaaaacgatccccccgggacgacaaccaaaaccggccgaagagaggcagaacc

SEQ ID NO: 13005 - DNA, 634 bp, Emericella nidulans
ttcttctaatataactgttactacacacgaacaagcattgaatatactctatactctatacatatctttctaactctattttttttgggttgtcggccacgaccaccttcttctggaggaagagtacgtggaaaacatggtttcgttttgcggaaagccaaagcgtctgcttccgacggcgccatccgaggagacgttgatattaccgactgaaacgcggatgagcgcagccgggtagatgacatgaggggaagcccgatgggtgatggtaacctggaggagttgattgacgatgaccacgccattgttacgagcgctaccggcccagaatactacgtggctatcatgacttttgtcgacaaggacctcctggagcctggagctagcatccttctgcatcacaagacagtctcggatgctggtgtgctgacggaagagtcccgatccgctggtcttggtgatgaaactcgacaaggcgccaaccgagtcatatgccgaaactgggggtcttgaattgcaaattcaagaggttcgagaaacggtccgaacctccgctgcttcaatccccagcctgaatgagggagaaggggttattaaacccgccaaagggggttaaaccctctactggagcctt

SEQ ID NO: 13006 - DNA, 880 bp, Emericella nidulans
  unsure (1)..(880): unsure at all n locations
cggagactggtaacttctccttgctcgaagcttagtttcaggcgcatcaacagtattcgtcgcaatcataggatctgaaagcgtgcgttgcggagctcgcggcatatggccattgcggctaggagaggccggcatcctctcatccccctctcagcgccctcattccacctctcacccccccccccatctcctccctctcttttcctaactccatcccccaccctcccagccatcgacccccttctccctcacccccccctctctcaccaccctccacaacccacacccccacctcccagcccctccatccctccctcctcctccccccctacaccctaaccactcacactcactctcccttcaccacctctccaccaacccataccctcccaccccctaacccaatccccacaccgcacccccccgttcaccccacctcatccccacacccccactaatcctccccccccccaaccctcaccactcctacctctctaccctcactcaccacaactccaaacccccacccctcccccattccaaactctcccccccccatcaccatatccctctcaccctctcnccccacaccccctcacctccccttccccctaacccctccttcatcctaatcctccaccccccttcaccctcttccccctcctactcccctcacttcccctcgtcccaccctctccctncnccaccttcncnnnnnacgtcgntctctcccctcccccctccctttcngcgccnnnnaagccacntggctncncccccttcnncacatcttttccactatctccctttccaactctaccactacaccaccaatatactccctcactccttccattcctgcctaccttgcataaatcat

SEQ ID NO: 13007 - DNA, 424 bp, Emericella nidulans
gacgacgcacctcctccgctgcgctatcaaatgccttcacggcacgttttgccttttggcacggccaaagaacacctcaggggacaggggaaattaacaacccaacaacaaaaaatacaaaagacacacatacaaaacaaaaaaaaaaaacaaatacaaacaaacacaaaaaaaaaaaaaacaaaaacaaaaaaaaacaaaaaaacacaacaaacacaaacaaacaagagaggggaaaaaacaaacaaaaaaaataacaactcacaaaaaaacaaaaaaataaaaaaacttaaataaaaaaacaaacaaaaaaacaaacacaaaaaccaaaaaagcaaaaaaaacaaaaacaccaaccaactaaaccccaataaaaagaaaaacaaacattaacaaacaaaaagacacaacagaaactactgaa

SEQ ID NO: 13008 - DNA, 461 bp, Emericella nidulans
  unsure (1)..(461): unsure at all n locations
atttaggtgacactatagaatactaggatctcgccacccccgacgataagcgataagcatttcggccttgttgccttattgcctcacacatctgggccttccgccctgagcgggcaaatcatgtggcggccacaaagtcaaagattgacccccgccaaaacaccgtcaccacttgcatccctactctccaacaaagcattcgctagtgcgcgtttcagccagcgacttcggatccattcatcctactgccttatagactgccctttctagattaccctgtacgagaggttatctcgtaactacccgccacaatgtcgaccacagtggaaaaggtatggacgttcttaccaccttcataagcatgatactgactgccatggatgattatagatcaagcaagtcgaggaggaggttcgntctgtcttcaacttctattcggggcgcatattgacatgctcttc

SEQ ID NO: 13009 - DNA, 564 bp, Emericella nidulans
ccggcctgagatcgtgtctggttaagcgaaagtcaaactcgctattatttcactacgacgcactgccttacgaacaccagcgaggtgcggcggtaactgcggtgacgacaccgactaagacagacctatgtgccggatggcacgccctatgggtgcaccgaacagggcggtgcactaacgggagaggttccgctggctaacgatattctccactgtgttcgaatagaaaagtaccagcgtgagacctgacctaggacacaactagcatgctcgaagcgagctaacacaagagtctagacacgccgcagagcatctactcagaacttgatgctaggctctgataactcagtctgcaatgccggagccaaagagcaattgaaacatggcttcactactccgagcgttacgaaatagcatcgggtcgaatgcatactccaaggattggagcctacaaatctggagctaattatctgttgagtgggcaggcttcttgtctctggaagactgctccacagattgcaagctgctagaagatcaccggccgatgtattcaccactcacggt

SEQ ID NO: 13010 - DNA, 769 bp, Emericella nidulans
  unsure (1)..(769): unsure at all n locations
gagactcaaatgtgtgtttcaaatcgccacggtgataaccggcgccggcgtggatgaagatggccgagactttttttcctcctttttttgagcgattcattgtgggctggcttgtctgctgggcaaaagggtatagtttcaagacaaagagaaacaaagctggagatgccgagttgtcactggggcattgcaccgctgacgactaatagaactggagcgagtgaatttatgggtacagtgagtaggctgctggctccgcgctaggaatgcctttaacacaattgtgcagaggaaatcagggagaatgaagaataggctcaaaggacgagtatgaataagatgaggcctcgcttccgagagctatttgctgtagagcatgacagcaggctgcactccttaaggcagagtaagaatgaagagaggaacccaaggatgcgaactaggaaatgattacgtgcaacgagatttgcattagggaggctggtcatgccaaggtacagcggtcagggagcttccagtcccgttggccacattagccttgtgctgcgatggcttcttttccccaactttagaggcgaggctagtgcctccttaagaacaaggaaggggttatatgaactgcatccagggccccgggagtttgntccattccttggccttcccttattccaatatctcactctatcccctttttaaggttaaaggcttgttaatttccgggaccctcacccattcttcccgtcggtgtgtcacgggttgactcctttcg

SEQ ID NO: 13011 - DNA, 594 bp, Emericella nidulans
tgatctgtcattgattctctggccgaagctctcacatcttgcatattcttgcgctctggccgccgaaacgttaggctccccctctccctgcacaaattctctgctcattgctctcgtcctcttttcttcctctccctcctccacttctccccgcctctattcccctcttcctcaatctactctctcccctcttcctcctctcctcctttccattcatcttcacttatacctttttcccttcctctcccttctccttcctttctccctcactcccctatctcccctatccccataccttccctccatcacccttcccacctcacattccactccttatcccttatctctcatcctctacagtatccctcgtccttcctctcacttctcctttctattcatacctctctctctccctctctccatcccttccctctttcctcctatcttcctcatactgtctctactcacttcacaatttctacattctctgccctcccccctcacctcttcctcccacttcacctcaccttccctctctctctcaatacccttactcctccctcccatcacgtcttgttcactcctccttctaaa

SEQ ID NO: 13012 - DNA, 533 bp, Emericella nidulans
ggttttggggttggcgggcggggggggggcggggctgcggtcctgggggggggggtttttttggggacgggggcggggggggggccgggggggggggctggggggggggggggggggggcgggggggggggggggcggggggggggggggggggggggggggggggggggggggggggggggggggggggggggggggggggggggggggggggggggggggggggggggggggaggggcggggtgggggggggggcggcgggggggggggggggggggggggggggggggggggggcggggcgagcatggggggggggggaaagaggaggggggatcaggggagggggggtaagagagggaggaaaaaggaaagggggtaaggaaagagagggggagggaaagaaggggggagtaagaagagggggagaggaaacacgggagggaggcatggagaagggggggagaggataaagggggaggagggaagaacggagggagaggggggggggggacgaagatgggggggggaag

SEQ ID NO: 13013 - DNA, 111 bp, Emericella nidulans
ttgatagtgtcaaatatcttctacaagttgactcttaaagcaatgacagcaggactcacatgttagagtttatctgatccagctactgtcagaggggcatgcttggcttat

SEQ ID NO: 13014 - DNA, 632 bp, Emericella nidulans
acactactatgggagacccaagcttaggatcctcgggctcggagatgaccgaattccccgagaagtatccccgagctcgccaaggctgaaaagaaggatacctagtcctaactcaggggatcaccttttcccattcgtcatgttgatcgtttgttgtcacctatttgcgatatgagcgcctgtgggctgatagcgggtcctccgtggttggcatcttttttccttttgtttatgtgttttcgtcccttctcgttcttcgtccgttgcgttcgtggctttgtcgtttgtttttgtcgaggttttaattcttggtcttattttttgttccttgttgttctgttgtgttcttcttgtcgctttctgcctttccgtcttgtttctgttatctctgccacttcttgttccttgtctgtgcgtggatgttctccctccggtttctgctttgctgttcgctccttgcgtggtctttattcatgactgtccttgtccggcatcttcgaccgccctgtgctctgcttggtaccgcatgcgtttcttttcctctctgcttatggtctgtcgtcttttctttctagagccttcttcttctttcctgtgtagatttcttctgtgttggtgttgtgcgttcttgt

SEQ ID NO: 13015 - DNA, 537 bp, Emericella nidulans
cgatgagaggtctgcgaatgtctctggctggataggaattgaggatgcagcctctctgcaacatcttcgtccatatcattcctttcatgcctacctgattctaacttccgttctactcttttccttcattcccacccatcctctccttctcttttccctccattcctctttcctccatcttcttttttctcttctctcttcttcctcttatttctcctcttctctcccctttctcccttccttctcttttctcctatccttttcccttcttctcttacttctccctcttctttccctttcccttcttttttctactctttcttcttcttccccttcttctttccccttcttctccctatcttctctcctctcttcttcattttccttttttacttttccttctctccaccttattattcttgcttcttcctcctcttccatccacttttcatctccttttctattctcttcttccctctcttccaccttttttattctttctccctttctacttcttcctttcccttctctctccct

SEQ ID NO: 13016 - DNA, 929 bp, Emericella nidulans
cgcgcggctggcgttggatactgttacagtggaaagggagcatttttccataccaaacccacagccctcctggtcggcaactaacaattgatagaacgtctgccgattcttgaagcccggcaagctcgatgtcgggtacaccgctcacccgcttttcgtcaccgaggaggagctagcagccattgatgggcctttttccatctgtgcttctggcacgatgtttcttttataagaccgatcttttccggtcatcttccttggatggagatatgctgacacaatacaacgcataaatcgatcagagctttaccacatagcttcgtcacaagcccgaggaaatactcatcaagaccggccagaactggcagatcaacctgtacagcggagggactcacgggttcggcgttcgcgcggatctcagcaacaagcaccacaagagcgccaaggagcactacgatttggcaggtcggtgactggtttaaccagtacctctagagttacgccacgctgataccaagggtgattcgtgatattggaccgagacatgaatggaatggccagtctacctttggtccgcggtgtccaaactttgccaagcatggtaacaagttaatacgctttacgcggaaccaatttagcgttgaatgtagatcagccatcagggcaatatttccataaaggctagggaataagacgcgcaccctcttggaggcgcatttttccttagcaatggccctttctagggcggctctattcggttctttatatcagagtaaacttgttacagcggggacacattatgctcctggttgaatgcacccccccgtggactccctctagggggggtggctatattacatgcggttctctattcatttttacccttttatattctttaccatctttgtatatgatatcatatttccctt

SEQ ID NO: 13017 - DNA, 712 bp, Emericella nidulans
ggctcgagaagcttgtcgacgaattcagatagcgtatctttttttattataagtgtccctttactatttaatgtttatttatatgtgatgacttatccaacagttgctccgcatccaatattaaattatatggcttctactgtttcgccaacagctcaatttcatatagtttattataagtaccctactttatattttctaatgtatgtatttttaaatggtttatacggtgcggttttttcgagtttagctttatcagtttcgttttttataaaacgagtttattttatttatttagttccatttattttacatattttttggcttggtattggaaaagggattttcaatcctaaagattatttaattaaagattttggcttttttgaattgcaaaattttcttagtgtactgttatgtatttggttttgttctgtagctctttatttacgggggagtaggaaggatgttcttttataatggtatgaaagaaactataaggatgaaatatgtttggttaaagtattcttttggacttaatggtagattattgggtgcttgttaaaatattttggaccccggattggaaaaaggaaaatgaacgaattggagctttgttaagggttttcgttgataattgccgatatttttattctttacaatggttttctgaaatttatggcgaccttttggattatgtgttacggggata

SEQ ID NO: 13018 - DNA, 836 bp, Emericella nidulans
cgcgccaacggcatccctagcccaaaccctccttttgccgtggaaaatcctttttactgtgagaatcctttctaactagacccttggtcctgagacagccaggcttcacgagctagcgctcgcttttcgccgagctgcgccatccgactaaccagtgagacgactcggcttcacttcagaatgtctcagttcctctcggcttttctttcgttatttttggccgtctcggagccgggcagttatcaaccagtttaagcctgtttagtaaagcttagcattcgagtttatcccgcacgtggagataatcgtgttgatctcgtccttgattcgcctaaattattctgcctgagaccagctagttaaaagtgtctcagggaacgtggcagtgccgggatacgcagtctcattgggaggaactgagggtactggtggttcatggcttctcgttcacgaccagtagattctacgaatactacgctgctgctgtgggttgtcctgatacagggcccctaggcgatacccagggttttttgtattcttgggttgcacccttctctctttctcttatcatgtgaatagagcactgtccactaagtctccatgcattgttttatatcgtctctcttttcttctaccttcctttatttatctttcttcttttctaccttatcccatcatttttctcttctttaccccatcttctttacattatatttcttcatttctttcacttttcgatttttttcttttctctccttctttctctccattcttttctattccttcttctctatctttgtatctcccttatatttctttcctctttctatctctcc

SEQ ID NO: 13019 - DNA, 403 bp, Emericella nidulans
ataccggacagccaggaccatgcgtctgctatatttgctgatgctgttctggttccagggggcgttgtgctactgggtgataactcgaacggagcgtggtgggctcacagctacggacagtggactagggagcagcttcttttataaaggctgcctttcatcatgggtacgggaacttgcatatatcagatgagtctgacgctcgagttgatggcctgtatatctggccagcgatggagaagattcaataggctggatgagagtacaaggcaggcagtggtggggaagacaaaaacatacttgcaaaacctactaggcgtgttcggacgaatggcacttattaagagcattgaaacatgtccaacgagataataggcataagcataaccatggctcatgaacg

SEQ ID NO: 13020 - DNA, 572 bp, Emericella nidulans
ctataaatgtgaatgtcagtcgaaatgcccatagtatcattcgaacttaggggagaattgttttatggttcctacccctcgcctctttccttttttgtttttttctctgtttcctccattcatttctacttttttttcacttccttttttactctctctcttcttcttttcattttttacttttttcttattttattttcttctttttttttacttttacctatttcttattctcatccctcttcatattttttttatctctctatcttgattattcctattctcatctctatttctttcttttttcacttttctatctcctttctctttccacctcttcttcctatcacttcttttttttatcattattactccctcttatatctctcctaatataccttctctattcttttccttcctcattactcccgtatccttcttactttttctctactctatatcttcttatccactctcttactctctctacttcctttctatctctccctctattatcttctatccataatatactctattcatcctttttttctccttattttttcttcttc

SEQ ID NO: 13021 - DNA, 495 bp, Emericella nidulans
acaatatatcttgtcacagccaagaccggagcggccacgggatttgtcctgctttgatgcatcaccggtggaggtgtggcgttagtcaggactggacgcctgtcctgaagaatcccctgcagatgaaatggctggtaagggtgtgtggcgctgctctcttggaatgaaggattaaggtccgtcagggtccaagaaagttgccattacaccgcgtagcatattgatcatgtacagcgatggtcttcggatttcagcgttagtcaagttaggccatgttttttgtcgacgcagggttcggagcacccacacgcctatggactgacccctgtctggttgccaggattcccaggataagccactgccaaacgctttttttcttgcatgaatggttcttcaggcgcagggacctggactagattagtctcgtcagtgcagacactatccgtgtgctcgcatcagatacggttacgaacagctgctgcgaactggttgaga

SEQ ID NO: 13022 - DNA, 1061 bp, Emericella nidulans
gtcccgatcaacgtcggaacttgccgagaagaaccggtctgtcaagattcaccggcgatcgagctccatacggattatggggaaggttatcgtttgtgctcaatgagtcgtgacttcccgagtcgtaacatcgaggcaatcctgcatgtttcatgccctgatgggcccgctgtgttgacttgagacgaagttggatgcgttatccatccacccaaataacccgccggctcgatagacctgtaaatcgacttcctgctagggagctaaacgcgtttattggatggcatgatacctagatgcccttttctcgaaacagttagcgggtgaagaatcgaaggtaaccctcctgcgtaccatagtctgccgctgtggtgcaagacagaagtggatcattgaagtcattgggctatgccttccagctcagctgtaccccagaaggtctagatgacaagagccgagaacgaacaatctcgtggttagagaaatggggtatggagaatagagaatgtcaatcacgtggtagttgtccgaattcgtccatcccaggatggaattctcgcggggccttcacttttgatactctttgacacgtctcagcatcaccggatgcggtgatgctaggctcagagctttcagtcagtcatctattcgtgatcaagcagctacttgcaaaaatgctggagttcgcaagtcttcgcttgcagaaactctgtccacatccagactgggcagctactacagacagctaccacagacagctaccagagcaactaccgcaatttctcgtctctggcgacgggggcaccgtcaaactgcttattctttcattctccgccttcggtatgatattccggcattgctcaatgcgcctttgctcgtccgaaagcagcctcccagagcatctttcatacgactacatgcatcgttaggttgcatatctccgaacacaggcttcagtaatcaatatatttaaaagccggaggcatctactgcaatcgaggaattcccaaccccagttcctgttgtctcacagtttcggaatgtttccccggatctcgcag

SEQ ID NO: 13023 - DNA, 459 bp, Emericella nidulans
  unsure (1)..(459): unsure at all n locations
aggggaanaccagaagaaaaaagaagaggaaaagaaaacatacaaacgaaggcagcgaaagataagaaggggggggaggaaaggaaaagccaggaaagacgaaaaaagagaaaaaagaggaggaaacaaaaaaggaaagaaaaagaagggagaaagaagagaaaaagaaagaaagagaggaaaagagaagacaaaaaaaaaaggggaaaaaagagagaggaaagaagaaagaaaaaaaagagaaagaaaagaaaagaaaagaaaaaggaagaaaaaaagaagaaaaggaaaaaaaggaaaaaaaaagaaggagaaaaaaagaagaaaaaaagaaagggggaaaaaagaaaaggagagaaacagaaaaaaagagaaaaaaagagaaagaaaaaagaaaaaagcggaaaaggagacaacaggacagggaggactcaaggaaaaaggaaaaaaaagaggaaa

SEQ ID NO: 13024 - DNA, 434 bp, Emericella nidulans
  unsure (1)..(434): unsure at all n locations
cctcttgttttctttttggggtttgggggccctttttnctttttgttttggttttcttttctttctttttttctgcttcttttttttttttctttttttttttttctttttttctttgttttttttctttttttctttctttgtttcttctttttgcttttttttttttcttttttttcttctttttttttttttttttttttttttttttttcttttttttttttttttttttttttttttttttcttttttttttttcttctttttttttttttttttgtttttttttgtcttttcttttttctttttttttttcttttttttcttttgtttttctttttcttttttttttttttttttgtttttttttttttttttttttttttttttttttttcttttttcttccttttttcttttttctttcttttttc

SEQ ID NO: 13025 - DNA, 506 bp, Emericella nidulans
aaaaagaaaaaacggggaaaggcccaacaaaaaaaaaaaagagggaaaaaaagaagaaagaaaaagaaaaaaaaaaaaaaaaaaaaagaaagaaaagaagaaagagaagaagaagaaaaaaaaaaagaaaagaagaagaaaagaaagagggaagagaaagaaaaaaagaaaaaaagaaaaaagaaaaaaaagggaaaaaaaaaagaaaaggaaagaaaaaaaaagaaagagaaaagaaaagaaaaaaaaaaagaaaaaagaaggaaagaaagagaaaaagaaaaaaaagagaagaaaagcaaaaaaaaaaaaaaaaaaaaaaagagagaaaagaaagagaaaggaagaaaagagaaaagaaaaaaagaaagaggaaacagcaagaaaaaagagaaaggaaacgaagagaagaaagacaaagaaggaaaaaggagaagaaaaaaaagaagaagggaaaaggaaaaaggagaaaaaagaacgagagaggggaaaaggagagaagaaag

SEQ ID NO: 13026 - DNA, 503 bp, Emericella nidulans
  unsure (1)..(503): unsure at all n locations
ttaaggggcttttccaagcngcttttccggatggccctgagcnntaacnntcgacncnntccaacccaatcnntgctgccnnncctgattgggggatattggagtggggataccctttnntggagaggcnntcctcttanncatagccnnngttcagaaaagcctnaatctagcnngagatangnntagttagggtgggcaggggaggagccccagtgaggacgggctgggagggaggggntggnnnnnnnnnataccnacatggctnnctnnncattttgcgcaataacatcaccacccattacccaagtaatatacgattagctaggaaactgattatatgggaatccttaagcatattgttcatctattagcttctaccaaaaatctcttctttaacctaaaccaaagccaatcttcaaaattgtccccattaccaactccttttgaccacccacaattccgcatatccccgtcttgcgccttgcttaaaaaaattgcgc

SEQ ID NO: 13027 - DNA, 370 bp, Emericella nidulans
tggaaacgaaacagaaccataaggtagatagtacgaaagagaaacaatctttacagccaaaatgagctcagaaacaactgaccaacgaataaccgactccaaacgcgccaggcatgcaatctcgaggattaggaaaacacaagctgcaacataacgagaaagctgcttgagaactgacgggatgcaaacataggcaaaccctatgggtaaaacgtccgcaaaaaaatagcaaaaaattatcacacgagacgttaatgtacaatctcgaatctcaacatggtaattgatccacgattcctgccgaggatcttgtacggcgcaacctcgacaccgaaacacagaataatgaacgataggccagcctatcggt

SEQ ID NO: 13028 - DNA, 656 bp, Emericella nidulans
atgacggctagagtcctgatacagtaagaggacgactgtcaagttaaaggcttcactgggtcttgattcttatagacagctgtgccagggttcattgtgctgctgcttacctctcggtagactggatctcaatcatcagcctgatcctagtaatctggcagtcgccgacttgtcggtccagcggctaatcagagtgctgacagggacgattatccactcaacgtgctgtgcatagctttgttttcgaaccgcagcgtcttgctagaacagacctatccctgcagcccgtcgcaatgagccgacgtcccaatgtggccatcatcggtgctggcttcgcaggcctacgatgcgccgatatcctaatccagaatggcgcgcaggtaaccatctttgaagcgcgcgatagagtcggtgggagggtatgctctgggtacttttaaagccttgatggcgagcttgtggttaatcgtgcaccaggtccatcaatgcaaagtcggcggccacctcgtagatatgtatgcatcatcctcgcctagttgctaagcccaggacaaaagttgaccgctgaaggggtccgaattggattcacggcgccggggcgaatcctgtcctcgatatcgcgcgagcaacgcggacgacgctgcatgatttcgaag

SEQ ID NO: 13029 - DNA, 490 bp, Emericella nidulans
  unsure (1)..(490): unsure at all n locations
cccccccccccccccccccncccccccccccccccccccccccccccccccccccccccccccccccccccccccccncccccccccccccccccccccccccccccccccccccccccncccccccccccccccncccccccccnnccccccccccccccccccccccccccccccccccccccccccccccccccccccccccccnnncccccccccnccccccccccccnccccccccncccccccccncncncccccccnccccccccccccccccccccccccccccccccccccccccccccccccccccccccccccccccccccccnncccccccccccccccccccccnccccccccccccccccccccccncccccccccccccccnccccccccccncccccccccccncccccccccccccccccccccccccnccccccccccccnccccccccccccccccccccccccccccccc

SEQ ID NO: 13030 - DNA, 476 bp, Emericella nidulans
tcacgacggataagtttacgggaaaatagaaatccgtaacgttcgttctacatgacaaatgcgccgatcgaccccgcggacaaggcccggctgatggttcggatggatgcgccctcttatcatcaaacattattcgtgtatcgatcgacttttagttcaagcgccgtctcggtgtacggcagttcgttatgcgacacatgctgaagggatcctctgcagaggaaggacgaggctccaaacacttgcagtggcgcggcgtgactctgacgacactctgtactacaagctgcttttcaccagtctctgaggtctttgaggatgatggatgtgacatgcttattatcgattacacgtggtcagcgtcggaggtggtacaatccccagggcacatgataaaaacctggcggtatcgcatcaatatcagtggtatcaagctggtgcagctccgtggagacgttctgatttctcaaagcatt

SEQ ID NO: 13031 - DNA, 711 bp, Emericella nidulans
gggctgggcaatcttggaggatatcttgtttattagccaccagcagacgtctggtatcctgctacctagcatgatactaagaaactctttcgatgatccaagacagcagacatgcaggcgcatcggaaattagcttataccgcctgctgtgtacagctggtcatctgactatgataagcatgccttgaggaggctgtatcgggtgggccttaagccttttgcccgggattacattataggtcatttctgattgatacgtagcctcagtttatgtctttctttcattctcctttctttatattctttttctcttttcccttgttaatttataatatgtttcttttattttttacttaatcttttttcttccatatcttacatatttactaactctctttctttatctattctcttacttttttactttctttaattttttatcctatatattcattttcatttttttcttcacctcttcctttttttttttcttcctatatttctatctttcctcacttacttttttcatgtcattttctttattacattttttttcacctatatattaacttctttctctctattctttttttttattacttttttatatttcttttcatattctttttatttatttttttctctttatctaatattttatcatttcatctaacttcttatcgtttatatatttcttcctaacattaaatt

SEQ ID NO: 13032 - DNA, 469 bp, Emericella nidulans
  unsure (1)..(469): unsure at all n locations
aaaaaaaataaaaataaagtcaaaacaaaagcctaaatcggananaanaaaaaaaagaggaggattaaaaggaaaaccgggnaaaaccccaaaaaaaaaaaaaaaaaaaaacaacaaaaaaaaaaaaaaaaaaaaaaaaaaaaagaaaagaaaaaaaagaagaaaataaaaaagaaaaaacaaagaaaaaaaaaaaaaaaaaaagaaagaaaaaaaaaaaaaaaaaaaaaaaaaaaaaaaaaaaaaaagaaaaaaaaaaaaaaaaaaaaaaacagaaaaaaaaaaaaaagaaaaaaaaaaaaaaaaaaaaaaggaagaagaagagaaagaagaaagaaacaaaggaaggaacaaaaaaaagaaaaaaaagaaacgggacaaaaaaaaaaaagagaggacaacataaaaaaaaaaaaaaaaaaaaaagaaaaagaaaaaaaaaaaaaaagaacaagagaaaagaaaaaaa

SEQ ID NO: 13033 - DNA, 517 bp, Emericella nidulans
  unsure (1)..(517): unsure at all n locations
aaaaaaaaaaaaaaataaaaaaaaaacttaaaaacaaaagttccaagcnggnnnannnaannnnananaaggngaatttaaaagaagatacccggataaaccccccaaaaaaaaaaaaaaaaaaaaaaaaaacccccaaaaaaaaaaaaaaaaaaaaaaaaagaaaaaaaaacaaaaacaaaaaaaaaaaaaaagaaaaaaaaaaaacgaaacaaaaaaaaaaaaacaaaaaaaaaaaacgaaaaagaaaaaaaaaaaaaaaaaacaaaaaaaaaaagaaaaaaaaaaaaaaaaaacaaaaagtaaaaaaaaaacaaaacaaaagaaaaaaaaaaataaacagaaaaaaaaaaaaaaaaagaaaaaaacaaagaaaaaacaaaaaaaaaaaacaaaagaaagaaaaagaaaaaacaccaaataaaaaaacgaaacaaaaaaaaataaaaaaaacaaaaaaaagaaaaaaacgaaaaaaaaagaaagacaaaaaagaccaaaaacaaaaaaaaacaaa

SEQ ID NO: 13034 - DNA, 396 bp, Emericella nidulans
aaaaaaaaaaaaccccccacagaggaaaaaaaaaaaaaaaacaaaaaaaaaaaaaacaagaaaaaagaaaagaaaaaaagagaaaaaaagaaaaaaaaaacaaacagaaaaaaaaaaaaaaaaacaaacaaaaaaagaagagaaaaaaaaaagagagaaaaaagaaaaaagagaaaaaagagaaaaccaaaaaagggaaaaaaacaaagaaaagaaaaagacagatcaaaaaaagaacaaaagcaaaaaagaaaagaaaaaggaaacaagaaacaaaacaaaaaaaaaaaaagaaaaaaaaaaagaaaaaggagaaaagaaaaaagataaggagagaaagagagagaggaacaaagaaaaaacgaaaaaaaagaaaagaggagaaagaaacaaaag

SEQ ID NO: 13035 - DNA, 1121 bp, Emericella nidulans
  unsure (1)..(1121): unsure at all n locations
acattacacagtccctctcgcggatttttttttgaactcgggtccgccatcacgatcattagggtcaagatacataagccttgttgatcttaaggatacaaggactttccgtattatacacttggtcctggttatgtagcaacaggtgatatacatctgtccgataatcagtgcatttttgtggacttaggtatagggaaggtaattcgttttcgtgatacaaattcgccaaaggtaattgtttagtgcttgtaccataaggcatattttcattaaaggacttaagtgctacccattaaatgtaatcatgtattccattgtttttagtaaactaaagatttgttgaaatgatgaaaccctgccaaaatttgattaactctaagctatatataatttttttttaggcaaaatctcaatatatggaagctcttagagtttaaataaaatctaatcattgaactttatatacataccctttttatctaaattgaatatggaacatctggcgctttaggactttttcaattttatacctctcttttaattcaatgtactttatttactcacagttttttttagtttttgcaattttaagacttatattatggactttatctatttgttaatctttaaaaattttctctttctggcttttttcatttttcgtaataaatttatgtttttaaacaaatataccttaatttaatttttggtcttaaatctcgtttttggtttaattttttccaactttttaccgctgttttttggtattatttctttatctaatccttaaattttcaaatttaaaacttcttgtttttccctataatgtgatcctatttttattggtatttttctaatgtttgttaactaatttttcatatttattgtaaaatataattattctttttgtaaatcttttttttgttcttggttctcttttgttaaaatttagttttntnatactttttctaaaattttcctttaaatttacttattttatctcttttttaagttttatttgttactttgtgtgtgtcattatatttatatattttttattcactttaattcatctatatattcttttcttttttttattatttaaattattatatatt

SEQ ID NO: 13036 - DNA, 1016 bp, Emericella nidulans
gctgatcttggggtgttcgcatggcctgtacaacagggctggctagggtcgacagcgatgtaatgtggtcattttcaagaccatcaagatcgtgaacgaccaaagtatgccatgagagagtggaacgtacaggatgagacgaaagagtggacaacatgattagaccgcttgacggaaatgtaaaacttgggctgaaatgatagggcctggtggatgcgattgtggtgaatgctatgttccgggttgggaacatagttgtcaattgcatttggcttaaaagctgagatattcttctagtggtagacatatgtcgatcttttagatatagtgacaaggcttgctcttcctttaaataacccgtattatcagtcctttgtgtatgaattcttcatgattattttttagttttcagacttcttaatgcgtcttttataccttaagtattgaaattttattaattctttttattttaaacattcattacatgtatgttcatttcctttatatttaattttattgatcatataactctttatttttattgttacttgattaatatttattactacaatttttttatttaaactttttataatcattattatcttctactctctaatacaagtttatttcttattactcgataaaatatatagtttttataataatatttaaattcctacacctattaactacatttattttctcattttcatattattatcaatctttttcctcattattatttctttttcttaatgctgttttaatctattattcttaataatctcaattttcactaacatataattatttcttcttatattattcttatatccataattatttaattatcactaatcttctttatatatcttcttaactaattaatatatgtttttatctctctaattaatataataattgtatgtaataatatgcttctactcttacagttactctctttattctattctttttgtctaaattatttacatataatcactatcttaata

SEQ ID NO: 13037 - DNA, 990 bp, Emericella nidulans
aaatgatctttatatatttcatggatagtattaagataatttccaaagccacaaaatgatatgagcaggagaggacaagggcctgtatctgtttctgcatgcacacattaaattgggcagaataccataattttaggtatccgatttcttaaatcttaaagtagataagaagtctttaaatactgatttctaggccctttcaggcactacgcgggaaggaagcttgttgcaattcatatcaatttctgtttgcgttggtttagtgaagaagttctgatatctgtttttatcagtcattgtttactctatcctcaagtgatattcttttctcatttttttcttcatataattttaattgcttatttaaagcgttctattagatctttattgttttgtttaattcttatcactttccataatatctctcttattttattattctctactagtttctattttctataatactcacttttattcctttcttttaatttcctacattttatctactttatttctatctatttcttcctttctcttctttatattctcttcttactagcttactatctttttttttatcatttatatagttttttctcttttttctccttttttattcattcatttctgtctctataattttcttcttatatttttatattctactttttctcatttatcttttttattctatttctttctctacgtaataacttttttttattttatacatttttccatttttactttttttattaaatatttatttttatctattatctaattttcttttttcttttctttcttagatatatttatgtttcatattatgtctattctattattcttatatctttttattcttaatctttatatcttctcatatcttctctcattattatatatattattttcaaattttattttttcacttttattctttacttattcttctctttatatttctcatttatctatatctctatt

SEQ ID NO: 13038 - DNA, 448 bp, Emericella nidulans
ttcagccagatagagatccatatgtggctcatatacctgggcaatggtctgatgtaggagatcttcaaaggtatcaagagaattctgaatgggtagcagattgtcacatagattcatgcactgggcaaaggtacttgaaacagagacaaggtactcctccttgttcgaacgatgcaattcatcaaatatcgcggtcaggaaaggataaagcacatcacggcctaccttctcgacgaatggttgggctaattggagggctgggggaaaggcacggttgataattgagacctcttcattgaaagccacacttaaccgggtaaagaatgcctgcgtctgatggagcttcaccttctgagtcaatgtatcgatacagtcgttagtttgaccaagttcggcttttctcgtgattatatgattgtgatgggtgaatagctcagaagccgagccc

SEQ ID NO: 13039 - DNA, 966 bp, Emericella nidulans
ccctatgatagcagctgcgtctaccgactggagatcagctcaccaacgcttcaaaaggccatctagttcaatacaacatcgatcgccgcgaggaacgtcactaaaagggccaaaccatcaaggaaggggctgagtgctctccaagtatcacgttcatggatcagcaagtcaatgtttcggccttcctacaagggtcaagcacgcagacttagtgcccgacataaacaagactattgcatttcggtggaatgatgaaaatacagttgaagaattagaattcccttatacgaacaaattacactccgaatggtgtggttagcgcatctgatgaagtatcatacagggtacattcagattctgagagactcggtcatacacaaaagccatccaactgcatatcaccacattcgctccacctccggcgattatattcattttgggcaggtctgccatgtgtttctcgtcccaggtgccatttttcccaatgcgacacttcttcattgatctttgcttaccctgttgggatccgccctcccagatcacccacttgtcctttaacacctttctaatccatcattctccaacacttctttccataatctggtacctaatcctgactattatcgttgactcccatcctcttacacttcttcttattcaatacttctaatttctttctttatcctatgctcttctaatccttcttctcccttctacttttcatacttctttcttcattctttttcagactctctattaatctctcccatatcttaaatttattttcttacatatttctctattacctactcttctttaaattctctacttacaatctattttattcttctttctctctttcttcctctctcttatcttatactttctattctctacttattaaaacgtttcttcactattcttctctctcatcttttattcttcttaatgcatccatatttcccc

SEQ ID NO: 13040 - DNA, 481 bp, Emericella nidulans
  unsure (1)..(481): unsure at all n locations
ggaaaaaattaattaattaaaacccngtgaaacaaaaaaaaaaaaaaatgtgatttaaaaatatcgaaaaacccaaacaaaaaaaaaaaaaaaaaaaaaaaaaaaaaaaaaaaaaaaaaaaaacaaaaaaaaaaaaaaaaaaaaaaaaaaaaaaaaaaaaaaaaacaaaaacaaaaaaaaaaaaaaaaaaaaaaaaaaaaaaaacacaaaaaaaaaaaaaaaaaaaaaaaaaaaacaaaaaaaaaaaaaaaaaaaaaaaaaaaaaacaaaaaaaaaaaaaacaaaacaaaacacataaaaaacaaaaaaaaaaaacaacaacaaaacaaaaaaaacaaaaaaaacaaaaaaaaaataaaaaaaaaaaaaaaaacaaaacaaaaaaacaaaaaaacaaaaaaaaaaacaaaaaaacaaacacaaaacaaaaaaaaaaaaaaacaaaaaaaaacaacacaaaaaaaaaataaaacaaaaaaca

SEQ ID NO: 13041 - DNA, 941 bp, Emericella nidulans
  unsure (1)..(941): unsure at all n locations
ccggaagtgacactcaacatgatcgctgattgtctagtgtcgctgcaattgctccttgacaggcatgcatttagaaaatatcccagctaaaaaccagcttaattactgtatgacccgtgattctcctatgatgctcccagtatctatgccaccatatgaacgtgtaatcattcctgtcagtccactgttcaaaactatcgcagggtgctaactagaacctgtaaagctatcaaatgtgtacagtgtaccatagaagctaaggctagggtttcaactaccgntatattacatggttcctggcaattcacaataacacgaaacgatatcaaagaagaatgaacacgccttcttcggatttgggatcaatggtgcctagactaccttagattcaatttcttttcagcaaaatcgagggagattgaacgcgtgccgagcagtcagctattggagtgccttactgagcctaatacccatgtcttacgccggccggataatagctttaagagggacatagctattgcttgtatactgaagcggtgaatttgcgatatattgagcttacgctgttcaacatggtcccgctaaagcagacttacatttagacaccattcaagaggaccaacgccacccggatatattaacatcgaagttagtgataaaacataacgggccgacgttctgttgcccccacctatattgccaggttaagcaaaactgctaattgccctgttcttaaccgaaacccaaatccgggaaccttaaaaccttgcggcttcaaaagattctcctgtaccaagtgaaaaaatatgcctttttttcttctcattgctgtggggcgcaaaggatctttcctacactagggtcattcttatctattcattttacattccccctctttttatttaacttactatctcttttatctatgttctcctctactc

SEQ ID NO: 13042 - DNA, 566 bp, Emericella nidulans
tgagcaaaacaattcacaacaccaacaattgactccagccgttggttatgtgaatagtaatgcacaattgctagtatctatgttttctttattcccccgtccacttcatcttttctatattttcctttcattctacttaaattcttattaacttcctttcttttttataacttttttaattttttgctatttctttttttttttctttttttcttctacttttttttttttttctttttatataacatactattctttcctcttatctctatctatctttattttttattaatcttcttttttattactaatattatattcttaacttttctcccacttatctccttctatcttttacttttctcctttttatttttcattttttttattttcttaaccttctactttttttcttattcttttatatctaattatataatattcttccttctccctcctttccttctatcttttcctttatttcttataccttaactattccctctaatttaccattacttctctactatttacttttatttcttccctcttatctttctctcttt

SEQ ID NO: 13043 - DNA, 523 bp, Emericella nidulans
  unsure (1)..(523): unsure at all n locations
tacacatacgatttaggtgacactatagaatactaggatcctgtagaatcctatcaaaaaactccgtcgtttttatcccattcagctcctgaatagccttaggccgccctcctcaacatcctcgtcactcttctctccatcctcatcatcactaacatcgtcctctcgtaatattccactcgcactcctcccgagcagacttgcaaagaattcctcacgcgccctcttcgtccaagtacccctctcctcaggcgccatgaagttctgcaatttctcatggacatcaaagcgcatttttcggcccttcgaggcccgcgtgtccacctcgcgcttcactttgtcctttcgcataccagtaatggggtggattgcgcccgcaccattgcgtgacggcaaaatgtgaagggtgtcaagcccgttggttatcgcgtcggtggaggacatgcgctgggagacgaggtctcggaggaggtattggtngatgatcctgctttgttaccccttcctcttaagctgcctattt

SEQ ID NO: 13044 - DNA, 1000 bp, Emericella nidulans
ggagcgataatggagaaatccgccggatcgatatggtctttcttgaaagcactttcggtgtaaagactaaaacattttccggggcgagtacgtacagtacgaccagctctttgttgcgccgaggctttcgagatcggagaaactagaagggattcggcacgaatacagtgattgtaaattttctgctttgagaagcccggatccacaacatagacaataccgtcaatggtaagcgaagtctccgcaatgttggtagacacgatgaccttccttcccgggcgacctcctgggcgggggggaggaagggctatgttcgaaaatactttgttgcatatgcggagggagactaccatagagagttgtagacctttaatgggccagcatgggcctgtttaataataacatcaccctcgagagagattttgagcgctgcatcctcattatactactgttctggcacgaatagaagaatatcaccctcgtttgcgaggggaggatctgaaaaacagtgcgaatggcgggcgtcacctagtcttgctaaggcggggggtatggaaaatctctctggggggattctaccgtgacagaagcaacggaccttacttatgtttgttagaatttagtgttctacagggggacatccaatctatttaatcctttggactgtcttttcttggaaaccctgagaaattgttggcatgtcattgcggcccttcttataaattgtcaaatgtatttagatcttataaatcttgggtacctcccatttcgtaatggttgggttgaagctcaaggaacttacccttttaagatatttattttcccggggaaatgtcaacaattggtgttgcacattggtgtggacttttgatggaaattttacactcaatcactttcttttttatcataacctatatttctttatattattatctctctctttaaaccttttttattttatatattttttattcattttatcattatttatttatttaat

SEQ ID NO: 13045 - DNA, 525 bp, Emericella nidulans
tcagcgaagaagagatagatgcaagacgcatcactttttggggttgttccccctccgacacgccttggtgcttttccatccttccccccgacttatcgctcttcttctctcccttccatcttcttcctttcttcacctcctccttcctttcctccccttttcccctctcttttctcttctccttttctcctctctctcttctctttttctttctcctctcttctcccctccttctcttttctcctcttctaccctctctttcttctcttcctcttctccttcttttcctctttccccttctctttcctcatcctctatctcctttttatctctctccctcatacctctctctttctcctcctttctttctcctccctttcttcttttttttctctctctccctctcatctccttctcttctcctctactctctttctcctcttccctttctcctttcctctctcctcctatcctctctttttctttcttctccttctcctccctcctttttccttttctttcttc

SEQ ID NO: 13046 - DNA, 582 bp, Emericella nidulans
attggtctgcttcctctattgacattgagtgagtaggattcgcagagtctgcattttaagcataaatatttctgttataaatagatcagatcaggcagcagcatctgctaaaacgaatggttggctacctaccgctgctgcagactatattgagaacctttggatcggagctccattgtttcttttactgcttaatcgaacggcgttagcatgtccagtcttggaggtaagtgttcttactaatattttcaaagctcaaacttatgccacccagactcagaaacgatccgcatccttgtctcaacagacaaccatgtcggctacaatgagagagaccctatcaggggcgatgatagctggaaaagcttccacgaagggatgtgcctggcgaaacaacatgatgtggatatggtgcttctggcgggtgatcttttccatgagaacaagccttcccggaaatccatgtaccaagtgatgcgctcaatccgaatgaactgtctcggtgataagccttgtgagctacaactgcttagtgatgcaagcgaaaatttccaaggtgccttcaccatgtcaactataaga

SEQ ID NO: 13047 - DNA, 537 bp, Emericella nidulans
actcaatcgggccaattccctgcgcatctcttcatagtcctccatggcaccgcgccgagagacgggctctgtgccctgctctccccactggccctcagacgaggcatcagtgtcgctgctagtgccggacaccatcgtgctgtctgacggttcttcgcccgtgaccgtagggagttgggtgagatgagcattgtcggccatgatgacctgctcgcagattaggtgatgggtattaggtccagtcaatcagatcgattcgttctgaataaattgtttatgcgtggttaggggagcgtggaagttaagagaatgtttataatcaggcgtgattattatgtatagcgggtataacaggtgtaagggtatagcaagaggtgctgatatgtacaacagaacaattaggtattaaagaaaagaagagtggagagggtgcagccttacgcccatagaaggacgacgagctcaagagagatcaacgaagagagaaaaaggagggattgatcaagagatcagagagggagacatgcgtcatggtta

SEQ ID NO: 13048 - DNA, 487 bp, Emericella nidulans
gggagatagaaagacttaccggaggatccttgttcctgcactcacaaagcggcgctgagagaacgcaacaggccacatgggaacctgactgtttatcttggccaaagccacaaataccaggagtaactcaggaacaaacgtgagactgaggggagaatagtaatgccagtgttgttccctgggagctgaaccttgggaacgataattaattagcggatgttttggactctccctctctgggtctccacaggccgccactaagtatctgaagcatgacgcactggccgactgcgcttctgaatctccaatcagccttaacagcctgatgattccagaaaccgttgaagaatattgaatatcggcgagtatttcaatacacgaatagaatggtttgagtagatattttactcgggttgctaaatcaatgtgtgggcggggtaagcgatgggaagaatcgcagttatcgttgtatgaaatgggcttgata

SEQ ID NO: 13049 - DNA, 285 bp, Emericella nidulans
cgggcgacgacccccggggggagacgggaacgaaaaaagacgcggtcaccgggggcgccggagacgcacggagaagggccagcaggaccgccggcggaaccagagcgcgagggcctgcagcggaagaggaagaaaggaggagccgccgaacaaaagagacaacccggcaagccaaaacgcgcgacgcccacgccaggcaaccagcaagccaggcgaaaggacaaaaaggcgaaagcccacgagagcagcgggcaagaggccccagccaagcacccgccgccgagg

SEQ ID NO: 13050 - DNA, 964 bp, Emericella nidulans
  unsure (1)..(964): unsure at all n locations
caggaaaaaaaaaanatagtgaaaaggagaagaggatgttgagaagaagaagggagaaaanggggagtgtttgtaagaaagaaaggagggggtaaaagaaaaaaaaaaaattataaaggatagtgaaaaaggaggaaaagagaagaaaaaaaaaaaaggaagaaaaaggaaaaaaaaatgagagaaagataaaaaaaagaaaggaaaaggaaagaaaaaaaaagagaaagaaaggaaagaaaaaaaagaaaaaagggaaaaagaagagaaggaagaagaatagaagaaaataaaaggaaaaggaagaaaaaaggagaaaaaggggaaagagaggggtgaaaaagggaagaaaaggaaaaaagagaagaaagggttaggaaagaaagaggaaaaaagaaaaaaagaaatggggaaaagaggggaataagaaaaaataaaaaaggaaggaaaaaaggaaaaaaaaaaggaaaagagaagaataaaaaagaaaaaaaaaaatgaaaaagaaatgaaagagagaagaaaaagagaggaaatgagaaaaggggaaaaaaaaaaaaaaaaaagaaaaaaaaggagaagagatataaggaaaaaaaaaaaggaaaaaaaggaaaaaggagaaaaaggattagaaagaggggaaaaaaaagaaaagaaaaagagaaaaaaaaagggaaagaggagaggaaaaggaaaaaggaaaaataaaaaaagaaaagaagggagaaatttaaaaaaaaggaaaggaggaaaaaagggaaaaaaaaaaaaaaggaagagagaggaaaagaaaaaaagaagggaaaggagggaaaaaatatagaaagaggaaaaaggggaaagaaaggtaaagagaaaaaaaaaaaaaaaaaataaagaaaaaaaaggaaaaaataaaaaatagaggaaaaagaaagagagaaagaaaaaaaaaaagaaggaagaaaaaaaaagagagaaa

SEQ ID NO: 13051 - DNA, 464 bp, Emericella nidulans
cgttattatctgctctccagaggagatggttggagtggtccgtctagccgccaaagtccatgccaacatggccaatggcaagaagctgccacttgagtctctagaactggatcgccgtatcgtttcgcgagtcaggcaacgcgtcgtgcttgccgcccgtatcaccgactccaacatcgcgaaagagaagatcaccacagaggacaactggctccggaatgctgctgaagacctcggtgtcgagtatgacagtgacgaattcgaccaggccaagggatggggtcgcgggcgtggtcgtggacggcaagaacgtgaccgacaagtcggcagcacatccaaggctgagctggccggtcttcgtgccgagttgaaggaactcctatcccagcgggtgaacctcggggtcagcgaacggtatctcacttccgggcgggttgatattgaggcgttgctacgtgaggagg

SEQ ID NO: 13052 - DNA, 1044 bp, Emericella nidulans
agatttatttaggggatgaaagtttggattttttactgcacgaaggttagacggggatttttttgttggttcgatggcattagatgtcttttgataaacatgttttgttctttcttttctatatctttctttactgtttttttatcttgtttatttatttttatatttatttattaatttttttttttttttttatattttatgattttattttttttttcttatgtatttttttttttattttatttttattatattttttttctttttatatcttttttatttttttttattactttattcattttttatttttttattatttaattttattattttatttatattttttatctattttttattacttttacttttattactgtattatgtataatttttcttatttttgtaattcttatctttatttttcttattcatcttatttgtttaatattctctgttgatatttatttgtttttatatattatttttttatttctttttatttgtttcttctctatctttatcattttttatttttttatctttatatttttaattttatttctttctttattttaatatctttattatttatctttttattattttttttatttttttattttttttattttatttttcatttttattaattttctttgatttttaatctatttttattttactctattcaattttatatctctatctttctttctttcattttttttatattttatttatttttatatctttattttctttctctctatcattttattgattctcttacttttttactattttttatattttcctttttttttgtcattaatttatctttttattcgttagttatttcttttattttatcttactctacttttatatcacttttatataattttttatcttattttctattttctttcttacttcttttatctattttttcatttttctttccttccttttctttaatatattctctttcttttcctaagtctatttttattatactttatcattacacatacc

SEQ ID NO: 13053 - DNA, 869 bp, Emericella nidulans
  unsure (1)..(869): unsure at all n locations
cgttgggtgaccgagccccaagtgatttgccgcgttgccggcgtgccgctggcctgttccccgttaaagttcaggcccgataatatctcagtatggctactggagagcctcggcctgcttcaagggtgagggaattattcgatttcctgttctcgccaagaacatgaaagcaacgacagcacgaccaaaatagaaattgagaggggcagaattctccgcaccgggaagacccagagtatcgctgcttagagactccagtacggcgtactactgtacactgggtcccacggccgngaagagccgcttgggcgggctggcaattagcatggcagtcatgctcattaagcagccggtcgtggctttctacgttacaaggagcttattcggataacactcctgaaatggaatggaatcccagctgcgttggcaaccggaacgcttcaattagccgggttatgtctttaagaagaaaatccaactgcaccgttcctttgttagcgcttcgccggcgcgacggaagcctcccggactagggccaatacccaacgcctcctcccccattgcttacctttggactgtgacgcaccaacctttattggcctttattcagcgggaaaggttacccacccgagtggactgtcctccggaaacctgccaacaggggtttaagcctcttagtctaagtcaagaaccgactgcccccttgcagtcaccatttcttttaggctcccacttcctaaattaccccttggggttacccataaaatgtcattctcccctcacgtcccattacaactcctttttcactctctccttcacacattctttacctcttcccctctcattttctcccccccttctcctttacc

SEQ ID NO: 13054 - DNA, 700 bp, Emericella nidulans
ccttgctgacaacacgcaggagcagcgagaatgaggacattgctgagaagggtgctaccgaacacgtcgatttgaacaagaacacctcggccaagtaggtagacatccagtatatagacgttctgctgacttctcgcagaatcaagaatcctcttgcagacctgactgaggctcaggtgctccgcgacgtcgaggagtttgcccgcgaacatgacctgaccgatctccttccaaatctacgcaaaggggccctgatcgctcgggattcggagaattatagatctgtccctggaatcacccctcaggatatccgtgctatccaggacgaaaccgaccacaaatggcgtcagcctcgtgcactctactttaccatcattctctgctccataggagctgccgttcagtaagtccatcctgcatttcggcctaggtaagcaaagctaacagtcaacaggggctggaccaaacggggagcaatggtattaatctactttattatgatacgaacccccctaacagggtcccttaggggctaacctaagcatgccctctgctctgggaatccccacgaaggataacccaaacgccacactgaaccagtggctcattggcattatcaatgcgtaagtgccttaacagatcgaaggacggcgtacttggcttacatttcaaagcggcccttacattggtagcgctcttt

SEQ ID NO: 13055 - DNA, 120 bp, Emericella nidulans
gaagcatcagaaacccagcgatgtcctcatgcaagagactcgcatctaaaatgataacgagtctcttccattaatgccaatagctttagtgatcagcaggtgagtggctacacgagtacg

SEQ ID NO: 13056 - DNA, 626 bp, Emericella nidulans
gtacccagtgcattcggttgtgtcacatgagtaggccccagattgccagtgccttctgggtggtgttcaaccaccttctagctcgtctgtataacccggcgagtggctgctagtggctccaggagaggccaagaatccggatcaagatccctagagcggagccaagctcataaccgtgggttatcgaagccgctactcgagttgcacgaactatcgtggttactagtatcgattttagccaggtgaccgaagtttgcaacgaaacttgtatgcaggggctgtagtagagttatatagtgtgggtatggaggcctctactaggtctgtgatcaggcggtcagagtccgtccttacgtgttcatattccgcactcatatttggccgagcgctcattggttgcaggccaagcacatattttgaagaacttggacgatggtcttactatagactgaccaagtgaaaaagtcaattggacctttaactctccgtctgtattggctgaacatcaaggtctatgtcccctgtgtaattatttttccgaacctgcaccgtacataaccctttctaatcccttctcagtcattgatatttgagatttatggtcggttgaaacatggcgatcccct

SEQ ID NO: 13057 - DNA, 798 bp, Emericella nidulans
  unsure (1)..(798): unsure at all n locations
aaaaaaaaaaagaagaaaaagaaaaaacatttcaaaactaaaagaaaaaaaaaaaaaaacaaaataatataataataatatatccaaaaannccagaatatgaccatangaattataaaaaaaaacccggnggattaaanaaaaaanaattaaanataaaaaaaaaaagtaataaaagaagaaaagaaaaaaaaaaaaagcgaatattaaaaaaaaaaaaagggataaaaaaaaaaagcaaacataaaaaaaaataaaaaaaataaaataaataaaaaggaaaagaaaacaaaaaaaaaaaaaaaaaagaaaaaaaaaaaaaaaaagataaaaaaaaaacaaaaaaaaaaaaaaaaaaaaaaaggtaaatacaaatataaataaaataaaagaaaaaaaaaaaaaatataaaacaaagtaagaaaaaaaaaaaaaataaataaaaaaataagagaaataaaaaaagaaaaaaaaaaaaagaaaaaaaaaagagcacaaaaataaaaaaaattaaaaaaaaaaaaaaagaaaaagaaaataaataaattataaaagtaaacaaaaaaataatacaacaaacagataaacaaaaaaaaaaagaaatataaaaaaataaaataaaagagaaagaaaaaaagaaagaaaaaaaatataagaaaaaaagaaaaaaaaaaataaaatgaaaaaaaaaaatataaaaagtaaaaaaaaaaaaaagaaaaaaaaatataaaaaaaaaaaaaaaaaaaatgataaacaataaaataaaaaaaaaaataaaattaaaatacaaaataa

SEQ ID NO: 13058 - DNA, 547 bp, Emericella nidulans
cgcggccgcataatacgactcactatagggatcgcgggtctggagcgactccgtgattcgctgagcaccattcagggcctgacatgggcgtaccccaaggcgaatgtctccatggccgagcacgtgaactcgatggctaagaccggcaggggcagcaaccactggatgggatcttgcaaaatgggtcccgatgacggacgtgacggaggttccagtgttgtcgaccttaatacgaaggtgtacggtatggataacctgtttgtggtcgatgctagtatcttccctggtatgatcagcacgaatccctcggcttatatcaccgtcgttgcggagcgagccgcggagaggatccttgcattgcaagggtagacgacaggttaatcaggctgtttgcaaagttggttgagtttttgtctaatagagagtttgctcggacgttcctcttcaatcacagttcactttccttcataaatggcccaggttggaggcacacatgcttttgctcgacgtatgcaccattacctaaataactcgcgtagattgtctc

SEQ ID NO: 13059 - DNA, 478 bp, Emericella nidulans
ccaactgcagccagggagtgatgttgaagatgaaatctcccgtatacaaccaacagtggccccagagcaacaacaatagcagctacatctgcttgtatttcagatatagccttttcaccgttaacaacccatccagaatcgaggcctggaatcccaacagccagctcttccactaatctgagggcgtccaggtaccgggtaccggttacaggcccctatgaaactcttgtatttccattgaccccggcgaacacttcttcgcagtcagaatttccagctgcgagctcgttcaatcatctgaaggttcacagtctccagtcgctgccttcacgcacttttgaatatgatgttttccatcgagccctgcaaacccttatgcgccgataccaacgcgtgcgttcaatcttcttgtagcccctaccgatccagggcttcttgacggactggcactctcagcagctgatctgagagttttcgt

SEQ ID NO: 13060 - DNA, 913 bp, Emericella nidulans
  unsure (1)..(913): unsure at all n locations
tctggtcatgttccgccgacacagaatccataatcatatcttcgtcagacccagcgccagtcttagcatctggacccgagccccctggcgttgccactgtttgttgaccttgaccttggtctggacttgttgatgaagattgtgacggaacagagatcggcggattgggcacccatgagagctgaacctcgccgactgagggaatattgcgggggccaaacatgaatttttcggcttggtagcgctccttgaaggagacaatgagagagttttcgtcgttcgggttgggggttatggattcatattcgctgacgccctgaattcgttagttagatttacaaatgttcccagtactcaggttcagaagcatatgaaaaaggggaaaggagtggatgggaagttctagacatacaatgagaaactgccagaaccgcttattctgctcagaatgcggtttaatgccagagccagcaatgcgtttgggcgttgatgggctcaggcgcctcccggctcggtgagggtacccactttccctgttaggaccgcgggagttggtctaacctggcccggatgggttccgccatgcgagccctttctacgtgaccatgccgttcaaaaaaggtgttgtaataaggtttttttccttaaaataatttctccttgttttgtttccctctcttgttggtcttgaatttctatatttcctttaacttctttttttgtttatttactttcttccactttttttattctttcttatctttacttatcctttttattttctttttttctcttttttttttcttttctttattatttactctttattctttcttctttttctttttttctttttantatctatttttatttctctttttttcattctccttcctctttttcatattgtata

SEQ ID NO: 13061 - DNA, 304 bp, Emericella nidulans
ctcaaacatgatgaattcgcggccgcataatacgactcactatagggatctctctttttcttttgcctaccaaccccccttttgggttggccttaattttaaccatgtcaaaaccggccaaggccctccagatcccaaaacaattttcaacaaccgaatcgctcgcagatatagtagcaagggtacagagcccttcgccttaccgctcttcaacgcagtcccgaagcattcacttcgacctacgcccgcgaagcccagttcgacgacaagacctggacaattcgcgtcttgaatccactagcaa

SEQ ID NO: 13062 - DNA, 452 bp, Emericella nidulans
cgagcgcactctgtgtggtttacctctggatggtcgacaatggacatgtgcgggtggggcatactagctggttccgggcggtggctggggaccgctcgcctgggcggttggatgctctttgcagggggccaatccatgcttgttttcagtctacttacagtgtagcgactactcatcgtgctacgtaacgcacttgatctatgggccttgcaatatcttctcgtgcctcagccgtttaaacacacaatccttgtgctgaaggctgacaacataaacatgctgcacctggcactttaaataatgctgatgcttcttatgatgctgatactacacaccttcctaaggagacgcaccatgtggcttcttgcactgggcaatggtagcaactacatgctacgcaggatacttgagctatcgctctgtatagggacttatgacacgcttgattagac

SEQ ID NO: 13063 - DNA, 406 bp, Emericella nidulans
  unsure (1)..(406): unsure at all n locations
accgttttgacgttggcggggagtcctcacatgctcacaaagctgagacaccttattaggtgaggatgctgtcacagacggccgaacggtgggcaatcgtgataagtttgcctacattgaaaatctcccgcgacatgaggtactgacctatcaagacaggggttgagcacgactgtcagcacattctggatagcggcgttacagtcaatgtacatgcggatactagatgacacgagctatggagcctncgtatagttgtatcgcgacccgtggatcattacggcattatggaggtcttcaccattggcatgcatctgagtgcccggctgctgatggacgctgctcatgaggcgtacgaggatctgctccaatgatgatactggaacatgcgcggcctacagctgac

SEQ ID NO: 13064 - DNA, 516 bp, Emericella nidulans
cgaatatcgtgggagatgacggcaagggtctggcgggtattcagcgcccggaatgcgagaaggaacatcttgaggctttcctcaaggaccttggatacccatttaccgaggagacgcaatccgaaacttacaagactttccttcgtcgttgaagatacttgaatatgcggatcggagtcatgccttgcccactatacagagcgagttaattggcgtttggattggttcagggcggaactaggtaatacttttgctttgtttgtgcattcattgtagtatagttgcaaacttcttgtttatgccaacttttagaccttttattttatgagcccctgctcactatatcaagagagttaccgagcaattcagcatcttttctcataatatcatttgactgttttcttctactaatgatcaacttgattaaaccaagcactggtactctactaggatctcaacatatgtgctctgaacaattcagctgtgctatgaagcctccctaaccgtggacgtcaa

SEQ ID NO: 13065 - DNA, 957 bp, Emericella nidulans
  unsure (1)..(957): unsure at all n locations
aaaaaaaaaananaaatttttttttttttataaaaaccaggtgggggaaaaacccccnaaacaaaaaaananaaanaaaaaaagaaaaaaaaacaaacaaaaacaaaacaaaaaaaaaaaaaaaaaccaaaaaaaaaaacaaaaaccaaaaacaaaaaaagaaaaaaaaacaaaacaaacaaaaaacaaaaaaaaaaacaaaaaaacaaacaaacaaaaacaaacaaaaaaaaaacaaaaaaaaaaaacaacccaaaaaaaaaagaaaaaacaaaaaaaaaaaaaaaaaacaaaaaagaacaaaacaaaccaaaaacaaaaaaaaaaaaaagaaacaaaaaaaaaaaaaaaaaaaaaaaaacaacaaaaaaaaaaaaaaaaaaaaacaacaacaaacaaccaaaaacaaaaaaaaaaaacaacacagagaaaaaaaaaaaaaaaaaacaaaaaaaaaaaaaaaacaaaaaaaagcaaaaaagaacaaaaaaaaaacaaaaaaaaaacagaaccaacaaaaaacaaaaaaaaaaaaaaaacccccaaaaaaacaaaaaacaaaaaacaacaacaaaaaaaaaaaagaagaaaaaaaaaaaacaaaaaaaaagaaaaaaacaaaaaaaccccccacaaaaaaaaaaaaaacaaaaccaaaaagaaaaaaaaacaaacaaaaaaaaaacacgacacaagaaaaaaaaaaagaagaaaaaaaaaaacaaaaaaaaacaacgacaaaaaaaaaaaaaaaaacaaaaacaacacaaacgaacaaaacacaaacaaaaccacacaacacaaaaaaaaacaaaacaaaaacaaaacaaaaaaaaaaacaaaaaacaacaagaaaaaaaaaaaaaaaaaaaaaacaaaacaaaaaaaaacaaaaaaacaaacaaaggcaaaacaacaaaaaaacgaaaacaaaaaccaaaaaaaaaaaaaaaaaaa

SEQ ID NO: 13066 - DNA, 502 bp, Emericella nidulans
  unsure (1)..(502): unsure at all n locations
tctgcgcctggatctcgcggtagatgtcgcagaaggtcacgccaggctcgacggtgtagtaggaatagcggtcgttcatctcgaggacttttcgcatgcattgcaggtcaaggatgatagagccctgcccggattagtacgggatctttgacgaagaagtcttgcttaccttcaccctcgctgccgggcctccatatccaaggttcttgcctcgggataccgtccagagtggaattttgtgtttgttgcagatcttcaggatagcctggatgtgctcaacagtgaccgggaataatgtggcagagcttccacgcttctcctgctcatcgctctgctctgcgtacggatctatatagcgcacgggntgctcgtggccgcacaggactccctcgtcgccaaggatggatcggaactgctgcagcacgtcggcccaggtcggcgcgtcgagcccggcgggagaatattgactgttggtgacttggatgccgttccacccatgtgg

SEQ ID NO: 13067 - DNA, 799 bp, Emericella nidulans
  unsure (1)..(799): unsure at all n locations
aataaaaaaaaaaaaaaaaataaaaaaaaaaaataaaaaaaaaaaaaaaaaaaaaaaaaataaaataaaaaaaaaaaaaaaataaaaaaaaaaaaaaaaaaaaaaaaaaaanaaaaaaaaaaataaaaaaaaaataaaaaataaaaaaaaaaaaaaaataaaaaaaaaaaaaaaaaaaaaaaaaaaaaaaaaaaaaaaaaaaaaaanaaaaaaaaaaaaaaaaaaaaaaaaaaaaaaaaaaaataaaaaaaaaaaaaaaaaaaaaaaaaaaaaagaaaaaaaaaaaaaaatnaaaaaaataaaaaaaaataaaaaaaaaaaaaaaaaaaattaaaaaaaaaaaaaaaaaaaaaaaaaaaatataaaaaantaaaaaaaaaaaaaaaaaanttaaaaaaagaaataaaaaaaaaaaaaaaanaaaaaaaaaaaaaaaaaaaaaaaaaaaaataaaaaaaaataaaaaaaataaaattaaaataaaaaaaaaataaaaaaaaaaaaaataaaaaaaaaataaaaagaaaaaaataaaaataaaaaaaaaaaaaaaaaanaaataaaaaaaagaaaaagaaaagaaaaaaagaaagaaaaaggaagaaaaaaaaaaaaaggtaagaagaagaaaaataaagggaagaaaaaaaaaagagagaaaaaaaaaaataaaagaaaagaagggaaaaaagaaaaaggagaagaaaaaagaaaaaaaaagagaaagaaaaaaagaaagataaaagaaaaaaagagaagaaaaaaaagaaaagaaatgaggagaaaaaaaaaaaaaaaa

SEQ ID NO: 13068 - DNA, 496 bp, Emericella nidulans
cgttcagatccctttccggtggcttcctaacaaacatgagaagggggtaaaggagtctttccagctcggaggactttttggtccaattgatctggcgatcagctcttagaaccttgctgcaatatctcttatccgattgcggtgttcctcacgctgagttctagccaattggcaaatgaaaatgcaaagggattgttgaattgccagtaacgtgttttcaagtttaccagaaagtgagtcacccatatggaccgtactccactggcatgcatttcctagaccacgtatcctgtccccctttttgacgccaggttactgttgcctggtcttttgacaggtcaatccgcgaaatttctgactgcagcattgccacaccaaagccgggaggagccgagtgtgatgggtgcggttcgtcagtggctattatcatatttgtttgttttcctttcctactgccttttcaaggttcacaagctagttcgagactatttaacga

SEQ ID NO: 13069 - DNA, 948 bp, Emericella nidulans
  unsure (1)..(948): unsure at all n locations
aaaaaaaaaaaaaaaaaataaaattaaaaaaaaaaaaaaaaaaataaaaaaaaaaaaaaaaaaaaaaaataaaaaaaaaaataaaaaataaatataaaaaaaaaatanaaaaaaaattaaataaaaaaaaaaaaattaaataaaaaaaaaataaaataaataaaaaaaaaataaatattaaaaaaataaaaaaaaaaaaaaaaaaataaaaaataaaaaaaaaaaaaaataaataaaaaaaaaaaaaaataaaaaaaaaaaaaaaaaaaaaaataaaaaaaaaaaaaaaaaaaaaatataaaaaaaaaaaaaaaaaaaattatataaatnaaaaaaataaaataaaaaataaataaaaaaaaaaaaaaaaataaaaaaataaaaaaaaaaatatgaaaaaataaataattaaaaaaaaaatataaaataaaaaaataaaaaataatanaaaaaaagaaaaaaaaatataataaaaaaaaaaaaataaaaaaaataaaaaaaaaaaaaaaaatataataaaaaaataaanaaaaaaaataaaaaaaaatatataaaaaaaaaaaaaaaaaaaaantataataataaaaaaataaaaaaaaaaaaaaattaaaataagataataaaaaaaataaaataaatnaaaaaaaanaataaaaaaaaaaaaataaaaaaaaataaaaattaataaaaaaaaaaataaaaaaaaaaaaaaaaataaaaaaaaataaataaaaaataaaataaaaaaaaaaaaaaataaaaataaaaaaaaattaaaaaaaaaaattgaaaaaaaaagagaagagaaaaataatataaagaatagaaagaaaaaaaagagaaaaaaaaaaagaagaaaaaagaagaagaaaaaaaagtatagaaaaaaaaaataaataaaaaaaagggtgtaaaaagaaaataaaaaagtaaaaaaaaaaaaagaaa

SEQ ID NO: 13070 - DNA, 885 bp, Emericella nidulans
acacaccacacacaccacgcaccaatccaccacccacccacgcccacacacccctcaaacaccctcatccaccacctcctccgcccccaccccacccccacacccatcaccaccccacccacaccccacatccccaacccccaaccccacccccccccccaccccgacccccaccccaccctccccccccccccccaacccccccaccacccaccgaccccccccccccacccacccccccccccgcccgaccccccccccccgcccacccacacgcactccaccccccaccccccccccacgaccccccccccccccccgccccacgcccacccccaccccaccccccacccccacccacaccctcccacacaagcccccccccccctgcacacagcaaccaccccaccccccaaccccctccccccaccacacccctacccccaaccccaacccacacccccacccacccctacccaccccccacacccccccaccaccccaccccccgcacacagccccccccacccccaacccccgccccccccccacaccaacacatacccccccccaacctcacaccacaccccccaccaccccctccacccaccgcccccccccaccccatcccacacccccaacccccaaaccccccacaccaccaccaccccagcccaccccccacagacaccccccccccccctacacacccaccccaccccgcacacaccaactccacccccgacccaccaccaccaaccaccgcccaccaccatcacccaccccccatcacccacaccaccacccccccccgacccccccagcccaccccacctccccccacccccacgccccacccacccacccctcccccacccccccccc

SEQ ID NO: 13071 - DNA, 561 bp, Emericella nidulans
ccgccgctcgttttctagctccgccaccagggcggaggagcttgacataagtttacccgcgctgctgagtgagccattgcgcacggggtagcctacattcggccgagcagtaggatcaaacgggatcgatgtggaaggtgtgatggagaatgaggtactaggtatggaaggaggcattggtgagggcagcggagaccggccgccgtcggagatttcggtgcttgaagattccgcgccaggagacgtagctgccctccagccaaagaaggaactgattttgctccccggtgttttgggctgccgggggtcgttcccgccactggacatactccgcgcattagaatcaatgtgcagaggtggtggcctgttcgttggcgggtgcaaggccatggttgcggcgcgtttgtagtttaatcggaaagggagaaccggaatgaacggttcgcttaccagacggttttttggggcgtccattcggaattgcaattttatagattggtttttcgtcaacctgccgtgctgtcgtcgttccatcaccttaccgtaaggcgaggttttttt

SEQ ID NO: 13072 - DNA, 747 bp, Emericella nidulans
tctgcagattgatgcgacggggcactttttcgggcagtgtcgtcactctgcagaccgacctggtcgactggctctcattatcccaccgtatatgatcttatgcagtgctagcctgcgatggcttcaagaccattatccgttctgctctgcagcgtcgctaatatattagtgtcttgccttgctgttgtcaggtatattcgaccatatattaattacatgtagtgaaagactccgagtctgtagaccgcctctccatcggcttgagccgtcggccccgtctgcctctggccattcatgtctctgatgacgagtcttcgtggtaaggattgttcctgggtacgaagtcgtccccctcgaaattccaatgattttgattaggtcatagagtctcaagaggtcacaatatgactacagacggtatatgtaatcacgaatgcttgattcgactgaacggccttcagagaccacagagaccacagaacctcaaaaggcacaaaggcacaaggcactgatcgctcttgagaccggccactgccgggtacagcgtccagtcttccgcgccggcgtggagggcggtccccggcacaagtcgagttggacatttttattatcataattgcatatttgcattaagtgaaacacggggggccgggctcagggcgaaccctggttgatgcatccaatttaacttgggcttggcatggcttgtggttttttgccaaattacaccgaaacaacccaattttt

SEQ ID NO: 13073 - DNA, 418 bp, Emericella nidulans
gttgtaacagacctgtatacgagacacggcttttggttagcccaggggtgcatgattagtgatcgacggacgtgtctgcccgagattagacccacaaagccatgcctagcaacaccagggactagaggaataatagaatgcagggctggagccggggatgccgatgctaaaacgcgcatggcacgagtaacgtactatgtaggctcatatgagtcgtagaagccatcatttaaaatgccgccatgatttaagacgatcaagcttgacacgctaaatgtgaacccagtgtctcaccatatgacacggccaataccatgccataaaataagacatgagtgggaccgaagaggctatacagcctatggcatcgtggcagttcttacaccgcgcaaagaatgatgagcactgcagcttgacc

SEQ ID NO: 13074 - DNA, 914 bp, Emericella nidulans
gtagtggaaagaataagagtaggagtgaagatttaaaaaggagagagttgtgtaaaaatataaagaaaaaaagtaggaaaagggtgagtgtagagagtataataagagagaggagaggagtggagaaataataggaaatggattaagatatactagaaggatgaatgaagaaaagagaaagtgataaagagagaaaatgagtgaggaagaattataaggtatggaaataagattacggaggaatacagataagggagagagtgtatatgggataaaggttagggagaagaaaggagtaatataagggggaagaaagcagatgtagcgtagagagggaaagaggaataagtagggaagagggttagggtatatgaacaagagtaaaattcaaaaaacctagagcgaccataagagtgcatacggaaactatacaaaactgggtcttgtggagatccgaccgggtatcccaataaagggcgtggtgtttttactagaatggaccaaaacaacccccggcgtgtttattgaccgcggccacaatggtaagtactccatcattcgtttgctttgtttcttctgacattcgaaaaacattccctgccatctgtatgaacgtgggaccgatgatcaacgggtacctgaagaatgagctagcgggctcgggcatggtggtctggacggggaagagaaatgcatgctgctggcaagttagatgatgaaggactagtggacttgatctctagagggtatgtggaaagcgagtcttctaagtcttgtaactaacgtccaaagggcaccatcggtagggcactgtaatacgatgggcacagccttgacaatcaacgcgctggcataagcgctcgggatggatcagcaaggatcggccgccatcccggcgccttatcgcgaacgcg

SEQ ID NO: 13075 - DNA, 155 bp, Emericella nidulans
ccctttcgatctaatagatgcggcacttgtggttgttttttattcgcaactgaagaagcggaaacatgaagaacggtcttgacagtctgcttgattggtgacattgtctggatcaacacgcaactggtatgagtctgattgccagctcaggtcgc

SEQ ID NO: 13076 - DNA, 813 bp, Emericella nidulans
attttgcggtacgagcatcctacttatgggccaattctctggcaaaatgtttaaaaaatatccaaacgaggacgaactacttcagtatttaatagatgagggctgcacagttgatccaattgtcaaagcgacacttcctttgtcacctgctgaagaggatgtcactttgctctgctgggccctgtccaagcagacaagctcccttaaagaagaagtgattgaagtccttgtcgctggcggaggtaactgtaccctcaccatagtctaggaacctgctaacatcgcagcgaatgtcaactatcaatcgctcatatctcaaagcacgcccctccagctagccatcttgagcgctcgtaaaaatactattacggccctcctgcgattcggtgcagacccctctcttgagtcgaacggaatttccccgctttccctcgccgcgtccattggagatgctaagattgtccgtcagttagttaaagcgggcgccgctcccggcgatggggccctccacgaagcagccaggatggtcaatgttagcgtcttgcaggtcttgttaattgaagggaaacagcgagactatccatgttcccgggtccaagggcgtacggcgctggcagaactgtgtcttagagccgcaaataaacctgttagtcagatcaaagctgctgttgcccttttgaagaacaacggggatgtcaaaccgaaatcgagaggaaaatcagtgctacactttgcgcttgataaccccaatgctatactcgtcactcaagctgtcctagacgtgttcatgagcgattacctcaacgacgattt

SEQ ID NO: 13077 - DNA, 701 bp, Emericella nidulans
  unsure (1)..(701): unsure at all n locations
acagaagtctagagcagaggcacctctgcagaattaggaggacaaagaccgaaggagaggatgaggcttcttgagctacttattgtatagactaactggtggtcaaaattaaaatctttatttaaaattcaccttacttctttttcttcttattttcttatttcatttatattatttatttcttctatttatctctatttttcattacaaatccagacatagctctttctttatttgtctttttttaatcctattaaaattgtgacttggattccggtggctacaaattatatatatgtattatctcttcctaaaattctttttttgcctaccgccctttaatttttacaattttttttcataaaccttcatttatcctaagtcttttaccaaatctctcttaattcttttttacctatttcaaacacttttcacctttctagttatataaatcctcccaaacacttttgtncttacttttcatcaatttattctatcctctatcaaattttcaatgggttgttcccattgcccatacttatttttctctacttactaaattccataatcgccnnnaacccgtccttaatgttatccattaaaactcttttcttttttatcttttatatttaccttctctattataatttttttctcttttactaagttcctcattaaaaggaccataatcctctatgcct

SEQ ID NO: 13078 - DNA, 114 bp, Emericella nidulans
tattaaaaaaaaaaaaaaaaaaaaaaaaatctcggggtgtccaaaccgggggctttccttctagagattctttccaatcggcccccgggtaatcattgtcaaagcctcccctgg

SEQ ID NO: 13079 - DNA, 815 bp, Emericella nidulans
tcgaggccgcaatcaaccctcactaaagggatcacaggacgtgggaccgtgacaagtatgactatggttaaaggtacaagtagggtatgttcatacttgtactattaaactccttgtaattactgccctgaattttcggggagttgtataccactgagacctaataataataatcagttggttagtaacatattgccatccctggctttcttcttataaaccctaaatacaatattaagcagcaaagctcgcttcctctctcctactttgaataatctgttaatggttagaatccctttatatttccccttttctgcttgtcatcccgtcttcttcagagttcccttgatcctctgcactgtcctctcctcctcccttacctgcgagaatattctgcctaccgcatacactttccccaactccaacccagtcacactctcgtatacattagctttgggtaaggcttcttggccggtaccgcactgtcttgtactttcgtgaatattacgccccaatttacaagtggtgaatagtccacacagaatttctagaaataggcgcttcggccgtcgacatggtgcatgcaactactcatccttaaatcgatcagtagaacataactttcatgttgctataatttccgtttgggacacgtgtgttagccatggtccaggtccgtagcacatagataacgatcacagataataccctctacttttaaaatgggttaatgtcaaagaagaaaagccaccttttctaaaaaatgagccccttggtttgtttcccctccccattaagggcttttttttggcccc

SEQ ID NO: 13080 - DNA, 1474 bp, Emericella nidulans
atcatccgcaactatgagatttaacgtctcatatttgctcaagacgtgttactcatcagcataggtatctccgctatgggtactccgctgccaatatcgaaatgccgctctccccagaaccaccgggttcgcccccgaactcatccaacgattccttgaaacgccattcccgctacacctaccgtcatttccagcttctccgacaagcgtcccctgcctcgccgctccgcgtaatagcacacatcgacctcgatgccttctacgcacaatgcgagatggtccggctagggacgccgcgcgagaggccgcttgccgttcagcagtgggactcgctcatcgcgatcaactatccggcgcgcaaattcggcattacgcggatgatcagcgcgaaggaggcgaaggctaagtgcgcggatattgtccttcagcatgttgctacatttcgagagggcgagggcggcaagtgggcgtatagagaggatgcgtggaagaatatcgggacggacaaggtctgtcttgatccgttccgggcgtaatccccattgatactagggaccttcaaaggagagttgtacgggtcgcttgccgagcttagcgtccatttgtacgctctgggacgcagccggaaaatgatagggtcctatgcccaggctgataacggcagatcttccgatcttttttttacccccttcctccaagatttaaccccttccgggataacacgcaaccggaccaaacccctagttgcaatataatgcccgccctgggcccccaccacaccactgttttcctacacagtatgtctctgttttcacccccctaaataaggcccctttcccctttccccgcgttgttttgtcactcgcttcttctctttttttttcctcccctctacgcagccctctttatctatccccttccttctctgtctacttctcttacttgctgctccctctcgcttcttccgttagctctcctcctatgttatccatctacgtggctccttcctcgtattttatccctttctgctaatcttctcgactccctttcgtcttaccttcttcttttcacttatttcttctcttcctctttttctgttcttctctctcctttctatctccctcatcctctattcttctttccctcctcttattcactcttcctttgtcctggtccgtcttttttctctctccatcgcttcatcctgctcctcttacttctctcattcttctctcattctccctttctcttcttatactcttctctccttgtcctgttcatatctctttctgctctctaatctttcatctgttatctatctctctctatcctcgtgagatctcttgctgatcactctcctctctgctccgcttgtctaatcctcttcttctcctcctcttcttctatacatatcttaacgactcgctccgtttctctcctagctctgtctctcttgctcctcacactactctct

SEQ ID NO: 13081 - DNA, 966 bp, Emericella nidulans
gtcgacgggaaccccatacaggcccttgagcgtgttagcaaggtaaaccaaaaagctttgcgggaaggaagacaataccccttcaagatcggggaggacattcagaggtttggatgatttgatcaggtgcaccaagtgttcgaccggattccagtagccattaatcttgaagccagatatctggcccactctgactgacatcgtacggaagatatcagggtgcatatgcagcgtctcgtccaatatatgctcacagacgagcttcgcatcagcataccccatcggcagggctgattccgcattgactggctgttcaggaacgatagccttcttcgtaataaatgggtgacagcctacgacggagacggaagagacgaactggaacccgactttcccggtgtctgaatgccgccgattagcgcaatcgcggcagaggtcgataagatttcgcatcgttttgaattggggctcgaagccacgcaccgggcgcgtcatgctcattgcccaggcgttgtgaacgacgtccgtgacggtgttgacgaggtgttggtatctctttggcgacgaggcctattacttggtggttgtggacacggatataaatcatcgtgtccttgggtaatatagtctacgtaaaatcagactgatgattccttatcataggtttttggttttatgcttatcttcataattctacctgtgtaggtgtatttcctatttcatgtacactcactggacatagaagttatctttgcatgtatttctaatctgtattttattcgtttgctggtccttactgtctcctcgttgattgtgagttcacctttcgtctatctcttcctttgcatattatgcatcttgttctttactatgtgtcaagatctttacccatgactaatggcctgcatcatcacatgactcaatctgcagacctctgttacctgctgcacgccatgcccactatta

SEQ ID NO: 13082 - DNA, 885 bp, Emericella nidulans
  unsure (1)..(885): unsure at all n locations
gaggtaacggaacgagactgtttacaactttccctcgcttcccctccgttttgctttgtttaaaaagtattgaggatgcattgatcgttgtcgtggttaaaatattgatgctgacatgacttcttttacagaacagaaattgcccaaattatcttctacaacgctaaaatggacgcttcagagaatcaagcgcaagcgcaacaacaaagtgaatactttcctttcctcagagctgccatctggccttctctatttctcccgacgagacgcttatatatatggacatcacttcaatactaatcctattcattccctttagccccacaaaaaccgacataccagaatggagtccgaacgaacggccgcgctttcaactcccccaactggcgagtgaagcgtgaggaaagcccctcgggctctcgttcgcctagtcaagacacccagaacggatcacctagaagaacgcccggatttggccgtcagaaccgttgaagtgccacaagcgatttccgagggacgaagactgtatgtcggaacatgccgtacacggcaaaaatggaagatgtgcangaattgttcacgagggtgggtttgaagggaatgttttggaatccattatttgcttgtttcggattttcgtaccaaagagggggatgggtgtttttttaaaaccatggtggtacagggtcccattgcatttaaatgaccctttttcggcgaaaccattttattggtttgccttttaataaaactcttttgcccatgtttcactaacgagcgatttttgtggtcgtaaaaatattctggttttaaagcgctgagtccctcctcactatttaatgtgcgcacccatttttcaagataatcaagttctcccaatggaga

SEQ ID NO: 13083 - DNA, 782 bp, Emericella nidulans
aaaaagaataaacaaaagaaaatcataacaaataaaaaattaaggaaagaagggaaaaaaataagtaaaaaaagaggagggagacattagaaagcaaaaaaaatataaggaaaaccggggaggaaaaaaaaaaaaagaagagaaaaaaattataaattttaagaaaaagagaaaaaaaaagggagagggggaaattaaaaaaagaaagaagaaaaaacaatagaaaagaagaaaaaaaaaaaaaagaaaagaaagaaagaaaagaaagaaaaaaaaggagagagaaaaaaaaaaaaaagagaaaaagtaaaaaaagaaaaaaagaaaaaatgaaggaaaaaagaaaataagaaaaaaaaaaaaaaaaaaaaaaaaaaaaagaaaaatgaaaaaaaaaagaaagagaaaaaaaagaaaaaaaaaaaaagaaaaaaagagacgaagaaaaaaaaaggtgaaagggagaaaaagacaaaacagaagaaaaaagtgaagaaaataataagagaagaaaaaaaagaagaaaggaagaaaaagaagaaaaatggaaagtaacaataaagaaaatcaaaagaaaactaaaaaataggaaaaaaaaagaactaaaaaaacgaagagaaaaatagaataaaggagaaatagaaagaaagaaagggaaaaaaaatgacaaaagagagaagaataacaaagaaaagaagcagaaagaaaaatacacaaagaaacaaaaacgaaaaaaggaagaaatagtggacaaagggaaataaaaacataacagtaaagag

SEQ ID NO: 13084 - DNA, 112 bp, Emericella nidulans
ccctttcaccacaagatgaaagtcaataatcaggttggtacggtatacatgaaggtcattcttcacttttccaacaggatctgccattttccagccacttgagacccagggc

SEQ ID NO: 13085 - DNA, 127 bp, Emericella nidulans
acctcgatattgttaaacaaaaaaaaaaaaaaaaaaaaaaaaaaaaaaaaaaaaaaccacaaaaagaaaaaaagaccgaaccaggggaaatgcgggaaaagacggacaacacggaaagagaggcaac

SEQ ID NO: 13086 - DNA, 283 bp, Emericella nidulans
tattaaaaaaaaaaaaaaaaaaaaaaaaaaaccgggggttttcctatcgggggctttaccttaggagagttattttaaaccgcccccggggaaaataattgaaagaccccccccgggaagaccttacgggtgggtattccaggcccccattttttaccgagccgggaacccgtttgcccgaaaaaggggttttcgggtttggaggtgtttttagtaggcccggtttaaatgccattaggaaccgggtaaaagtagttttggcattttttccgaaaaggttgag

SEQ ID NO: 13087 - DNA, 284 bp, Emericella nidulans
gatcctctagtaacggagtaagtgtcgtcaatatgatcagcagattcgggcatgttgatcctcagagcatttaataagatcgtccagcaggagtggagtgatatagatctaattagcgcgggatcaatactactcgaaggagtagctatggcattcgcttgaatcagggagataactgatggctgcgaagacccagagtgcatgggatgattagagggactgtctttcgacggcgttctagcatgccaggtagaatgcatgcttatcacaaaatttgagaatag

SEQ ID NO: 13088 - DNA, 461 bp, Emericella nidulans
cacatacgatttaggtgacactatagaatactaggatccgttgaaatctgctgcctcctaatttctccgtccttgagtgtactcgatgtccatcagcgcattcgacacaaccttgcctccgcgaacagccgacctcccttcgcttttcttccccccgtgtccattgtaaaggataagcgggaacgcacgcacgtcgtcatagaacacttcgtccacaccaggcttgcacctcgtgctgaacgcccacattacagccttattgttgtgaacgtcaatgtcctcgcccacaagcacgagccgatggattgtgtatcccgctttgtgattgaaaaatgaggtcgccgattttccggcagagctcatgggacgtcgtccgtattgacgggagtttcgaggtgtcgattcgcagcgccacccaggtcacctgggagatgaagggggcgaacgcatccaggacgggc

SEQ ID NO: 13089 - DNA, 531 bp, Emericella nidulans
gcgcttgatgctgctgtcaaacctgcccagaaatttcaataagtcagtatataaagattctgattgaatgaactgtattccaagagtaataaatgaaaacaacgcaacgcatcgagcataccgtcgtccgcgattccacgaccgagtcgggtcatacaggtagccgtgatagtgaacggtgaccatatcccctggttttggatagtctacgccattaccaggacggataatatctatgataaagtcaatgatccccattttgtggaatagacaaaacgtatgtagaataaaagagatgaagttaatccgaagtgcgtctttgcctcaggccaaagtctaaaaatacaccgcctgccctttcacccctaatcgctgaatgtgcacaaactctcagggctgcctttcatgcaccagttctgcaatactctatcagatgcagttgatgccttaataactgtaatctctcttacatattgggactatcagtgaaatctattgtctttgcctgttgaaaatcttagcgcagaagac

SEQ ID NO: 13090 - DNA, 490 bp, Emericella nidulans
gtaagcggccaatttatggtatgctccatgcgccagaaaccactcgagaagggtgtggttattcatgatagacggttgttggacagcgccatacatgccttggggattttattaactgtgaaagctcgatgggtggatatgtttgactcaccaggagtgttcgttgcccacccatgctcgaagagaagctcaaagagtgggatctgcgcttctaacggggaggagagaacatgttccggcgttctccgaataataggagcaccggaagccaaaagatagcgcgcaacgtcagggttgcctgctttcaaagcaaggcaaagaccatgatggagaaaagcaggagtagatgtgcaggtttcagaggatagggtggactgtacggtcgcaagacaacccttacggcaggcggattcgaaggcgttgtagtagacaggtggtggcccgagaaacctggggttcttaatgataaaggcctgggcagttggatctt

SEQ ID NO: 13091 - DNA, 646 bp, Emericella nidulans
cacttgattttggcgataacctcctcgtgagcggcgacgttgtcagcaacctaccgatcgaaggcgctttacgaaacaccgtgaacgccgccaagcagacaagaatgcgatcatgacaatgatactgcgcgaagctggcagaaatcatcgaacaaaggcctcgtcagtatcgcctgtttttgtggtagacccgaccaaagaccgctgtttgcattacgaggagattgatcaccactctcctgaatcttctcgcctgactattgacgctgagcttatcaccacgttccctgaaattgatattcggcaagacctgattgactgtaacattgacatctgcaccccagacgttttgagcttgtggtccgacagcttcgattaccagacgccgcgaaagcaattcctctacggtgttctgaaagattatgagctgaacggaaagaccattcacacacatatcattgaggaccattacgttgcccgggttagaaacctgaaggcgtatgatgctgttagcaaggatatcatatctcggtgggcctatcctttgtgtcccgacaccaacttacttcctggccacaactacgatgctcggaagggtactctttaccaagaacatgacgtgacgctggcccgtcaggcgttgtgg

SEQ ID NO: 13092 - DNA, 495 bp, Emericella nidulans
  unsure (1)..(495): unsure at all n locations
caagcaagagagacaccaaacacaatgaaaaacataataaacgaccaaacaataaaacaacaaagcacggaaaacaaaatacccacaaacccacacacccctacccccccaggggcgcgaagccaaggaggncagccctgaaaacacgaaccaagcccagcgagtcccattacaacgacagcaaagacagcccgaggcaggggtaaaaaaaaaaacaaagggaaaccacacaaggccaacaagcagggggcaggaaaagaagaccgggaacacgaacccgccgacaagagggcaccaaaagcacacaaggggagaggcaaaacaacacgacggcagggagaacacagaaacaaaaaaccaccgaccagaaaacaaaaagaacaaaaacggaaaagcccaaaccggtcaagcaaaaaacaaaacagaaaaacgagcaggaccacggaaaccaacaggaccaaggcagcaaggcacccggggaaaccaccaaaaaaa

SEQ ID NO: 13093 - DNA, 582 bp, Emericella nidulans
tacggctttcgcgggactaaagattgctttactagacttcaatagcaaagcagagcgcgagaagtttgagcaggagacctttgaatgtgggatctgtcttgagcccaagaaaggtgttaactgccatcgtctcttactgtgctcccatgtcttttgcataccttgcctgcaagacttttataacacttgtatcacagagggagatgttgagggcgtcaagtgcctggcgcctgattgtggtcaagaacaaaatccaccagcggccggccagggtaatattcgcaaaaagcgagatcggacacttagcccgtcggagctactgcagatacctcttgaacaagaaactgtgcaacgttatgtcttcatgaaaaggaagaggaagctggaagctgacaagacaactatatattgtcctcggcaatggtgtcaaggtgcagcgcggtcaaaaaagcaccctaaacctattgatcctatggcagacgatttggaggattctggggatgagtcagaaggcctaatctttgaccccttggggaggagaccaactgccccgatggcggatccttggccatttgcgaggac

SEQ ID NO: 13094 - DNA, 229 bp, Emericella nidulans
atctgatctgatagtgtcatgtgggggtcctgtccaggacgctgctttcgccgtggcagtagatgatctccgcctcctccgaactggtaagctcgtccattgactcctgccatagtagtttggtggtagtttcccctacggggctattctcgtcgggcgccgtacatgaatccggtcagcgcagcagctctgcgtgaggcctccgtgtgagtacaagggacgatcggaa

SEQ ID NO: 13095 - DNA, 674 bp, Emericella nidulans
tattataacacatacgatttaggtgacactatagaatactaggatccatgccagctgggcagtattgacgagtcgaagatcgtagcaatacgagaaagatggggccgcggaaaagattcctcggtagctctggggaaggtaaacgaactaacgatcaaggacctggtatgctgggccgtggcaagctgaggactgaaaaactgtaggctggtagagatgtcatggtgggatggtggacgagactaagcgacagggacccacgggggatctcgatcgaattgactttgcgtggcgaggatcgtcgagacacaaatgtgcattcgcaatgtgcgttcgaaatgtgcactcaaacgactcgatcaacgcgttctgcatgccacgtgtgagcctggaatgagacgtgtatgggtagtcaacggagtaatctcacccgctccaagcagacttctaggctccaggttgaacgctcgcagaacggatgcgttctgcaatttgacgcacaggtggaaccgatcctccagagctgtgggataaaatccggcggctgagattggcgtatcgcgcaatgctggagaggccttagccacaactgttgataagcacgatgagaccgacctcggccgaacttcgaccatccagagtcaaacctgagaggcacgaatctggaacctgag

SEQ ID NO: 13096 - DNA, 1009 bp, Emericella nidulans
tatacacacacgatttaggtgacactatagaatactaggatcgacgcaggtgggtgtctggctttaccggccaggatatcagtcacggaaatgcgttccccatagaatcgctcgttctcatctgtacgctcaatgattattgtgccgtccacctgaacaccagcatacagccctcgactcttcatgtaggtccaaatgggagcctgtctcttgtggacttccgactcgagcacgcctcccattccaactgggcccgctgaagcactgacttctccgcccaacgtacaacgaacttttttaaaagcctctagagcttcgtacgtgtttatcacgaccacacagtcgtaaatatcgataccagcgagaaaccctatacccgcagtgtgcagcataataccggatgggggactccattcgcctgtttccgggatccgggctaagagaacaccgctgccaccagagccactcagccagagaccggtgcgcattgttgtgaagattgctaggcccttggcctgctggatgaccttcgtagggattttcttcagcacccggtgcttgcccttaaggtttataattctggccgtttccttgttgatactgttcttaaaaactctgcgatcagaccttggcttgggaataaaaccattttttcagaaagctggcaagaattgcgccggccttgtcgtttttttgtcaataagcatgggccgaaagttttggcccgccccggttcgcaacccgtttacggatctccaacttgtcaaacgggggccggctttataaaggctttttgtgtgcctttgtctcccccaaaagggacccttgggggctggcgtcccctcaggccatggttggataccccggttgcgataaataggggagatgtcttcctttaaccaattggctataaataaacggaacgtcttcaaggggaacccaaatatgggcccctttttctctaaaacttgtgtaagtaataatttttttcttgagttcttttgttttt

SEQ ID NO: 13097 - DNA, 1011 bp, Emericella nidulans
aaaaggaaggaggagattagtataatagggaagggataagattagaaataggcaggaggagattgttgtagtaagagataaataaacattaggtggatgaagagaatatgttacgtcaaaggagtagtgaaaatattgaaagtgaaatccaatacttagtttatgagtaagaggttgccccaaggagagattggatgtaggaaacggtggcaatagggaggaggtagtattgggttgagatatgtccagtgtaggagtaagggaagaagtgtaaggatttacagtaaaatatcggggtagaaaaaagcatattaagagacctccatatgatgggtttaaccacaagcaaaacgtggggaagggaccaagaatagcggggttatgttacaagggattaatgttgaaataaagtaatggttgtttatgtggaaaggttaaagtataaaagtgggtggttgccataacttgtggctccaattagaaaccagggtgaggaatctgttggtttgtaagttcagacggtctcatatgaagtaatggagcaaaagatatcctttggataagccggcatacttagatattttgtaggacaagcctgaagctgagtatactttgcatcaaatgatcgctttcaaatatgcacccgtcaccccagatccagtagtattatccatcaagcggaccagccgctgctagctcagtcaagaagtgagactagctggcagatcgcactaacaggttcacggttcatactggggatatggagttgccttggcgattgagcgaaggagtctaggacctgaccaatagaagtacccacatctccgacattctacaaaagatcatcatctcttgccatcagggatctgcactgaacagatccagatggtgactggtgttagaattagcgcgcgcgtgattcgatgaacgccattatatttataataggaaatagtatcgaaaatagaagtgaggatagaaagagtaggtgaatgggtgatgagtgagatg

SEQ ID NO: 13098 - DNA, 844 bp, Emericella nidulans
  unsure (1)..(844): unsure at all n locations
tcggttccggacgggcgagtatcagatgactcggccccgctctgacaaaacattactttttatacttgggaccgtatgtacacagataccagccactttgctctatagtgtcttgtccatccggcatcacgaccgggttgcaacagcctcatacggctagatgcgatacgggttctcatactttagtgtacctatctaatgacgtgtattgcaaggggcaggccgagaaggtgctctgccgcaccgcggaagagtcatgtcgaacaaacttccgagtcagaggatcctggaaacgaaacccgcactgcttgctataccaatggacacgaccatggcgaagaagagctcacccctgttccacaaaagaaggcaccgtgcaagagcctcgggcacacgtatgacattccggacgcccaaagcaccagctccccggaaatcgggagggggaaggacagcggtatcccacagatacaatcttagatgccgttccgagcgaaaatagcagtctgatagccgggcgcaggacaaagcgagtgccccccccgcataccttttttaacagaagaagctgggccaaaaaagcttaaatgacttacgcccggggcaatgaaagaaaagggtggcccgagagaccttttactccaccaacccgaaaaggcttataaaaattaggccccgttttcccacccaccgtccccgggaaatgccccggctcccttccgcatcgggtaaaccccggaaacccagggggcaattttttttttaaaccccccttttaatcctttttttattagatttttttttccccccccccaaggntaataaggtttataccccccccccc

SEQ ID NO: 13099 - DNA, 569 bp, Emericella nidulans
ctcttaatatctatacttaccctacacttaccttgccttttttttgttaacactgttttataactgcttacgaaggagttcaagatgctatataaaaataataggctttgctgtaaaatctgaccttctttgcctgatatatcgtcaaatcctcttcttttttaattctctcgtgaatttccaagtactatgcaaagttggtagggatcccaccaggcgttgatattagaaatcagcagccccaggcaatcgatcaatggaagtccagatagtgattgagatcttggggcccttctacaggggatactatattagcagaaccaccaggtttggttcctggttcgagatagactttgtcatgaccttatttctgggttacaattacagcgaaaacacctctcgtacgccccgggtgttggaggggatccagagctccgccagtctttagccggctttttcaatacctatttcctcccagtaacgaaagtcataccagagcacattgttgtcacttctggaggaggaagcgcctgggtgctctcatgcgaacatttgtgatgaaagggata

SEQ ID NO: 13100 - DNA, 850 bp, Emericella nidulans
ggccaccttttttttggtggaccagaccttcagaaccggcattgccaacatcctcgatgtcacagacgttgctgctcgcggactcgatatcctcatccttggcaacgtcatcaacgacgatgtcccctagcaacccaagagcttcggacaccgagctgggcgaacagcccgagccggacgtaaaggatggagttacaggcttgcccgtgtcacacacgctgcctacctttgggagacgcagattttccttggccggaggcacgatcttggatggggagtataacaggttacctgtgccagagacttagtggacgatggaccattacccgagtgatacatatcaccttctatcgtaggcgacccttcaaaagtacgagtccggcgtgtaattgcgctgccaaaatagctccttgaattcccccataaggaatgggcgtattctctctttacagtatactacaccaccatccatttggaagatgcgtcccagttacccgggggatttccttttaaaaatacccctggataaagcaggacttctattagaggggggagatcgccttattagctttctttctaagtgtgtcttaccacaatactttggctctttggcgggggatgccctctcggtgaggaaccttatgagggaaaataaaaggacccggcccgacttgttccggcaaaagggggaaaccataaaatttcttaggttattgtacttagggtcgaaattcgggttctattcaccccgccaaaagaatgggggatatagaaacctagttgtggcccccaaagttccgccaactgagttttccgcaagattgtaaatgaccaggcccccccgttaaaa

SEQ ID NO: 13101 - DNA, 1137 bp, Emericella nidulans
ggtatggcttcttataattttgtcgctgttcttcgtgccggtgccctccctcctgccctcggcccctcgccccgcgggggtgctggcctcccccgggccctttttgattctcctttcgccctttcccccctccttccccttccctctcctccccttcctcccttcccctcttccccctcctctccccttctctcttcctccccccccctcctcctctcccctccttttcccccccctctcccccccctctctccctcccccccctcttctcttcccctcccctctctctctctttcctttccctcccccccctccctctccccctcttcccctctctcctccctttctcccttatctttcctcccccctccccccccccctcccctccccctcttccctccccccttccttcctttcttttttcttcctccctccctcccccccccttccttccttccctcctttttcctcccccttccccccctccctccccccttattttccctccctctcccccttcccccctcccttttttcttcccttctcctttccctacaaccccccgtctctctctttgctcccccctccctccccccccctctttttcttccccccctccccctcccttcctctcccccttttcttctcttaatttccccctcttcccccctcctctctttcctccctttcttcccccccttccccccctcccttccctcctctcctcctctctttccctcttctctccactctcttttcttcttccctcctcctatctcctattttccttttccctcctcctctcccctcccttccccctttgcctccccttcccctcctccctcctcccttccctctcctcttcctcttctctccactttccttctcctttcccttcctctctctctctctctctccccctccctctctcccttttctccctttcctctctacttctttccctctcttactccctctctccctcctctttccctcacttacttcctcctccttctctctcttctctcttccctcccctcctctctccctccatcctttacctctcctccttctcccctcttccccctccttctccttcttcccctcctctccccttcctactgtctctctctcctc

SEQ ID NO: 13102 - DNA, 179 bp, Emericella nidulans
atgaaactctgaagtcttgacactggactctacgtacaatgtcccacattctccacgatctccatacgccatgctttgctgaacgacctcagtgctcaccgcctatgcgttatccgcgcgtgtttacgcatgatctacatcacactatacgctgaatttgctccaggcctcgttgctag

SEQ ID NO: 13103 - DNA, 112 bp, Emericella nidulans
aactctatgccagcatgaccagagatgaggaataaagaggaagagatagtgtcggatcagagctatacatgggcagcatgctgtcagggtgcttagctgctactaggtcgcg

SEQ ID NO: 13104 - DNA, 665 bp, Emericella nidulans
gccccagattgcagccagaccccggtgcaactccccccacaacttctactggccttgggccgaagatctctccagcatagacgagaccctcgtcggggcctcttgcaaaatgctcggtgtcgaccgcttgatcccctgtttgctaaacaaaggccacaaaattctcatcttctcgcaattcaagacacagctcgacatcctccaggattgggccacacacctccgctcctggaactgctgccgcatcgacggcgcaattagtcaggcagaccgccaagcccaaatcaaagctttcaacacagataaagattacaaaatcttcctccttagtacccgcgccgggggacaaggaattaatctcgtggcagcggatacagtcatcctctttgactcggactggaacccgcagcaagacttgcaagctcaggatcgcgctcaccgaattggccagacgaaaccggttatcgtctaccgtttagcaactaagggaacagttgagcagacactacttgaaaaagccgattcgaagcgccgtctcgagcgtctcgttattcaaaagggcaaattcaaatccctgcttagtgagtcgacgattgcgcgagacgatgttgaccagctgaaaagggcgcctcggtgggatgagttcgagcgtttgaagccagtgc

SEQ ID NO: 13105 - DNA, 1016 bp, Emericella nidulans
  unsure (1)..(1016): unsure at all n locations
gggagattgaaaaaangaggttgttgaacgcaaaaaaagaagagggggtgtagatttaaaaaagaaggacgagacacaaggaacacaaaaannggaaagaaagaaaagaaaagaagaaagaaaaaaagaaaaagaaggaaagagaaaaaaaagaaaaagaaaaaaaaaaaaaaaggagagaaaaaaagaaaaaaaaagaagaaaaaagaaaaagaaaaaaaaaaaaaaaaagaagagaagaaaagaaaaaaagaaaaaaaaaagaaaagaaaaaaaaaggaaaaaaaaaaaaagaaaagaaagaagaaaaaaaaagaaaagaaagagaaaaagaaaaagaaaaaaaaaaaaaaaaaaaaaaagaagaaagaaaagaaggaaaagagaagaaaagaaaggaaagaagaaagaagaaaaaaagaaaagaaaaaaagaacaagagaaaaagaaaaagaagaaagaaaaaaagagaaaagacgaaaaagaaaaagaaaaaggaaaaaagaaaagaaaaaaaaggaagaaaaaaagaaagaaaagaaaaagaagaaaaaaaaaaaaaagaaaacacaagaaaaaaagagaagaaaggaaaaaaaaaaaaaaaagaaaaaaaaagaaagaaaagaaagaaaaagaaagaaagaaaaaaaagaaaaacaaaaaaagaagacaaaaaaaaacagaaaaaaaaaagaaagaaaagaagaaaggaaaagaggaggaaaaaaaaaaagaaaagaagagagaagagaaacaaaaaaaggaaaaaaagaaaagaagaaaaaagaaaaggaaaaaaaaaaaagaaaagaagaaaaaaacaaaggacaaaaaaaaaaaaagaaaaaaaggaaaaaaaaaaagaggaaggaaaaagatgagaagaaataaagaaaagaaagaaagaaagaagataataaggaaaggaaaaaaggaaagagaaaagaaagaaagagagaaaaaaacaaataagaagagaagaaaaaagaaaaagaaaaaaaagagaagaataa

SEQ ID NO: 13106 - DNA, 198 bp, Emericella nidulans
aattgagaaatcccaacgggtcgccagaatctctcgatctcgaccgtcatccaccaccactctccactcccactttatacacagcccaaggactcggcgaacgcgatcactatggcctccagctgaccaagtcccaatttagaatgataacggcagcaggtgcctgtcattctcgacgccgaccgatgttgcgaattt

SEQ ID NO: 13107 - DNA, 109 bp, Emericella nidulans
acaggcgggaacagcaaagcagttcaagaatcatagacatacatctgagagcaattgacgactgatatggcgcagaacagatgaagagtctcaactcgtacgtcgcaaa

SEQ ID NO: 13108 - DNA, 299 bp, Emericella nidulans
gtaataccatctcactatagggagacccaagcttaggatctggtgctctggcacagtatgtttcactcccaatgctctttatgatgatccgctaactaatgattccagctttcggtctgacgcataaccctcgcattgaggatttccctgttatgcccgtcgaacgagtcagtgtgatgttgaagcctgatgggttcttcacaaagaatccggcgctagacgtgccgcaatccagtcaggcgtttaaccaatcgacgttacatccggaggcaaaggcgtgctgttcaactggtggtgtt

SEQ ID NO: 13109 - DNA, 793 bp, Emericella nidulans
tacgatttagttgacactatagaatactaggatcttgactcgagagtactctcacgcctcggcgtctaaactttcttttgacgaacctgtgcaaactcctgaagataaagttcaagttactcctacggctgagccttctcacatatctgctccattaagcaaggccgtttcaacaaacacaggggtgtctgctctccaagcccagcgactccctttgatgcagttccttgatgaatatgaacaagtcccgccatccccttggtctcaatcgccagctccttctccagcgcctcgcggccatcctgagcaaaatcctttcttctccaatcatactgtggatgaaaccgctttcgccaaacatccgccattacatgattattcaaatcctgatcctttagaggccattggtgttgacctggcaaaatctgttgtgcacatcccattactacatgctgggccttcaaaacagtcgacttcatcgcccttgaggttccctgtcgccgtgatttcgattttatcatcaattataccgtatcctaccaacctgagacaatctctagcctatcttatgcctcatctcacgacttcattttgtctggctcagcactacagtcaacttgaacggcagtttgcttctcgcctggaagctcctcgcttccccaatttcctcggcatcggcggaacattctcagatgagagcagcgagttagaactcgcggctggtctcagtaatcatgtcagttacacgggaccggatgatggttctctgtccgcaagaacaagtctatcgagt

SEQ ID NO: 13110 - DNA, 851 bp, Emericella nidulans
aggagaacggggcacagctgtcctacatgctggtctgctctatgactatgggtgttttttataccactggctatgcacgtattctgggaacatgtctcggcgcagttggcgccatcctgtcatggtatctcactgacgggaatgcgctcggcctcgccttttaaggcctgatgatggctactgaggacgccctacatcattatcgaacaccggcttggcccgatgggctcgatcaactttgcttacacataatcactcagacctagtctcatcgtctataccccataaagcatgcccagcggaccaagaatctccacgtggcccattcctgctattttatatattgacccccaggatctggttacccctgtttttgagcgccgtgccacctttcttcttggatttttggaacgaactggccaacattatgcaccccatcatttgtctggtgttaaaccaagacaagcttgtccggaatttcttcccatgggacctttggttaggggtgtttgggcctcttggtaagctctagaggctttgaatctgggcctcttgtccgagggcccagcctgccttctataaaaagggtacctgtcttaaccaaggtggtcaggcttacggttggaacatatttgtcgcatttttttttttgccgttcaatgttccctccaggttgcttaccaactggttcggggaaatatttgcttggaaccaccgggccccatggaaggcctgcaattggtggccgggggtcccccaggatattttacactttatccgctgtataatcgttctcttaagtactgtcttctcttatattacgtcaaatttcttgtggatttttccccccc

SEQ ID NO: 13111 - DNA, 822 bp, Emericella nidulans
caggccccataatggctatgatccccctgggctggccgttgctatcatgtcaagtatttcctggcctatcttatctcatcagactaatgccggccaaagggccatatgagcaaagatcaccatgcgcatgggaaatcgtagggccaatgcgcactattcggtcgctacagatcggcagctgagcatgtggagactgtggtatgtcgtaggcatatggctatcgtagacctcggctatatgcaagataggcacccgatggcctaagccattcgctttggccgaaacctcccagtccggcaggatggtaattgggaatgatgaaccagaccctatccacagggcgtttggaaaggccgaattcttgaagtgagagagcagcgggctaaagctggcgaagaaagctgaacagacgacttgctggtaggaacttaatccatgaggggtcacgcgcctgtgctgttagagaacacggtgtaccgaaaccgctcgggagagatctctttggggtacaaatgcttggacatcataggcaggtagtgcgtaaaacacattctgcaccggttgggggtttccagcctggctttgcagttattttcatttgtccaagtgataaagttatagacatagttgactgggaaactgccataaaattaccgaatgacagacagcccgatatcacataggaatgagcgtgaaaaccgaacctaacgatcctattttggttggagattggagggaaacaaaggtcttgtttcgaccaaaggcgcatggcctgattcagcgtgcattcaatttcccttctttggagagaggggccttttt

SEQ ID NO: 13112 - DNA, 154 bp, Emericella nidulans
ctcccgcaacctcggcacgaccgacaggatgtccagaattggggtcgtgggttcggcgatgtacttccgggaaattgctgaccattgcggctgacgcttggttattaataggcacatggtagctattgagtcgaaacacctgtgtccatccttc

SEQ ID NO: 13113 - DNA, 447 bp, Emericella nidulans
gatacactgcttcatcgagcaggctttagaatacattggcaaccctttacgttcaacggtcccgaacacctttaaccgtatacattctggatgaaacgccggcagcagatcctcgtaaagcggcgtttgagggaaactgtccagtcttcattagcctttgaagagtatcgcgggctgctcattgccagggtagagagctctggaccagaagggcaactattcatgctcgctgggcaaaatttgagagcattctgtccggcgaaacgaatccactgatttgatatcccgcgacggtctcgcagagcaggtcttatcgaaccacatcacgcgcacctagttgcagcctaaaacctctctcgagaacccggcaatgaggaccattgagataagtgatggcgctgggggtatgacgctccgcagcctcgagtcctttgcgtcagacgagct

SEQ ID NO: 13114 - DNA, 391 bp, Emericella nidulans
ggagtacgcctcggtgcgaaatatgagagcgaaaacgaacgcaaaccagccgggctacaacggcgtgacagcaagaagttgagtaggcagagcatatagcgacaaagctaccgtccggaatgggctgatgtattgcttgctcgcagagaatcacagatgttaatgctgatggcgaggacgaaacaggaggaggaacccgaagatccgctcggacgaaattgtctccgaatggagacgcgagtacaggataactggagagaatgtctagcaggaagcccacaagtatccgacatggaaggcaccttattccattgcatatgttccacaacgcgctgtgctacccctatatcaggagcaagggcgtgccttctcctcactcctaaattggcct

SEQ ID NO: 13115 - DNA, 388 bp, Emericella nidulans
tgcacgccttgttgcctggctgtgaatttggttttgctacattattttccatgaggagcgtttaccggtcgtcgatgcactgactggctgctcttgacctggctgcatcgtattttgccttcgccagactaccactgtaggttggagcataaagctgtgccacagagagtccccgcaagcacaaacctgcgcgacaaaccatacatgacgacggacccaaatgagacagctacgatgaaagcgggagcccgctgtcaaccacacgcacgatgacgcctgactacgttcagaccaagaagccatagaagacaaccacaaccacgagcaagacactgtcaggagtgcctcctcttaagccaaactgtcatagcccttgaacccagcgcgc

SEQ ID NO: 13116 - DNA, 186 bp, Emericella nidulans
gtcagtcaatcttacaaaccttcgtgccccgctcttgtccggcgcgattcgaccctccgggggcggttcggctcgacacgaaaggcctgttggttcgtggcctaccgaatcataatggggatgacggtccctcaaggttcaaaaatcccaagcaagcaagaccgactagcgtggaacctcccccaa

SEQ ID NO: 13117 - DNA, 1374 bp, Emericella nidulans
aaaaaaaacaacgaataaataaaaaaaaacaatccaatccattaaaaaacaaatgaaaaaaaaaaaaatcaaaaaaatacaacaacaaaaaaaaaggtgagtagaccacaaaactataaaaaaaacagggggaaaaaaaaaaaaaaataaataaaataaaaaataaaaacaacttttttaaacaaaaaaaaaacaacaaaccacacgtgggggaaaaaaaaaaaaaaaaaagggggaaaaaaaaaaaaaaaaaaaataaaaaaaaaaaaacaaaaaaacaacaaacaaaaaaaaacaaaaaaacaaaaaaaaaaaaaacaaaaaaaaaaaaaaaaaaaataaaaaaaaaaaaaaaaaaataaaaactaaacaaaaaaaaaaaaaaaaaaaaaaaacccaaaaaaaacaaaacaaaaaaaaaaaaaaaaaacaaaaaataacatataaaaaaatcagatagaaaacaaccaaaaaccaaaaaaaaaaaaaaaaaaacaagagaaaaacaaacaaaaaaaaatggaacaaaaaaacaacagaactaaaaataaaacataaaataaaaggagaaataacaaacataattaaaatctctaacaaaacaacaaagagcacatgacataacaaagaataaaatataaaaacactacaaaaaaccaaaaaaaaatacattacaaaaaaaaataaaaacaaaaaaatcaagaaaaatactaaaaacacattaccagaataaaaaaaagatagcaaacacaaaaataaaacaaatgtaacaaaaaaacataataaaaaacaaatacaaaaaaacaaaaaaaatacaaaaaaacaatataacaataaacaaaaaaaaatataataatacaaaaaattaactaataaaaataaaacaagtaatacaaataaataacacaactcaaaaaaaaaacaaaacaaaatacaaactaacaaaacaaacaaaaaaaaaaaaaacacaaaacaaataaaaaaaatgaataaaaaaataaacataaaaataaataacacaaaaaaaaatattaacaaaaaacaaaccaaatacatataacaaaaaaacaaaaaatacaaaaaaaaaaaacacaaaataataaaaaataaaaaaactacaaccaaatgaaaaacaaaaatcgaaaaaaaaaaaaaaaaataatacaaaaaacaaataaaaagaaaaaaataaaaaaaaaaaaaaacataaaaacataaaaaagaaaaacaaaataaaatatagataaaaataaaaaaactaaaacatacaaacaaaataaaacataaaaatcaaaataataacaaaacacaaaaaaaaaatataaaaaaacacaaaacaacaagcaaaacaaaaaataaataaaaataacaata

SEQ ID NO: 13118 - DNA, 542 bp, Emericella nidulans
tggctctcagtacatgatgtatatggtcgtgcggggggtggtgaaagtatggagcggacggtgcgcgaacatatgtgaacggctgtagcctatcccagcaggcgtggtgaccatcacgtacaaggggaacagttaactgcataagcagaggggggatatgaacatgaacggccgataacctcgtaactctctaatgttagacctatatacactgaccgcgacatcaagacacgagctgaattatcgacacaccatgaacaaaacagcaatgaataaggacattgactgtctaagacaggtgtgattctacgacaggccgttacaccttgaggcggagggggaggcctggccgggggctctagggatgacaagactaaccaacatgaactagacctgacgagctgctagataaaaacaactctcgcgaaaacagacctctgagaaacattaactgctgacacctaacaggggactgagctccgcagcactgggtgttgcatacgaagcactcacgattcacagcgactgctcgaacctgagct

SEQ ID NO: 13119 - DNA, 103 bp, Emericella nidulans
aaaaaaaaagaaaaaaaaagaaaaaataaaaaaaaagaaaaaaaaaatgataaaaaaaaaaaataaaaaaaaaaaaaaagcagattataacaaagtaattaaa

SEQ ID NO: 13120 - DNA, 551 bp, Emericella nidulans
cgagaactactgctgaagggccagaagcacactttgtagttccaggtcggcgccactcacggtgacggctcttgccagatcagtatcacctcggatcgtgctcctaccaaggacacacaatggagtgtcataaagtcaattgaagcaggctgcatggatcccaacgaggctaatactaaccagggtggtgacgcagggatgaacaatgggttcaggcccagtttcgtcatccccgaggacttcgaggtcggccagtatactcttgcttggacctggatcaatcgcatcgggcagcgtgagttatacatgaactgtgccccgattacgattagtggcggatcttccacgaagagatcagatgttgccgctgtcgagaaacgcgctcaaagttaccctcctatgttcattgccaacatcaacggctgcaagacagagcagaacatgtctcctcgataccccaaccctggctccatggttgagacactcaatgaagcgcacctcatccccgatgccaacaatgtttgctacgaaggttccccgccggggggtta

SEQ ID NO: 13121 - DNA, 542 bp, Emericella nidulans
gcgcacagagattttccccaatctttggcggtgacacagtttgaatacttgtgccgaacgggaggattgtctgtcaggctttgttaccggtgtgcgcgagtgagggttgacgaatggcgcacggggacccacgtgctctgcggagagacgcgtgctaggtcggccggaggtggcggttccaggcgggggctgattgtcgggtccgtccttcaagtgaaggagggcgagagacaacgctggatcaagcagacacactgttcgagccattccagctcatagccactataagcgactgttcactcttggtcgagtctgtcattgtggtgagacttgcaactccactgttcaaaagcccacaggtaactggccgaatgcgtaataaagcggatgctcccaggccaatagaggagctccattccacatgattgagaggtgagttcatgtaatggctcaaatgttccagctggaatgtggagatagcaaccaacactgttcgaggaccacagcagcgcctgaggaagatggggtacagatgccaaacg

SEQ ID NO: 13122 - DNA, 844 bp, Emericella nidulans
  unsure (1)..(844): unsure at all n locations
ggcaatatttgtggaccgccagctntctgggatagaaatacctttttctcgctcttcttccagatcatattccatggccgcctcttcttctccggactcttcggcctctccaatttagcgttctcctttcccttctcattatcacctgatgactctccagtcttagccatgactttctccgcattgctgtctccagacaatgacggttccagacctgctgctgactttctccgttcctgctctcccagctctttgccaaactcctcgatcggcgacttcggcgtctgatcctgaccttgggtctgaacaccagcagaatatgctggctcttcgtctctatctccatctccaactggtgctggtactgcgccttggccagttggggcagactcggctgtgagagtctgtaaaaaggcttcgcctccggtgtcaggccggatcgtgtgatccacccgcgtggctgctgtgtctctgagacggctctaagcgggagggcctttggttggcgtcggtgtcgcttggtacctgtcccgattgcttttgagaacctgtaattgtggattccactgcgtttagagcagtctggccttctgtccatggagcggctctgagttttgagaaccttcatattccagggaattttacagattggggcggatcccgggcgactatccaagtggctgcccttggctggggtaacacatttttccattgcggtaaattttcttgaaaagtaacctttagccccccccccttaataaaacctggtttggcgctggccccacctgcctttttttttttccctctccctcttgccccccccccgggggggatcccccccctg

SEQ ID NO: 13123 - DNA, 677 bp, Emericella nidulans
aagtgggaggaaaggaacgaggtcctgttgctaaaactttccactccgatgaagctcctgatcgaatttgcgtgtggctttttcaaacagatggggtgtggccccctacactgggacggacgttatccccgagttagtttttttccatctagttttcttacttcttcctttattcttcttttcctcctttttccctctttttcttctttcattctttttattccttactccacttcctatttttcttcttcatttccttattttaattctctaccctcttctttattttctccttctctttttctttttttcctttcttctcttccccttttccttttttcttttttcattctcttctttcctcccattttttctatattctaatttctctcctcttctcttcccacttttttttttctctttcttcttttcccctttcttttttttttcccttctttaccttctttcttttctctttttttttctttttctctactcatcttactctcttcctcttttcttcttttctcttcttatctttattttattattccttttctcttctctcctttacttttttttccatcctatctcttccctattcccttctttattctttctcctccctcccttatttttcctaaaccttaattcctaaaaaacttctttttattttc

SEQ ID NO: 13124 - DNA, 571 bp, Emericella nidulans
  unsure (1)..(571): unsure at all n locations
gatacgacatcactgcaggtctgcatcgagctgctgaaccagaaacatcaaggcccatgagtatgagagcccgctggcgccccccggggggggccagcaaaagaagcagggggctcccaaacacaccccaaacaacctgtataccaccacctccccccacaccccacctcccccacgcacactcaccaacccaaaggcccccaccaccaaccgacgaatagcgggccccacaccaggacacggcaagtctctcacaccccacccgagaatccaacaaccggaccctctaaccaccaacaaaaagctctgaaagggccagccctctgcaacacacccaaacccgcactccacaacccctgttaccaaagccccaccggccccctaacccccccctacctacaccccgccacctctgcaacagacaacccccccccatcaccaccttctcccttacccaaccccctaccaaaccccaagttctccccctaacctcaatcaaagcccatctcatacccttcccaccctcccnttggacccaggaaccaacgaatcttaaccctcctccccttcc

SEQ ID NO: 13125 - DNA, 1619 bp, Emericella nidulans
  unsure (1)..(1619): unsure at all n locations
cccgtttggcttggatatttatcagtgctgttagtgtttgagagtcatatctgcatggcatgagttgtttgggggctccaatctatacgtatatacccaatgaagtgctgccgccaccattgatagtgacgtaactatgggtgaagtcgatgaaccaggacacaccttcctaacattttaattcacccttgttaccagcaccaagggggacgatgatctgcacatctccgtctggaagaatagcactagcacgctcctcatagacctgctggggctctccgttcacatggagtttgagcacggggctcccatcagcaggcttgaaggtaacgctcgtccgctcaggcacaacagttcccggcgcaacaccctgcgtgtaaccgatggcacagagaatacgcccccagtttgcatcacggtcgtacagcgccgtcttaacaagcggagaccttgcgatagtcgacgcaatgagctgcgcataggggtagtcaggggagttttggatccggacggtaacgaacttggttgcgccctctccgtctcgcacaacgagctgcgacagcgattgaaggaacgaggtaagaatattctgcatgaccacgtaatcgtcattctgtgtgctattgatcggtgcgccgtctgcagctccgttggccaggatcgcaaccgtgtcgttggtgcttgtatcgccgtcgacggagatggcgttaaaagagcgtgcgacagaggtcttgagcagcgattgtagggctgaagggacgattgttgcgtctgtggcgatgacgccgagaagtgttgccatgttcgggtggatcatgcccgcgcctttagtcatgccggcaatgttgtaggtgcgaccaggtgaggaaggaagagtgaatgtttgggnnttnttttttttttttttgttttttgttgttttttgttactcttttgtttttgntttcgcatgtacgtttttatcttatatcctttatattattaactttcttattctctttatccatgggctacatgtaactcttattgtccctttgttctttttactcttatttatcctgtgtttttctatactaattgtttataccgtatcgatctanatttttttagtgtgatcctgtcttcactcgctattcttctttatttctgtcgtgttctgatactttacctcgttagtctacgctncttgtacatcagtccttctatgcgatgtgcattactgattctatactgcatcctgcatctctatcgtaatatcgctataccaacttcatttacaactttaacttcgtaagatttcttatctatatcctatctcgtatcgctatatgatcatatctgtctatgctcttcttatatatcnattatattagtgattcatttttctgtacgtctatcttcgtttctctaacattctgattctatactttgctgtctttctctatggccttcttcgtccttattgttttggttttgactcttcttgtttcttactgtctctctctcatactaagacgtattgcgattattattgtttggtactgtgctctcatgatcatagtttgatgtctgtcgtatgcgtatnttcttcacttctctctttattcattgatctgcta

SEQ ID NO: 13126 - DNA, 1298 bp, Emericella nidulans
gttggcggagtggaccgccgactgcgagcctggacaactgtcgaggattagcgattgaatggagagtatgagctctaaaatatgtcagttgtatgcgttaaccagatgaacagcagcatgactacccgcggtagaaaatacgtgaaactagaacgcagggctccggtgtcgagcttgagctcaggatggacttgaccagttctaccgcaggagccaacgccttgaactgcgaggcatcagaagctcagaccatatcaatgggctggatcaaaggatatcggcatggggggcttcaagcctgtagaggtggacatatttgagaacgtgcttggaagaggcgaagagccatgcacagataataaccaacgcatacggggctctatctaccgaccctttgtacttgcattgtgcacgaagcgaagattttgttcttgttgtccagtggagagtatctgctaatccgggcaaatatctaccaataaattccaatatcttgttgagtccagatgtgcccgaacataaatgagccgtcattgttactataatacgaactacaaggcatcagagtatgcaacattatactataacccaaattcaatatcaagtccaatttgcatgctgccgcattatcgcattatccattatccaagaacaggcataaaatccgacctactcggccatactggacgcaggctatctgcacaagaaaagatctgcgcgcagctggaacttggccattaatgccgtatttggtgaaaggtgtcaatcaccttaaaaaacaaaatacagatagggttcaatgaagcctttggggcagaaggagcgacctcttattttgaggatgctggcttttttggagaccattcttaacgtgaccgatgtacaggcgaaaagttccctatggtgccatttccacgatagacagttcctacaagttacacggaattttggtttgaacaggttcaatttttgaaggaactcatgcccttttcgcttaacccccttggtgggggataaattgcacagggaaattaatactggtggaccaaactttataactaaggctttaagggaggaaggctctcccccagggtatttcccaactccctttttggggaaccattcaaacatcaggatacccccgtttatgttctcgcatttcccttcaccaggaatattatggtgtcatcttctggtgtatatacatcataaccattttttcttctattacaatttccctggtgggctattcaacatcttacttttaataagctcctcattcattttcacactccaat

SEQ ID NO: 13127 - DNA, 786 bp, Emericella nidulans
  unsure (1)..(786): unsure at all n locations
aacgagaggagaccggcgcccgagcccgaggaccgagtcctgcgtcccccgcgcccgccccacaccagggaggggctaaaaccaacgaggggggccacacccccccccccccccaaccccccccccccaccaacccccacccccccacccccccccaccccaccccacaccccccacccccccacccccccgcacccccacccaccccccccccaccacccaccccccacccccaacccaccccacccacccacaccccccccccccccacccccaccccccacacccaccccccccccccacccccccccccccccccccccccccccccccccccccaccccacccccccccaacccccccccccacccccccccaccccccccacaccccctgcccccccaccccccccacccccccacacccaaccccacccccccccccccccacccaccccccccccccaccacgcccacacccaacccccacccaacaccccccccccacccccccctttcccacccacccccaccccccccacacgaccacccacacagcaccctccccccacccccccccccgctcaccccccgccacacccacccacccacaccccccaccccctcaccccccccaccccccatcccctccccccaccacacaccccaccccctcccccccaccacccccacccccccccaacaccccccccagcccctcaccccccctccctccccctctccaccctcccccccacccccctcccccccnacctcccaccccccc

SEQ ID NO: 13128 - DNA, 791 bp, Emericella nidulans
ggccgcataatacgactcactatagggatcggaaactgagacgtgcggttcgactgttagccatcttcaaaggaccactgaaccagagactgatacctcgctcgataataactaacaccctttccatcgtgatggtacgtagtagcgaagcttcacctgctgccacgaaaatctgctaaatcgacagaatcacgtccagattgcaacggcatataaaactactggacggatggagttctgctgggctccaaatctagactgttgctttaaggccgtgatactctaagaagtattccctcgatgagctgccgccaaaccaagtcagcctctatctgctgcgcgcagcttcatggccatgaaaggaactcctgtagttcggctctggtctctccacttgattctttgatattcggttgcttgacccatactgacggtgaatattggcgctcttgaaagatgcgaccgctgctgatgagtatagaggaagatgtctcgagcagcttctattcatggggaggaaaacagagaagggggagaacggtagactcgtcgagcatactaagagacgtgagtcggataagcctaaatcatcatgagttggacggaagggcattgttgaagggagcaaaaaagcaggagatacgaagttgggaaagtgcgcgttaggtgcctcgcctttcagaaggggcctatttcgactgcctatcttctcaacctagcaggtcttttgctaccctacaatgggcctaaattaagtgtaatttgttttagtttgctgcatgatttttacg

SEQ ID NO: 13129 - DNA, 584 bp, Emericella nidulans
tgagtatcgatcgtgcatagcaaagacgtacacagtgggccctgtgaacatggcttcttctatatcgcctctcgctgacaatgcgcggtgcttaacggtgcatggggattgtcactcactacggcactgggattacagactggacgcagacactagtgcaagctagctgcgtgacaagcgaacaatggctcaccagtcatccaaaggagaatcaattgcacagcattaacgactgcagagcaaagctcatgatagccatatacatacagtcatgatatgactgagcactatggggggaacaatgagtgatccaccaaagcactattgaagcaatagacatggagtatcgatgctgaaatcatgcatgctgagcctaacctcactgattagagacaaccttgcagatattgatcctcatcacgcatatgcaggttgtgctgaccttgttaaatgtaaagaccgagccggatcatcctcactcaagggcggcgtctatctcattagacttgtggctgttaggatcgtatcctactaagcgggctgcgcacactccagtgtgtaggagagaagatctgccatggaag

SEQ ID NO: 13130 - DNA, 429 bp, Emericella nidulans
ggggcaaccaccctgcatccacggtggggcctacaaatgcccccatggttgatccacctgttttgccccctcagcaacggatacctaaagaatggtgacgccattgaggtgctatctctgatgttattcgacagaggagcctgcctgtacactccaccaaaagcagaccgccacagtgtaggtcttgttctcagtacgaccttttggcatcgtcacagactaaagcctgtgagagatacagactagtccatggtattccctctgaagcttaactgggagcggtggttacaggtgctgacacatatacagagagctcttcgttagaggagcaaacctcggcagacttactacaatgatggatcatgagggcgcaatgagtctagaagcccgatgattgaacgccctgaacgacgttcagcccgagcaatc

SEQ ID NO: 13131 - DNA, 537 bp, Emericella nidulans
aggttcgttccagccacaacgaggtcgacggctgatggactgtctagttcttactatgagtagcattggtgtgtcttactagcttacagtatactatatatttccacaactagttttgatgtatcctatgctcaatcaaggtctttgttgttcttttttcatttcatagtgctttctatttgttattttaacttcttcttttttttttttttattttctttcaatctttttttttattttttgtattatcttttttttcttttatcattacttttttttattcatcatctttttaattatttttttttatcttttatttttattttcttctttaatactttttttttatttatcatctttttaatatttttatttctttattattttcttttttcttttatttaattttatcctttcatttctttcttatttttccttttcttttttttatatttatattttcttttacttattattcacatttccttatagtatttattattttatcttatctcttcatttgttttttttattctt

SEQ ID NO: 13132 - DNA, 860 bp, Emericella nidulans
tactccgtactctgactagaagcgaaagctatcaccgcccattcagcatggcagcgaccatgtcgtatgccttgtctctcgcatcccgttccaccgcgttcttgggcgaaacgttccagccgtgattgcagccatccatcctcgcagaaaccacctcgcggccggcttcctctcttattttcaccgctagttgttcggcctcgggcgccaagctgtccccagctgccgttatgatgagtacgcgatctggaaaacaatcaggctgggcatagtatggtgaaattcggggatctttcgggtcatgcgatgaagggatgtagcattggtcgaagaaccgtgccaaaggcgcgggaagaggctttccagtggggtctggcgcggttttggacccgggctcggtatacaggtcaacgggcgggtagaaggttagaacggcgtggaatgtctcgcgagggaagagagtcgacgaggctgctagagcgaggttacctcccgcgctgaagcccgaaagtgcaattcgagcacggtcgaacctctctggctgccggaggacccaattgacaacatcctccacgtcgttaagtgccgcagggaaaggattttctggagcgagacgatactgaacgtcgagaaccgtataccccgtccttggctcattaccgacagaatttctcgtctgccattgaagggaagacaaatcattccggaagttgacaaactgacaggtttgagcagttccgattgaacaggcctaagtttttggaattgggatggtcgggagcataggtgggtgggactcgcaaaatgcctataaacaccgctttgattagtccggaggatatcacatcgcattgctattt

SEQ ID NO: 13133 - DNA, 626 bp, Emericella nidulans
gtagctcccccgctcagttggaagagaggacatacatatggctcacatcgaacttgctcgccttctctctcgtccacttgtggctctcaacatggctgagatcggagtactggaggggcatagaataccccgcaaagggcaccatttttgcacctttagcaatatgcaagtcatagagttgtgtctttcgcagagagccagggctagctgcagatgaggcatatctcacgccattggcaactggaaggttgcgggcaatcaaacgtccagaagccggagagcggagagcgcagcgaacgtgcggagaagcaagctgcgggagagtcaaagctccattgacgccaacaggggccagttgggcaacggatcttgctccaagaaggtgaattcctcgtcgaagggggtcgtaaagcagacattatggggttaattcgtagcatatgaaaaaaaggaaggaaagaggaaagaaatgagacggagaaatggagttcagacaagcgtcattagttaccggtaaagtcacgtgtgataggagaatccgccggagtgataagatatgcatgacttggccggagcttatattattgtgggggctattagcacaaattttaccaaataaattcaac

SEQ ID NO: 13134 - DNA, 947 bp, Emericella nidulans
  unsure (1)..(947): unsure at all n locations
tgtcgctaggatctcctccggatggtttccgatccatggcgcaaaatcagcaanccctaaatacaacgaggtttcgttagctttgcgggactgagctttcggcgagcccaggttactcactgtctcctttgagagcaggcgctatagatgggacttcaacacgaaatggggtcgtctgtactctcttggaggagtgtcactctttcgtatagggtgattttgacatgtgcctagttctaccatttcaccattttattttaatttttattatataagattggatccttgttcatatggcaatcttgctctttatcttcatcttcccactatttatcctattttatctaactggtcttattacgtttactaacatttaatctcttcaactttcttcttttagttatctatcctactaattattatatcttttctactctttttcttttccaactatctacatcattattgtttactaaatttatactattttcttttatacaatctctcttttcattttctatcttacatttcatttataattactttctttctttatattattgctctctgttagcttatttaatccttttatctatacttttacggcgtttttattctcccttatactcctttttttcaatttctaaatcactcctctctttccattatctatttcttaataactttagatcttctaatagtcttttattttcctattatatcttacccatatatcttttaatacttataaattattatatatattctattcaacatccttaatttatttcctttatattctatctccatctcatatactttaaatctattctcttctatttctaaattcgtcataatcttctttataagctccttcttacttctttttcttatcatcttataacatatttgctcttatctattttcattactatctaattataatg

SEQ ID NO: 13135 - DNA, 1243 bp, Emericella nidulans
ttaagaattcgcgccgaattaaccctactaaagggatccaaaaccaaagatgtaaatgcgccgggaaaggaaatcttataatctgctgaaatagaagaccaggaatgaagaagatgaaaaagggatttaaaaaaaaaagagagacctgccttggatagatagcctacgcaacgacagcctcggcggcacctgcagccccgaacaacttttctctccattcaccgcagaatgcttcaaagccactgaccacatcaccacactcacgaccagcctcccgttccctaagcctccgatcccagtctcctttctcgatccacctcgtgccctcttcacggccttcttcctccctgcggaggtcagcaacaagttctcgggcagctcggagacgcctcgaagcagtcgaggtgagctggcgggattcgtagagggtgtcgctcaggccgcgaagagagagagttatatcagaggtttgagagataagcgtttggagggaggtaagagggttgtttgtcggcgacggggaaacttgtgagggggtatttggtcgggaggagtggtgatgttgatgttgatgttgctctgggaatggataggggaggttagggagaaggccctcgtcgatcaaaggtatgagggcgtcaatggcgtcgtcggagaggagcgggaaaggggcgaagaggagggggtgggtgaggctctggacagtgcgggtttggtgcgtgaggtaagaggttattgaagaatgggcagtgatgagtctggaaagcatcagcggtcatctctatgaccctcacgtggcgaaaaagaaacgacggggacatacctcatggcattattctcaattccgctctggcccctagatcctgaagcgctgtaaccgcccgttcaataacatggtcttgctcgctcccgttattctcgagaccccgtctcgctagactctcgatctccgccatctggttctccagtgccggggacatatcggccacctcctccaggtctgaatcagggccataatccgagccatcatattgcgactcgtgtcttcggtgtcgatgcgtaccgtttcgcagtttgggccgcggcggctgcagtgaatctctctcagacaaataaccgggcgaaggcgtccgcgtcctcatccgttccagcggttgtgagtcatcagcgcagctcctgtccagaggcatatccatagccattctcctcatcctcccaagcatccgctagttcatccgcgaga

SEQ ID NO: 13136 - DNA, 930 bp, Emericella nidulans
agatgaaccgcagtattgctgtggctctgtaaacacacaaagcggcgacagttataatgacgatgaagaaaatgataatggcgaagcctcctgcgagtttggtaatccattccctatacccgctggaacggcgataccagacatcgccgggctatcgtccacatcagagccgcatgcagacgacaacgccaaagactcttcagataccgactcccactcagactcccgaactccagcccgaatgacgactcccctcgctatcgccctcggcgtcggagtaccgctcggtctaatcctgatggggatcatcctctgggcggtctgggagcggcgccggcgacagctacgcgacgaagagacagagcgggtattaggtgcggatggggatgtgctgtctggtgtctgctgttattttggtcatttcgcttgataacttatctggctgtgctttgattaaacaggatcgccctatgcccagcatagtgtttatgaatcctttgtctttctctaatcatcactgctatctatctcattattacattttcagttccttttttactatcttaatctatcttctttaccaattaattaaattttttctttttttctgcccttctctcatattaacatcttgttgttcttgtctcctctcctcacacctgttacaattgttctaatttttttattctatcaactcttttttttctataggtaaattactttacattcacgattgtattgtacttcgtaccttcttctattctctggtcctgatctatgcttatgctgtccctatcttaccaattattcacttatttattctatattcattactatatatcttattaaatatttcctgtattgacaataattctttattattatttatgtttacttcaatattatattattacttattcaagtaatata

SEQ ID NO: 13137 - DNA, 826 bp, Emericella nidulans
gtgatcgctagtgggtgtccgtctctgtgtcgcgtgctccagtcaggaacaggggtatgggttggggtaatgaggcatggttgccttccgctctgccctgtttcccgctctcctccctccaccccctcccttcctcttcaatttcccctcccccccttctcctcccttccccctctctccctctccttccctccacttacttcctcccccttccttcctcttctccccccccccccctccctccctttccctaccttcccccctccttccctccccctcccctccttttcttccccccccctttcctcccctcacctctttcctaccccctccttttcctcccactcatcccctcttccccccatacccctttcccctcccctatccccttcctcttctctctcctctcctctctccttctctttccttccccctcccatcttttcccccctccccttacaattcctctttgccccctctcctgtaacccaccctttctctttcctccccctctcttcccctacccccttctcctcatcacctttcctccctcccctctctcctctctcctccattccccttcttttcttcccccccttccatctttataccatacgttcctttccccctatcctgtccatcccttttttcttcccctcttggtcccctttcagcgttaaaccccccccttcctccacggcctttaaccgtacccaaccgtttcaacctccttcccctcgaggaccctcctcccaaatgagtagcttccccctttcttacctccaggcccgttttatgtttttaccccccccaaggttcctccccc

SEQ ID NO: 13138 - DNA, 1133 bp, Emericella nidulans
aaaagtaacaaagaaacgaaaaaaggaggggaaatcactaaagacaacagaaaaaggaagagaacaataaaaaataaacaaaaaagaaaaaaaaaagaaaaaaataagaaaaaaaagaacaacaaaagaaaaaaacgaaaaacaaaaacaaatacaaaagaacaaaccaaaaagaaaagacagagaaagaaaatagaaaaaaaaaaagacagaaaacaacaaaaagaaaaacaaacaaaaacaaatgaaaaaaaaaaaaaagaaaagagaacaacacagaagaaaaaaaaacaaaggaaaagaaaaaaaaagacaataaaaagtaaaagagaaaagacagagaaaaaaagaaaaaaaaaaaagaaaaaaagaaaacaaaaaaccagaaaaaaaaaaaacaaaaaaaaaaaaaagcaaaaaaggagaaaacaaaaaaacaagaaaaaaaaaacaaaagaaaaaaaagaaaatagagaataaaagaaaaaaaaagcaggaaagaaaggacaaaacgagaacaacaagatggaacacgagaaagaaaaagaaacaaaacaaagaaaaagaaaactagaaagagaaaagaaaccaacgaaacaacacaaaaaaacaaccataggccaagaagacagtcaaaaggagaaagatagagacaatactaaaagacataaggaacaaaaaaaaaaagaaacggaaacaaagaaactcagaataggaaaacaaaaaacgaaaccgagacagagtaaaaaacgaaaaacaaagaaaacaaacgaaagaaagaaaaaaaagaaacggcgaaaaaagaaagaaacggaggagaaaaaaaaaaaaaggcgaaagaaaaacaagaaaagaaaggaaaaaaaaaagaagagaaaaaccacaaaataaagaagaaaaagagaaaaaagacggaaaaaacaacaaacaaaaaagagcacaacgggagagatggcgcacaaaaacacagagaaaaaaaaacaaccagacagacgaggaacacaaaaaaaggagcacacaaaaaatcagaacgtaaaaaaacaagagaggaaaaaaaaaaaaaaaaatcagaccgaagaaaaacgaaaggaaacaaaacaaaaaagaggggggaaaaaaacaaggacagagaa

SEQ ID NO: 13139 - DNA, 750 bp, Emericella nidulans
ccccgccaggaagacagcccgaggggagggagaggggagcacgaccaccagcgcaaggaccaacggagggaaaaagggaagggcaaggaaaagacacgccccaagacgcccaaccaggagagaggacaccaccgacagcaatgaacagcaggaagccgaacatgaacgacaaaccaggcagcacgcaaccaaacgagagcaaccgacagaccagcacaacacgcaatcaaccagcaatgcgacgcacccaaagccggcgaagcaggccacgcacagacgcgggagcaagagagaccacggagaggcagacaaagcgggaaccaacccacgcccagaacacacgacgacaaggggggagcagccaaccgcgaagccaacacgaggccccgggcggaccccagcgcaccagggaaggcgaaaagacaagacccgccggagccaggacacgcacggaggcaaaggggagaaagcaaggcaaaaccgggccaagaaaacgccagcgggagcacaagggagccgggaaccacccacgagggggccaaccgcgcgcggggaggggccgagacggcacagaccgggggggccaaaccgacgggggggagccccgaagaaggacggagagggaaggaagggaagaaaagccaaaaccgaaggcgaagcaaagggggccccgaaccaaagagcgggccaacccaacccgaaggggcaaaggcccaggacccccggcaaaaaggaaccaacccaaggggc

SEQ ID NO: 13140 - DNA, 913 bp, Emericella nidulans
cagctcactatagggaaagctcggtgccacgcatgctgcagacgcgttacgtatcggatccagatttcgtgattggatgatgccaccagataacagttctttttcttggcgcacttgctcatgctcaagacctttttgtacgtaagtgaatgagtttaagtttttcagttccgcttttgtaccgaacttctcttgaccaactggacgaagggaaatgttcgcatcacaacgtaaggaaccttcttccatcttacaatcagatacaccagtgtattgaatgattgattttaacttctctaacatatgcatatgcttcttctggcgtacgcatatatggctcagatacgatctcgattgaaggcattccttgacggttgtagtctactaatgaaccatcagctgtatgcgtcgtattaccagcatcttcttctagatgacgacctgaaattccggtacagagcatttcaccgagtaatttggctttttttcgatcaattacacgaagacgtctatgaatagaaagagtcttcagctttttgttatctttatcgaaccgtttgacggacaacatccgccacgtatgattggcacttaacgcattttgacgaatagatcgtgactaacttttattaagggcgaagtccccggtctccgttaaatcccctcaatggctgggctcaccccgtttctttagattcaaataaacgatctttttcttagcacctaacgtcaatcgtatggtttaaagacctcttcacgacaaggggtttggggaatttatttttaaggacgaaatggatatatttataattttaattgaaaaactgttttttttgtccgaaatagtggaccatttttgttgaaattttttgtgttccgcggtttttattttaatttaaattaattttttttt

SEQ ID NO: 13141 - DNA, 377 bp, Emericella nidulans
aaagctcactttggggaaagctcggtaccacgcatgctgcagacgcgttacggatcggatccagaatttgtgatttcttaatttggatagattgttgtggtattgatgctgtgggagccattgttaattgctgcttttacagaatcaattactgctgaaccatcttctactttaaaaacacctaaaccaaaccaagctatttttacactcgatatgtatatgtgtgtatatggctttgaaacttgttaaaaacacttaattctcccctagtttcattacccgttgatcttcctgcttagcgaattgcgctctgaaaagtcatattcgtgatgagtttcgtgaccctaaactgcggaaccacgatgccacacgtctac

SEQ ID NO: 13142 - DNA, 925 bp, Emericella nidulans
agctcactatagggaaagctcggtgccacgcatgctgcagacgcgttacgtatcggatccagaatttttgatttaccaccataccttctctatggtggtatattacagaaaaaagtatacaaaaaaagaaagtgaattactccacttacttctctttcttatcacgaaaaactaatgcactacggttatactccacatctttcacttgtaatcgggcatttattactcgagctatcgcaaacaaataatcatataatctatttacatactttaagacaacttcatttattttcacttcttttggcactgatactatagagcgatctgctctccttacaacagtacgagcaatatgaataatagccgccgactcgctaccacctggcataatacagcgtccaaatggcgcggcttcttctatacatacatcaagctttctttgtaaacttgcaaccatttgacttgtcaatttatatggaatgtttttgaccactattgccaagccttctccgaagttaaatagcgatgatgaataatttcaagctaattgcatggttttctaaaagcactgcctataacctaagggatctgttggtccaatttaaaaattatgcctaactttatgttcataagcttgctcccgaaagtgtcttaataaagttggaactatataaatatagccgctaattacagtgggaaaataaatgcattatccaagaacctttgtggattctagccataagcaccaaagatctctgtctttccattgttgcatatgcaaccccccattttcttagtaactcaatgcaaccaattcctatgtgctccacaagtgtcaattcaccttacaattcatgttcgttatttttattgaccttccccccctctcttttctatattttatcctcttcatgcctctacaata

SEQ ID NO: 13143 - DNA, 835 bp, Emericella nidulans
  unsure (1)..(835): unsure at all n locations
gaagaaccgcaggcggagaattcccacgctctggggtttcacagttgatcccaccnaccgaagagcccgcgttgttggcgattgggcaaaaacaaccattcatggaccaacagcatgcctggaagaagggggttgaaccacctgaaccacgccggcgacacgaggtggagggcgccacccacggcaatccacgagcgaacgataacagctatgaaaacccatcgtgccaggaaacaggctgagaaccccccgaaccggaccaacaggcaaggcagaaacaatggccagcacgcagagacccagttcctggacacgctcctagacgaaaaaaagatcgcggagtgcaggcctgtcggaagcgctaaccagacaggtgacaggccagatgacccatagcgatggacacaccaacagacatgcccacactgttacccgagctgaccccaaacccccgagagaagggcgcaggcatatacgcggcataactatcaactgcgcagagccccgaatggagaggccagaccaattactgagccgatgaaaaaacaccacgagctgcacatgagaagggtcaacccccccgaagggagggacaaaccacaagccgcgggcagggatcgaggacgcccagaaaccacgtggccaggttactaaccggaccggaccccggaaagaagtgacagtgcgctgggcccgggggccagaaaaaagccccggggggggtggaaaaaattcttcaccccctagggggagaagacggaccaaattacacagaaaacgaggcggaacaaacagatcccggggacaggggggcccccccaagaaattacgccct

SEQ ID NO: 13144 - DNA, 933 bp, Emericella nidulans
cagctcactatagggaaagctcggtaccacgcatgctgcagacgcgttacgtatcggatccagaagtcgtgataacaactccgttacagctaacaggtcgggtttcttttcttatttaacttcataccaccaacatttacgttctttgattgtaaaataaatgtgacagaagtttatccagttaatgcgtagacaagtaaatgagctaaattatcgatattctatttcgccatttccgtagcactaatgactttacgcaaatttgacaagaaaaaatatatagctaggtatgatccatacctagctataacattacttctattctttatccaattacgtcttatacgtctgtatgcactggccactcttctaatgtataagccatttcccaaaatgaatattcatattgactgtgaataataaaatgctgtttgatacgtttgcgatctgcctctgttactttttgagagattagatctaaacgggtaacttgctcttcaactagcgtaccgaaccaattagacccataagcggaaatcctatttgtataaattgggtgtttcggctggtccttttttagttattgtgagtttataattcacaccatgtcagggttaattctggattgttcttttaacgccttaatcttactcgtgcacttttgagtatcccaatcacatgggcagaaaatcgtatttcctctttgttctcaaggtctgaaatataggaaaatatttgcttaattgtcttttgatgtcttagatatctcttatgggttatcgtctaatgttttttattagtatttttctatttaatataatgaactctttattttatcatttcaatcgttttacattaaaactttttttacttttaatatcctcttctattactattttcttcatctaatacataatattcatctatttcttt

SEQ ID NO: 13145 - DNA, 903 bp, Emericella nidulans
  unsure (1)..(903): unsure at all n locations
aaagctactttaggaaagctcggggccacgcatgctgcagacgcgttacgtatcggatccagattgtgtgataacaatcacctgcacttcagggactttatatctcgttggcatgccgccttgcgccccaagtttctttacagaaagaccactcgtagtattcgtgaatctaattgctttatgaagtgcttctccttcagaaagtgcaacagctaacgcactattaactgcattaccagctccacatagaattcactacatacacgattagtgctaggaccatgaacaatctccgagaattaatggacacggacaccgtttaaacctgctttcattaggcatttattagcatactgcctcaataaaccttgatgtggagagaggccaatctgtagtacgaagaggagctttatagtgagtgggcataatgtatgcatggcataggtaatctgtgttgtgataaaaaccgacagacatccgtgatctaccttgactggacttagtagcactacaggatatgcttcaatgcacgttacgaccccacagaaattttatcttgtatcgtaacttttggactttcttaaaaggttgtgggccggtccaaatcagattgttcctaccgcatgggtgcaatgttgcaaccaactaattattttcggaacaaaatcataacggacaagttcttctttaacatcacagtttcaagaagtgtttccttaaatctatcttacctttaatttcgaagncactcttttagtaatttttaatcacgaatacggagatgtctttaaaacatttaaaggttgatccatctttgtctttgttaaccactcgggtaaacatatatatataccttccctacatgttttttattggtataataatatgtacttctaatattac

SEQ ID NO: 13146 - DNA, 544 bp, Emericella nidulans
gatcccctgcggacttatcagagcgaactggatccaaccagggatttacccgtgatcgcatcagtctcgaagctcccgcatccggcgcctgaacgctcgacattttcgaccgaaccagaattcttattttctcttccgcgtagatcatgctgtcatagacgcctcgaaaacgatgaactgactcctgatcgctgactattctccgctcgccctgggagtataccgaacgccggtctcattcgagcaccacaggcccgcgaactatgggccctagtatcgcccccttgccctgccgagtccgacccgggtagtggttgctgggccttgccgtcggcatcggcagtggttgtagtgaatcggattcggagctgtaaccaggatggccaagctggagggtctccaggagggcctccagggcccggacgaccaccatatattagcatggtctcgccgcgttctgggggtgtatcctccaagtcattgacgttgccacccgtcaatttgtctatcagccgtcgttgccggcggtttctcaagatggcgg

SEQ ID NO: 13147 - DNA, 1026 bp, Emericella nidulans
cgtgggggtgatagtaagagcgagcatgacagcgaggatgaggaggaagaggaggaggaggaggtttattattatacatgtgaatggcaggacatgggggtctttattgattcaatgtgtagctccatcatacccaacatgtcatttatgtcttaagtttactcgatcactctgtagggggccatcaaactactgttgcacaaatataatttcaagtacttatcagataaaagtatgtttgaatgattagacttacatagcccataatatacagatcaggagaataatgtaatctaaaaatattttttcatagattaataatattcctcattaattcggttttttcttattattgttcatacttaattccacttttaataaaatttactatactatcttttattttaatcttctatatttcaccctacttcaaaactcttttgacgttttaataaaactctgcatactcttactataagaattgttttgataatattctttacttttttactattttaactttttaatacattatatacttgactattatttacagtaaataattttaatcaaatttatttttcctcattattttatcttttatttgatgaacgtttcttttaattaaattaatatttagctaatttttatttagttaataactaattagcactattaagttctaccataattttgttttctactatctttctttctaatttctctttcaatttagtcttttttttgataggttgtaatatttaccattattactacatttacgaataattttttatgcatttacttttcatccttcacatctttcaagaatgttattaaattaacttttatactataacaattttattaatttatttaattcatactatttttttatttatttccttttttattttaatcgctttctaatttatgataatttacttttataatttatctttcatttttctatcattatttttttcatattatacaatacttattactttcattacaaatcttctt

SEQ ID NO: 13148 - DNA, 759 bp, Emericella nidulans
  unsure (1)..(759): unsure at all n locations
tcctgccagccaaatgtaggctgagaggatctacctagcccggtgagctgtctggccgaactaccgctcaacatatctcgtacgaacaagcggcccaacctcaccagtagtcttgtgctcccacatcttcaagcaccctttcccatgataatcatccagactggcatagaatctgcccccaagccgcttcagaatctcacatctctcatccatatcctttgcaagaacgatctggccggcggcattcccataatggccatcctgctcatcccactcaaccaggtcatccacgacgtcttcgaacgcgccgtggatgaattcggccacccataacccgcccgtactgggccatcccacgcgcacccagagcgattccactgctgtcgcggcggggacctcgtcataaagaaacagatttcgagcgctggtgacattctgggcaacggccgcgatgagattgtagcgtgatcgactgtcgtaccacggtgcttcaaggccgggaggacattttggcagacttggtcctcggcatcnttggtcctggtcccgcttcctgtgtggattgaggtagtcccagcccagataatcaaaatcaactcttgtagggtgggaaagcacaatcaggccttctttagacggccagccatagaaccagagcccggtggaggggggcaacattcccttcatgggggaattttgctttccgggtttgcagcgaagcctttcaagggccttctttgcttgggccgggggatgggc

SEQ ID NO: 13149 - DNA, 356 bp, Emericella nidulans
tattaaaaaaaaaaaaaaaaaaaaaaaaaacccggggttttccatatgggggccttaacccaaaggatttctttccgtccgacccccggtaaattattataaaaaccgtctccgggaagaccttcgggggggaaaaatcaagcccccatttttttccgggccgaaagactgatgtcccaataaaaaaattttcgggattagaagttgtttaggtggaaccggttttaatgccggtcaggtccggggaaaaataacttaatccggttgttccaaaagtttgctaaatggattttgagccctaggttccaggtttagggaaattggccggggaaaaattggggagtgagcctcccaaa

SEQ ID NO: 13150 - DNA, 838 bp, Emericella nidulans
gaagagaagccaggagaaagaaccccccggggaaaccgagcaaagtggatccaacccgaaacaaacacaaacgggttgcgcaaaaaaaaagacgagcccgcacatacaacaaggaaacgccaaagaagaaacgccaaagacagaagggacagaaaaggaagccgaggaggaggcccaccgacaacacgacagcgcaaacgaagacacagacaccaaggaaacacgcaccaggaaaagcaaaggacccacaagacagagggaggaccggggcgaagacacggaaaaacacggcgaaacaccgggggaaacacgaccaggcaggacaagggcgcccaggaagaaaaaaagaaaccccaggaggcggcagaaccacaagagaacggacccaaaacccgacaaggccaacaacccgggagacaggagaacaggcaacaaccgccgggacccaaccaaggcaaacccaaagaaagcccggaaaagaaaaaaagggccaaaacaaagcaaaagaaccacaagagccaaaaaccaaagcaaggcaaagagaggcaaaaagcaagacccggggaaaaaaccgccaaaagcaggggaccagccgcgcgagaccaaacccagaaaaaggccccaaaaaaagaaaggcggaaaaaaccccgcgcaaaaagggacacaagaagaggaagggggcacccccgagcaccaccccggagagggaaaaaaacaaagcagaaagacaggacccaaaaaaggaacagaacgcaggcaaaaaaaaaaaaaaaatgagggaaaacaaatgggacaaaaaagccccagacacgaaaaaaaacccgccccccaccacaaa

SEQ ID NO: 13151 - DNA, 813 bp, Emericella nidulans
cagagtatgatgcgaatgcactaacgcgctgatcagcagatcacacgctgacgaaccacagtttgtcatagggttcaaccttcaataaaaacttcgaagcccactcggatgatctgcactagtgaaacacggtcgtcttttcccccttgacatgagtagggtaatactttattttcccgtttaagggttgtcacgagcaatctatggttcatagccagccctgcgggaattactcctgataatcacgtttatgtgagagtcagggcttcaccagatactcctttaagctagaggattcgagctggaatgttatgaggaagatttatttgtcgtccgtgtcttttgtatcttttcaccattgtattccccatattctttcccccttatgttcgactctcttcttgtttctatgttttttaattattgtttattttttactgtccctttctaacctttttgtgttttacttacgttagtaatgtcttccttatctttattctctattttttttatttttttattttctatttctcttttttatttttttgtcattatttaattctttttctttttttttacttttttacttttttactttttttcattttaattttattatcttataacttacttttttatcttttttttttttttcttatttatattctttttccaattttttatattctttctattctctttttccttttttcttattttttcttcttctcctttttcaatttttcttattttttttcttattctttttttcttttcttatttctctctctcttttctcctctgttactatcc

SEQ ID NO: 13152 - DNA, 735 bp, Emericella nidulans
aatcggtttcctagtctcggacttatgctacaatgacgccagctttgaacccccaattcctatgcattaccgagaaaaagactactcaggggcataaagccgcaacttcatggtatatcctatatattagtgtatggggcagttcgggaatatatgtgaatgtggatcacagagccccttccgccagccgctccagagcctccccctcaaccatcatcttcaaccattcgtccatagccttcgcgcctacttgtttataaaatttgatactcggctcattccatgtaaggacactccactccaagcgtctccccctaatctcgagtaccttggcagccagccacttcagcagcttaaacccatatccttttccccgcgccgcgggctgcacgtataggtcctcgaggtagatacccggggctgcgcgccaagtagaatagttgtagaagaagagagccatgccaacgggcttgggtgacggattctcgggcgtcgcggggggcgtgatgagtgcggtatagacggagccccgcttgggggtgtcgtcggggaaggacaaggtcgcgagaagggatttctcggtggcttcgacttcttgcaaggcttttttcgaatcggcgagttcgcggatgaattgcaggatcagggggacatctgtgggctgtgtcagactgggtgctggttatggactgggcaagagaatgctgaattgaatccggggggtgatatacttac

SEQ ID NO: 13153 - DNA, 425 bp, Emericella nidulans
ctcagtttagggaaggctcggggccacgcatgctgtagacgcgttgcgtataggatccagattttgtgatatcgatttcatggctcatcaaagataatgatcatgctaaacgaagactctaacatcaccttgcccaaaggtaatgatcgagcatcggcagaaaggagaccgtctagaagtgtctttattataatggtttaacaagaacatcaactactatcaccgtattgttgaggcgacagggagaaaaagaattttactgtctcattctggagatagacacaacacacgtagctcaagctacggccgacactattaacagctgagtgcgaagaagctcatagtccgctgtagtagacacgactctagtgaaactagctgcaagtgcctcagctgcgcatagagtagctgggagcgctgtgagc

SEQ ID NO: 13154 - DNA, 317 bp, Emericella nidulans
tcgtcggagcgtgccaagttgccgtgcatgacgcatgcgcaaatctgaagttggtgttctgggctatattactcagaacttgcgtctcttgcagccgatcctagacggtagacattatccgtggcttgaatagacgtgtgaatggcagaatcatactcatgcagcatcgctacattccaagggtgagcgatctgaacaaacttttgacatagtaacctggaatctaaccgggtgtcctaggcagttcctgttttacttttcttcattaaaacctgaaccaggtccggaccgttggtgatcacacggtcatgaagtga

SEQ ID NO: 13155 - DNA, 736 bp, Emericella nidulans
  unsure (1)..(736): unsure at all n locations
agggaagtctgtggctactagttccatcaaccaaatagtggatgttgcagctcggctggtctaagggggtttttttgaatcaaagggggcttatacacctcatacctttctcataccttgttaactttattgtcctgttccctactctgtattttcttcactatcttcctccttcccatctttatcccttctttttcttctactcttcttcttctttacttctctttttctttcttttctttctttttattattcttctttctcttttcctcttctcttctttctctcttttttctctctttttttttttttttttttctccattcttttttattcttttttattttttatctttttttattttttctattctcttttctcttctttccttctcctttcttacttttcttttttttctttcttccccctttattttcttttatctttctacttattttctttttttccctttctttctttctctttccttttctctttctttcttttatctctctccttttttccttctctacttcctttcttttttattttttcatantgtaatcttcctcttctcactttcttcttttctactctttctttctctttctctttttcttttcttttcctcttcttccttcttatcttcttttcttctcacttcctccttttttttttctctttctctctttctctctcctctttctctttctttctctcttatcttcttttcact

SEQ ID NO: 13156 - DNA, 878 bp, Emericella nidulans
aagcatactatggggaaagctcgggcccacgcatgctgcaggcgcgatacggagcggagccagatttcgggctcggaggagatacgcttgtgaatcgcaattggcggctgattctgaatagcgaccatacactgagccacattggcgagggtgatggctatacccagctgccaacacacaaagcttctgacgctaattggactgctccaagccgccgcgaggaggaggataccttctgtgcccgcaagttgctggaacccatgactgttgggcgctaggcgtacatgaacacctgcgctgatatgaccaggtgacgagagaatcgagccttggaggatcgcacctcggatacgctcggatgatgttttagaccgcagtgcttcttatgcctaaagcgcctgaagcttgagctcgaccgaattccttgtttgtgttgatgcgatgacagttccttgtatggctggaactaccgaagctggtcgtggccgttatggaaaggcgggggaacggatgcttattttatcgagtggaacctgggccgctgatgattgtgaccgtttggcctgatcccgtgctctggtaagcccgaaatctgttgccgtaggccccccggaattccgtggattggttaggtttagtgataccaccttcgttgttatgggctggggcccacatcgatccctggtaaaactttcggaattattggcctacattgctacttcagggctggaacccaacccggccaggggccgggaatttttttcttatgctgctagggccaatcatacattgttgggccgtccttcgccttttcttatatattttttttggaaattttctataggaacaaaaatttttgcattctttacattttatta

SEQ ID NO: 13157 - DNA, 1035 bp, Emericella nidulans
  unsure (1)..(1035): unsure at all n locations
caaaaaaatattngggggaaaccgcggggaggaaaaaaaaaaaccggaaaaaaaatttaaaaaccaggggtanaaaaaccaaaaaaaaacnancaaaagccgccgattaaaaaagggaaaaccccccaaaaaaacacaaaaaaggggaaaaaaaaaaaaaacaaaaaaaaaaaaacaaaccaaacaaaaaaaagaaaaacaaaaaaacaaaaaacaaaaaaaaaaaaaaaaaaacaaaaaaaaacaaacaacaaaaaaaaaaaaaaaacaaaaacaaaaaaaaaaaaaaaaaaaagaccaaacaaaaaaaaaaaaaaaaaaaaaaaacccccccccccaaaaaaaaaaaaaaaaaaaaaaaaacaaagaaaaaaaaaaaaaaaaacaaacaaaaaaaaaaaacaaaaaaacaaaaaaaacaaaaaacaaaacaaaaaagaccaacacaaaaaaaaacaaacaaaaaaaaaaacaaaaaaacaaaaaacaaaaaaacacaagaaaacaccaaaaaaaaaaaaaaagcaaaacaaaaaaaaaacacagaaaacacaaaaaacaaaccaaaaaacaaaaccaaaacaacaaaaagtcaaagcacaacaaaaaacaacaaacaaaaaaagaaaaacaaaaaagaaacaaaacaaaaaacaaaaacaaaagaaaaaacaaaaccaaaacaaaaaacaacacacaaacaaaaaaaaaaccaacaccacaaaaaaaacaaacaaaaaacaaaaacaacaaaaacaaaaaaaaaaaacaaaacaaacaacaaaaacaaaaaaaaaaacaaaaaacaaaaaacaagacaaaaaaaaaaccagaagacaaagacaaaaaacaaaaaacaaagaaaacaaaaaaacaaacaaaaaaaagacaaagacaacaaaaaaaaaaaacataaaaaacacagaaaaaaaaaacaaaaaacgaaatgaacgaacaaaaaaacaaaaccaaacaaagaaaaaaaaacaaaaagaccacacaaaaacaaacacaaaaaaaaaacaaacaaaaaac

SEQ ID NO: 13158 - DNA, 787 bp, Emericella nidulans
tgggacgaaccgttatatgagctcggcaagatccagtatggtaatcgttacacaatttactcacccaaagacggccagccttgcatggatcacgaccgaaccgagggcgaaggcattggaccccaggagtacacggctatgaagctgaaggttaaggagtgggcacctaagattgcagaactcgtcaaaggcaagattgaggatgacgccgatgtttacttcattcccgctaccctgcgtccggagaccatgtacggtcaaaactgctgcttcctcggcccgaagatcgaatacggaattttcagggtcaaggagaagcagtactatatctgcaccaagcggggtgcttggaacatggctttccagggcaccttctttgacagcgagcacttccccaagactcaggacgaactgcccaccgttctgactgctccgggatcggcattcgtcggtacactcgtcgacgcacctctgtcattccacaaggatggtgtgcgcatccttcctatggagggtgtttctgctaccaagggtactggatgtcgtcacttgtgtgccctcagactcccctgacgactatgccactttggtcgaccttgcttagaagccccgatactacgggctttcataaaggagttgggccttgatttggaaaaaattctcccttttaattggaaaacacccttacggtaacgggtaaaccctttaacccggcaaccaaagtgcctttgttggaaaaaaaagcttttaagaaatttaaattctccccccaaaggggacggttgta

SEQ ID NO: 13159 - DNA, 954 bp, Emericella nidulans
ggggagaaaaaaaacgggggaaaaaagtaataaaaacaaggataaaaaacccgaaaaaaaacaagcaagacgcagatttaaaagggaaaacccccaaaaaccccccaaaaggggaaaaaaaaagaacacaaaaagaaaaaagcggaaaaccaaaaggaaaaagaaaaagagaaaagccaaaaacaaaacaaacaaaaggagaaaaaaagaaaacaaaacaaagaaacaaaacggaacagcaaagcacaaaaaaacagaaacaaaaccaaaaaacaaccaaaaaacccacaaaacacccccacacacaacaaaaaaaaaaaaaacaaaaaacaacaaaagaaaacaacaaaacaaaaaaaaaaaagaaaaacccaaacacaaaaaacccaacaaaaaacacaaaagaacaaaaaaaagaacaacacaaaaaaaccaaaaaacaatacacacccaaaaacaaacaccaaagaaaaaaaaaccaaaacaaaaaaaaacagaatcaaacaaaacaaaacacaaaaaaaaaaacccaaccaaaacaaaaccaaaaaaaggaaaaaacaaacaacaacaaaaaaaaacagaacaaacaaaaaaaaaaaaaacaaaaaaaacaccaaaaccaagaaagagaaaaagaaacacaacaaacaacaaaagaaaaaaaaaaaaaaaaaaaacaacaacaaaaacacaaaaagaacaaaaaaacacaacaaacagaaacaaacaaaaccaaacaaaaaaaaaaacaccacaaaaaaagccaaaaaagaaaaaaccaaaaaaaaccaaacacaaacaaaaaaaacgaaaaaacaaacaaaaacaaccaaaaaaaaaaaaaaacacaaacaaaaaaaaaaaccccaacaacaaaacaacaaaaaaaacacaacaacaaacaaaaaaaaaaaaaaccaaaaaaaaaaaaacaaaacacaaacaacaaaa

SEQ ID NO: 13160 - DNA, 1073 bp, Emericella nidulans
  unsure (1)..(1073): unsure at all n locations
ttcaaggcaaagacctcgtgagtttcagtcaagaccgctctatccccaatgtcggacgagcaaagccggcgaccggaaagcacgtgacacggatttggagagcactataattacgtaacacacgtgctgcagttcacgtgacaaggcctggatgaagggaatgcgagctgactttccctcccgctgcgagggcctcatgcggtctgtctcgacgaattctcgatttttctgcttgtcaaaattcgccgttttggtggcttacaccggtccgtgcaaggcggctgtcccgtctcgtacttcctttattctcaccttccccttgggacattcgttcttaccgcctactcctctgctttggccccgacagcgccttcttgatttgaagccttcattctctcctgtcccctacctcaaccttgcctggctatcaggtttcatctcgccgaaaggtaagcatgtttgctggacgccatctgtgatgcttctctaattggttacgatcccctggccatggagagcacaacagtcatgaacagcttgtttggtgggactcgcatgatgctaacgtgacctccccggattagttggtcgagaccgaacgaggagccatgtttgcgccagcccctacgaactgcttcattacattatatcgcatngactgaattgtcgattgctgcctcacaacccgttaatttgtctgcattctgttctgccccatgaatagagctcagcatcatacaccctatgaaacatggctgtcatgcgtttgttgacactactgcagacggctgtttgatgtccatttggacgtgcaggattttttataaacacagtgttccagtttcccgagccccaagcccttttttagagtaaattcctcaacccagcccaataatgaaattaatattctttcctcaaaaaaataatttcttgttgttnaattaaaatttaaaaccccacaaaaattttttagcttttgttacttttttctacagggggagcggtcttttttaaaaaaatttccgaaaaaaaacatgtttgtgggtggggttttcttgggaaatttttcacct

SEQ ID NO: 13161 - DNA, 651 bp, Emericella nidulans
ctccccgttacaaccacagaattagtgagatacttggcgtcatttgtttggtattagaaacattactttcccagggactgcccccggtaaacgctcgacttacgaatcaacactgtccataaggtcacgaaaacaaaaagtcctagataggcacttttctgcagcggaaacaaaatcgggaagatgtgatacggcagactctgcgaccagccgtccactggatggaatgcatagctggcgaatggcgacggcacgatccatttgtgatgtggtttgtgaagccagcggtataccatcggaacatgaagccagcggtgaatccaatagattccaaagtccgtgaagcagacaaagagcggatactgcagccacgtgtacgcaggaaatggagcctcgctcgcaaagttgtacagctttgaccaaccacgcacctaggctaggaagaaaggcgcagtcaatatggctatcacggggatcgcggttacaccttgtcgtatcttgaggcggatttagttcgggaggaaatggtggtgtcgaatgagccccttattcaacattgtgtggtaaactatcatgctttcaatgaggtacatggccggccctaaattcttgggagcggttcaacacatgggtcagcctattttttcatgg

SEQ ID NO: 13162 - DNA, 1286 bp, Emericella nidulans
  unsure (1)..(1286): unsure at all n locations
aaaaaaaaagaaagtgaaaaannaaaataaagaananagaaatntaaanaaaaaaatttgttttaaaagaaaaaaaanaaagngnaaaaatgggaagaggcataaaaaaaaaaaaataagagaaagaaaaaaaaaacaccaccaccacaaaaaaaaagtaataatagaaaaaacaaaaaacaaaaacaattaaacaaaaaaaaagaaaataacaaaatgatagagaacaaaaaaatgaaaaaaacaaaaacaaaaaaaaaaaaaacccaaaaaataaaaaaaatagacataaaaaataaaaaaaaaaaaaaataaaaaaaaaaaaaacaaaaatcaaatttaaacacacttagctcaaagaacaaaaaaatacaaaaaaaaaatgacacaaaaatataaaaaaagtaaaagaaaaataatttgaaaaaaatgaaaagaacactgtcaaaaaaaaaacattgaaaaacctaacaaaaaaatacatttaaaaaaaagaatacatattaatgagaataaaaaaaaaaacacaaaaataaaaaaagaacataaaaatagaaacaaaaaccacggaatataagaaaaaaacaaaaaatataaaaatatagagaaaatacttagaaaaataaactcaataaaaaaaaaaaaaaaaaaaaatcaacaacaaaacagtaaaaaaaataaaaaatgtaaatagaaaaaaaaaacaaaataaagataaaaaaaaaaaaaaagaaactcaaaggaaataagaaactaattaaaaaaaaaaaacaaataatatatccccttttaaaacaatacagcaaaaataaaaaagcaaaataactccgaacaaaatagtcaaacatataaaaagaaaagaaacaatttacaaaaactaaagagaaaaaaaataataaaaacaaaactctaaaaaacaaaacagtaagataaaaccaaataaataaaaaaaaaaaacaaaaaagagtacaaaagaatcaancagataaaaatgaaaaaaataaagaaaattaagacaacctcattataacaaaaccaaaaataacaaaaaaataaagaactttaaaatagaaaaaaaaatttaaaaaaagataaaaatcagtaaaaaaaaaataaaaaaagaaagaaaataaagaaaaaaaaaaactaaataatgaatagaaacaaaaaaaataaaataataaaaatataactacaaaaataaataaaaaaaaaaccaaaaaaaaataaaaaaattaaagaaaaaataagaaaaaaatataaaatataaaataaaaaataataaa

SEQ ID NO: 13163 - DNA, 536 bp, Emericella nidulans
aaagcacactttagggaaacgctccgtacgacgcatgttgccaacccgaaacggatcggatccagaattttacatttattactgagggtggcggtaggggcacataatacataatgggggcaagagtgcgtcgatcatatacagagcaagcaaggagcagcaggctcatcaaacattctattggacgaatgactgacaataaatacagtggagagtacgcatgctaatggattggcaacagaatccaacactgaggagtgctgcattcacaatactcataagacatctctagtcccactagtctgcatcagggctcgattacaggacagctttcatgcacttcgactgcagatgaactgatcgcaacatgtctgccgcgtggatgacaaaaacagtcatgacacatcatcgtcgtgaggtgcaccgccagaccgtgtaacgtcggaaagagggacgtagatgcttatcggccttgggccgaaagcgaataaccattgatctggtggaatagatgtaagccgctattcaaggacatt

SEQ ID NO: 13164 - DNA, 804 bp, Emericella nidulans
acgcgcgtgtgatacaacatcctgctacatcggagctaggatggttgtgtgggtggaacttattctcctgggctgtctgcattcaactctgcgggggttgttgagctgaggtgcggaatctcacctgaacaggaaagtaccggcatgagactagcagagacgaaaacaagggaactagttccccatcattcatcctcaagatggaatggctgtagtgactgatactgtaactagacggcggctgcatatgcatctagagaggtattatgcagcctgtcctaagaaaggaacactaggctgcgggttttgtagtccagtccgaaggaacgtggtcggcttgtatgtatggccacaccagggaagccgagagggtagaagccgtagttagtcagggaacgagtgttgagtcataaggaagggaagacctttgtcacaccaggagacggacgctgaccgaaatcaacaggggcggatcgtggagaggccacctaaagcacctacccgatggggaggcgtttgaaaagacacgctgaaccgctcttgcagggagcctcagccattagcagcgcattgtttactgagctttaataggcagtgattcggaagggtcgcctaggatcggcttcgggtaacttggataagcgctagggactgcgtttataggtttaataaatgttatgaaccggcctatgcgttcggtaattcaaggggcttaaaatgacaggggccgcctggttaaatgcgattctcttctctgtcaaaagggtatgagacctacattttcttgtttgggccctcctgggg

SEQ ID NO: 13165 - DNA, 623 bp, Emericella nidulans
ctcactatggggaaagctcggtggcgcgcgtgctagacacgcgttgcgtatcggatccagaatttgtgatgaccctatatatttatcttatgggtgtgcatatgacttcatttggcgaacaaaaaaactagattgcaaagactgtgtaggttttcgtgcgaatctatcttcgtacttcagaaatgaaatgaatcgaacccgttatgacaaagacatcattggctgctatcattaggaacttttgtatcaattgcctctctccgatttttaaaagctaatgatgcttctctctgaggatctgatgcaagcatgactatcagatattgcccgatctaaggcacatgttgacaatagaatttcgtctcctatgtgaaataatcggactattatgtgatgtaaggacgcattatcaagatcaggcacgagggctagtcgatacgggaatctgagatgcgctaatagtgacatagcattcgtgcacgaggtttactcggtttgagagccctctaggtttttgtcagtgctacagaggccggctcagagattctaatgggatggcaaagtatggcggcttttgagcaggcgcgtaaacaatgagttgtactccttaggattcatactgc

SEQ ID NO: 13166 - DNA, 1446 bp, Emericella nidulans
  unsure (1)..(1446): unsure at all n locations
aaaaaagtaaaaacaaataaaaaaaaaatataaaaaatataaattaaaaaaaaaaaaaaaaattaaataaaaaaaaaaaaataaagaggaggagaccttgagaatgcngaagagtatttaaaaaaacaggggaggtagtatataaaaaaaaaaaaattataaataatataataaaatattttatttataaaagaaaaagagaaaaataataataaatgggggggggatttataaggaaaaaaaaagaggggttgataaaaaaanaaataaagaggaaatagaaaaaaaataaaaaaataataaagataagaaaaaataagaaataaataaattaaaaaataaaaaattataggaaaaaaaaaaaataaaaaattataaataaaaaaaaaaaaaaagaaatataaaaaaataaataaagaggaaaaaaataaaagagaaaaatataagaaaataaaataatataataaaaagaaaaaaaatgaatataaataagaaattgaaaaaataataagaatagaaataatatataagaaaaaaaggtaaaaaatatagaataaaaaaaataatagaaaataagaaaaataaaattataaaataaaattatagataaataagaaaaagaatgaatgatataaaaataataaataaagaagagaaaaaaaagaaaaaataaaaaaaagatataaataaacaaataagatataaagattaaaaaaacaaaaaaaaaaaagataagataatataaattaataaataaataaaataaatgagaaattatatagaaaaaaataagagataaaaaaaagataaataaatggagaaaataagaataatagaataataaaaaatgaagaaaaataaaatagatatgatatataaaataagtaaatagaaataaataaagagagaaaaaaagaaatatgaagaaaaatagagaaaaaaaaaaaaattaaagaaaataaaaaaaaataaaaaaaaaaataagtaaaaaaaagaaaagatatagaataaatataaatgaaaaaagaataaaaataagaagaaagaattaaatatgataaaaaaaaaaaaaaaaaagaaatgaaataaaaaataaatatatataaaaataataataatataaaaaagaaataaatgaaaaaaaaaagtaaaaaaataaagaaaaaagaatataaaataaaaatagtaaaaaaatataaataaaaaataacaaaaaaattaaataaaagaaagtaaatagtaaaataaaaaataaatatatagaagaataatatatacagtgagaataaatagataaaataataaataataaagattaatataaaaaaataaataaatagatatagattagaaataagaaaaaaataagaaaaggaaaagtataaatatgaaattataaaactatgaaaaagatagaataaaattaaataaatagaataataaaaa

SEQ ID NO: 13167 - DNA, 1284 bp, Emericella nidulans
aaaaataagtaggatgcaatgatttaccggtctttattcttgcttaaaaaaccttggtaggctctttgcttggttcctggcctttcttgccagagttcttccacttgtcctgctttgctctgatataacgccaggttcgggatatccccgcggtgaacaagccttttaccgtctccacagagcttggccatcggattgtctttgtaattgcagcctggatttctttggtgagaccttcatcgctagcaatgcgctgttcaaactgtccaccttgcctgcggcggacaatctctggatcattgtcattactttccttcatcatcttgttgaattcaccacgaggaatgccgaagcgcgcctggtactggaagtatagcctctctcggaaggactccggtaggcggcggaccatatttccgcgctttacgggatccatatcttgtgagagccgcacattggcctcaggatcatctatccagtcgagatcggagcaacgcttgtcgttgaagacaacgtcgggtcaggctctcgatgagcggtgcatacagccgtcggaagttagccatctgcgaagaaacgatattgttgacttttcgcgggtcctggacaggcaaagccatgcggagagcgcccatgtaactcattgaagctatggcgttgtataggctggacctctttaaattctttccgccagcagcacgcatagccaccctttgctgccaaccagcccattcattctgctttcgaaagcccgtactctttgtatggttcctctacgaatttcaacccgctttttgaatcccgagtccgttagatatcacagtgtcccaaccgacctgcaattcattacaaacacgttctcggatcttatcaaccccctaggtctatgcaatgtgccctcttattggtaatattcgggctgcaaatacgtcatctggacttaatctttccttccaccttgtgaaaacgtatcttcgctctagatcgtcctcgtgcctacatgcagtttcactcttgttatattccgctttgcccttatggttcctctattccccacattgatcccttaatttccttcatcatccctacacatccatccaactcttactcatcaatactcacctgatccttcttatctctttccccatacctttatcatacaaaccttctttactgtatgttcaaacctcctctcatcctattctctttctttatccttctccactccttcttacacttcttcctcctctctctttctcaactctaccctcctccgtcttcacc

SEQ ID NO: 13168 - DNA, 544 bp, Emericella nidulans
catgtttgccgctgggcgcgttgatatccacaccatgctgcagaagcaaactgacgacatcttcatggcccctggatgacgagacataaaggcagttttcgagagcggatggctcgaggggggctgtatgctcaagaagtaccttcacgatcttcgcgtgtctggcgaatgacgcagcctttaagggctccctcacgtcaagccccaaatccgtttccagcaggcgcagaccaccctcggcagcccaaataaagacgcaaagtagagagacgaagtgtccgagaccttcggttgctgtcccgaggccttgtggagatggagatacaagtggcaccacaggctgaagttctctcgctcctcacaatcctcctccaggagcttcatcaccaaggcaaagacgtcgtcatcgtcctcgctgaagtgagcatgggcacccacccctggacggcatatcgcaggaacttgtattctcaaaacgctgcagcatttgatccccggttcctcataatttgtagagaagttactgtagcacaagtagataagg

SEQ ID NO: 13169 - DNA, 953 bp, Emericella nidulans
gtcagtttatggaaagctcggtaccacgcatgttgaatacgcgatacgtatcgtatccagattttgtgatatcctgataaaaattactggatgagaactgaaagttttctactgcaacataattgacgaacaggcttttgtacatctttgatttgtatgctgcaggttcgatgcttttccggatcttaaatcacgaatgcactaatgacaacgacaatgattggtgaatatattgggcagcggttgcagagttacaaccctagtctgggggtgcagcaacaacacgggtcgcagtgtcaacagaatgagcatcatactgagtcccagtctgtgacgaactggccatattcgttatccgacgtacctacaacttccacgggtgcagttgcgtcataaacaccaaatatcgaacgttgaggcacgagaggatccatgattcaagctgtgtccggataacgaggacgccggcgtccacggccggagttgactcgacttataacaaatttttgataggagacagtgcgcttccggtgccggtgtagatattatctgatcattaaaggcattggcggacattaactgaagggttcttttcctttacatggggcctgccgttgggatggcatttttcataaaacttatttagggttgggtaaaagcctaaatgggccattacattggggtcaagttttgcgctcaaaagggagatatttaatttttttccttttgcactttatttccggtggtaaatattataagaaaatttatccctttactattttagtaaacttgttattaaccttttaatgtatatttttttattaattaatataatttgttacaagccttgtatattatattatatattttatcactgtctccttaattatttatttattatctctcttcctgttcatatctatatttgttttatttttttatttattttttct

SEQ ID NO: 13170 - DNA, 537 bp, Emericella nidulans
attcatgatcgacaccatcacagacctgaaaaacaaccgcctcaaatcagccgcaaactccaccatagcctccgagcacatcaccaagatgcgcaagattctcggatccctcaacaactcgcgcgtcatccgtgccactgaacccatcagcatctctcggagcgacattcataattcctcaaagaagggcaaatggtggctcgtcggcgccagctggaaagaggacccccttgagtctgcccgccaggaactctcctcactctctgccgccaacacacatcaagccacgatagtagcggacgacagcgaagctgaaccagactacgcctctatcgcgaaggcgcaccgcatgaacaccgacgttcgccgctccatcttcgtggctattatgtctgcaacagacttccaggatgcacacgttcgtctgctcaaactccgcctcaagcgcgcacaggagttcgaaatcccccgtgtcctcacccaatgcgcaatgaaaaaggacgctcataacccgtactacacgctcatcgccccccg

SEQ ID NO: 13171 - DNA, 601 bp, Emericella nidulans
atcttatcctccatctgcagcgtcaaaccgatatcatcgagtccattgataaggcagtgcttgcggaaggcatcaacatcaaaggaggcaagcttgttcccggcctcatccttgatctcctggttaacgaggtcgacttcgacttcgcggccggcgcgggcctcgtcggcaatcttctcaaggacggcctggtcgggaatcacgacggggagcatgccgttcttgaaggtgttgttgaagaaaatgtctgcaaaggagggggcgatgacacacttgatgccgaaatcgaggagagcccatggggcgtgttcgcgggaggagccacagccgaaattgggtcctgtgacgacgaggatcttggagttgcggtagattccctggttcaggatgaaggaggggtcttcctgtccgtccttgtagcggagttcgtagaagagagcagagccaagaccggtgcgcttgatggtcttcagaaactgcttcgggatgatggcatctgtgtccgacgttgctgcggtccataggggccgcgatgcccttgagggttgtgaacttggggagacggcggaggtggtggcaggggtgtgcgtgtttgtatggg

SEQ ID NO: 13172 - DNA, 885 bp, Emericella nidulans
  unsure (1)..(885): unsure at all n locations
agaggttccatctcaaatacaccctcggtcgtacgccgtacaggaccttctccgctgaatcagagctgatctttgcaagttttgagcgcaaattatacctccgggccgctcatcttttcgaagaacacgcaaaaggtcgaaggctgcagctgtgcgtttgagttggcgatacttgacctatatattggccaatttgggctcacggacatggacatacatagctccatttccgcgcgtcgtacgacttctcgggacatccatccactttttaccatcccttatctgcccagctcattcaatcatgcttcgtcctatctccatccctcctctctaactaccactcctctccttcttcactctctcctacctctatcttctctcctaccgctccctccctatctcccctcttctaactttcaccccctcacattccacttctccattccctaattccacactctcccttctccttatattttcacttcgctccacctctaccatagccttttctattactcaaacatccatttatcccatcctctccctccttcactcctaccatatccattctccattcaccttaaaacaccccccacagactctctttatcgagtctcaaattcccactctcttcacacacatcgtttttcctcctctacattctccacaactcctcacacttctccactctctctactctccccaccctactactcttcccacactctaccttccttcctacctataacccctatcattccaatctccatctcggcctctaatatactatttcatctaattcacacacactccccccattcactatctctactctccattaccnccactttctctttcctccccccattcatatttcactctcct

SEQ ID NO: 13173 - DNA, 859 bp, Emericella nidulans
tcacagctactatagggagaagcttggtacgacgcatggtgctacgcgttgctatcggcaccagactttggggacaaagtaatagggcatatgcctaggtaaaaatatgatacttctaattttcgaagctgctttaaataatgtatgtatggcggatcatctgtctctggattcaccatatccttgacacattcatagcatattaaattatcataaacatatacaccttgtttcctttgtgcctcacaaacaatacaaacttcactctggaatttcatcgccttccctccctattttagagaacctagtttatactattagtgcctaacactttacagaaagatatacacccatgtttgatataatatgatgaactcttggccaacgcgtttgtatcacacccactgctttcgcgttcattgtcacaagccatgagcgcacagttcaaatgacttgcgttagtcgccgctgagctacgtgcgactgttacagggacaatgctcacactgccatgcatgctagagagcttaactaccgagtcggcatgggagcggtggcgaccgttctgcatcatgaccagacaagaagtgatatctttcaaacaagaaacctatgttcaataggttgaaggtgcttagatatatgaacggagtcccatataacttcttcgcccggctatgccagacaccggaggaggtaggtttgcctggaaccaatttaggcttaagttcccctccgctattcttgaaactccaaaccttggggaaagatcggggaatatcccttggtggaatctttaattgaaaaatagccccgtgtctttctcttaattagggaaaggggggggcggcgggggggg

SEQ ID NO: 13174 - DNA, 535 bp, Emericella nidulans
cgactgttgcggccggctgaagttgtcccccacccacggtaaccagcattatcatccgcagagcctcctattactgcgggtagggttggatcaccgtttgggttaaacccgtactcctcaacttcttttctgcgttcctcttccgccaccttctttgctttgtgtcttctccagagccacaggcctaccaggacaagaatagcgacagagacaacagggacaaccaccgcgtcagcaatagtgccacctgccgagagtccagagtcgctgccgcctgtctccgttgctgaagcagcagatgaggaatcgatggttgaagatgcgtctccactgcccgtagtcgtgggtccggtcggtgtgccagttatggtgatagtggttgtggttgttccagtggtgatctctgttgtggtggctgttggctcaacagtatcggatgaagttggctcggttgttgtgcttgtggtttcagtagtagtggtggttgggtcatcagtagtagtggtagtagtactactactagtagtactggtag

SEQ ID NO: 13175 - DNA, 1023 bp, Emericella nidulans
accgaccggggcatagaacactcttatgtgcatcttatcagctcatcactgataaacaggatagcgacgattctgggtggggtcctgtcggcgtcgaccgcggagttaaaatgtaccctttccaatggatattatgtcttcggtgctcgattgcttcaattgaaagatatacaaacatacggtagtgctacaacttcttaagcgtttcacgcggccagatacggtgcactgctaatgcaggagcgtctgttgaggttggtaaaggattaacacctagtctttcttgacctctgtttagaagaatccaatgggcagactgaaaaatgtactggactacagtgaaatagggtatcacgctgactggctcaacttgagtgagccctatactaagcggatggtgatgaagagaagacccaacgcccgcgcaggtactacttcttccaccttgattgcgaataaggacggacccgcccacaccgtatctcctttgtgcaagagcagagaagacttttttttcccacccccgctctgtgccaaaggtttcaacaaccggttggtttgttgcccccgggaaaacacattgggggggccctgataccccttggggccaaaatagtttgctacaaaacgccgggggaaaaaaaaaacaaaacgggttaaaaaaaccccttttttctctcccaaatttttttattttttaaaaaaaagggggctttttcttgggggggagggcgctttttttgggggtccaaaaaaagccctcctccccccttttctggaaaaaacccacggcttggggcccctcttcacccctcccccaaaaattttcttctcgggggaaataaataaacaaaatagggtcccccccctcccttttttaaaaataatttgggccccccccccccccccggggggtttttttttttttaagaaaaagacaattttttttgttttaaaaaaaaaattggggggcgttttttacaaaaaaaaaatttgcccccctttttttaaaacccgccgggg

SEQ ID NO: 13176 - DNA, 1096 bp, Emericella nidulans
  unsure (1)..(1096): unsure at all n locations
ggggaaaaaaaaaaagaaaaaaaaacaaaaagnaccaagaaatagcacccgaagcaaaaaaaaagttgagaaaaaaaaacaaaacgggggaaaaacaaaacaaaaaaaaaaaaaaaaaagcaacacaaaaaaaaagaaaaaaaaaaccaaaaaaaaaaaagaaaaaaaaaaaaaacacaaaaaaacaacaaaaaaaaagaaacaacaaaaaaaacaaaaaacaaaaaaaaacaaaaaaaaaaaaaaaacaaaaaaagaaaaaaaaatgaaaaaaaaaagaacaaagaaaaaaaaaaaaaaaagaaaaaaacacaacaaaaagaaaagaacaaaataaagaaacgaaaacaaacaaaaaaacaacaacaacgatacaaaaaaacgaaaacagaaaaaactaaaaaacaaaaataacaacaccaaatgaatagtgtagaacacaccaaaaaaagacaaaaaaacaacaacacaaaaaaacagaagcacagcaaagaaaaaaaaagatcaaaagaaaacaacaacaaaacaacaacaaaacaaaaaaaccaacaaaggaaaacaaagacaccaacaaaagagaaaaacaaagacaaaagaaaaaacataagaaaaaaaaaaacaacaaaaagagaaaaaaccagaaacaaaagaaaataagaacaaagaacaaaaaagacaacaaaaaaaaggaaaacgaaaacggacaaaaaagacagcaaacacaacaaaaacacaacaaaaccacaacataatgacagaacaaacaaaaacaaaaaccccaacataaaaacacaagagacaactactaaaaaaaaaaaaaaacaataaatgacaaaactaacccaaaaacgagaagcacaaagaaaaagaaacaggaacacataaaacaaaaacatcaaagaacaatgaaaacaacaaaaaagatcaacacaagaagagacaaacaccacacaaaaatagcataaaacacagaaaacaaaagaacaaaaaaacaaaaagatcaaaacaacagaacgcaaaaaaacaaaaacacaacaggtacaacaaaaacacccaatacacaccaccggacagcaacgagaaatacaataagaca

SEQ ID NO: 13177 - DNA, 800 bp, Emericella nidulans
  unsure (1)..(800): unsure at all n locations
aaagaaagnnaccgcgaggcccccaaaaaaagaaaanaacaaantgaaaggggaagagaagaatggaaaagacaaacggaggaaggggcaaaaaaaaagaaaaggaagggaaaaaaaacaagaggagaaaaaatgaggggaagaaagaaaaacgatacaaaacaaaaaaaaacaaatagagggaaaagaataaaggaaaaagaagaagaagagtggaaggaaaaaaaaaactggggaaaagaaaagaacaaaagggaaaaaagaaaccaaaaaacacgacgagaagaaaaaagaaaaaaacaagggaggaacaccaggaaaaacaaagaaaaaaaaaaggaacaaggaaaaaaaaaggcgagaaaaaaagaaccaaagagaaaaaatgaaaaaaaaaaaaaaacaaaaaaaggaagcaaaaaagggccaataaaaaaaccaaagaaaaaaaaaagaaaaagaaaattaaaaaaagaaagaaaaaaggcaaaagaagaaaaggaaaaacaaaaggaaaaaaaagaaaaaaaaaaaagggaaaaacaaaacaaaaaaagggacaacaaaaaagaaaaaacctagaaaaaaaaaggaaaaaaagacaagggaaaaaacaataacagaggattgaaccaaaacaaacaaaaaaaacagaaaaaaaaggaaacctcaaaagaagggaaaagaaatgggaagaaaaaaaaaaaaaaaaaaagacaagaaacggggaaaaaaaagaaaaaaaaaagaaaaaaaaaaaaaaaaagggaaagagaaataaaccaaaaggcaaaacaaaa

SEQ ID NO: 13178 - DNA, 494 bp, Emericella nidulans
acttatttgatagaaatttaaggggcctggatgtagctacacgaaatgcatcctatctacattttgtgcgaactggataacagaaaccgtggggtgcataaaacggtttgcgatgccagaaaggtcaattaggccacaattgcatctagcttcttatgattaacgatcacctatgactgagatctaaaagataaaggactgacctacccagtatccttccgggggtctagagtggaacccaaacagcttttaaacagcatagaatatttatatctctatcaccattctcgagaaattcacttatgagttggatacaagacatgtgcctatgataagcagcactaacattaattgataagctacatgatctgatattataaagggtttctccacttccactactgtcctaaggttaacacactctgattaacccacatctggattcacaggagcgagatctgctatactttgtcaccgtgctatacggaacatag

SEQ ID NO: 13179 - DNA, 1032 bp, Emericella nidulans
  unsure (1)..(1032): unsure at all n locations
aaagaagaaaaagaaaggnaaaaagaaaaaaaagaggaaaagaaaagaaaaaagaaaagagaaaaaaaaaagagaaggaaaaaaggaaaagaaaaaagaaaagggagaaaaaaaaaggaaaagaaaaaaaaaaaaaaaaaaaaaaaaaaaaggaaaaagaaaagaaaagaaggaagaagaaaggaacaagaaaaaaagaagaaaggaaaaaagaaaagagaaaaagaaacgaaaaaaaaaagaaggaaaggaaaagaaaaagaaagagaaaggaaaaagagaagaaaaagaaaaacaaggagagggagaaaaaaaaaaaagagggaaaaaaaaacgggggagagaaggagggaaaaaaaaaaaaaaaaaaaaaaaggagagggaggaaggaaaaaaaaaaaaagaaagaaagaaaagaagggaaaaagaaagaaaaaaaaaaaaaaaagcaaagaagaaggaaaaggaaaaagaaaaaaaaaaaaaaaagaggagaagaaaaaaaaaaaaagaggaaggacaaaagaaaaggaagaaaaaaggggagaaaagaggaagaagaaaaaaaagagaaaaaagaaagaaaaaagaaaaagaaagagaaaaaggaacaaaggaagagaaaagagaagaagaaagaggaaaaaaaaaagggagaaaagagaggacaaaaaaaggaagaaaagaggaaaagaggangaaaagaagaaaaagaaaaaaaaaaaaagagaaaaaaaaagagagaaagaaaaaagagaagaaaaagagaagaaaagaagaaagagaaaagaaagaaggaaaaanaagaagaaagaagaaagcgaaaaaaaagagaaggaaaaagaagaggaaggaaaggaaaaaagggaaggacaaagcaagaaaggagaaggaggaagaaaaagaaagagaaaaagaaagaaaaaggaagaaaaagaaggagaaaaaaaagaaggacaaagaaaaagaaaaaaaaaagaaagagggagaaagagaaagaagagaaagagaagaaaggaaagaaagaaagaa

SEQ ID NO: 13180 - DNA, 479 bp, Emericella nidulans
ttctttttcttttatttttatattattcttaatttttatttcctttttttttcatcttattattattttcaattttctttttttcttctttttttttatacttttttttcttttatttattattatttttttttttttttttttttttttctttttattttcttttttttatattatttttttttttttttttatttttttttttttttattattttatttttattctctttattttttttttttattctttgtttttatttatcttttaatgtctctctctctaatttctttttcttttttttttttatttattttttttttttatttttctttttttattttttttttttttttttacttttttttctctatatctttatctatttaatattttctttatttttcttttttcttattttttcttttttttttttttttattttttctatttttatttcctctttttctgtttatctt

SEQ ID NO: 13181 - DNA, 879 bp, Emericella nidulans
aagaagccggagatacccccagaagagaaaaaggaaacaaagaaacaacgcaagaaagaaaaaaaaacaagaaatgaaacaaaaagggaaaaaaaagaaaaagaacaacaaaagaaaaaaacaagacaaaaaaaaagaggcaaaaaacaaaagaaacaacagaaacaacgaacacgaaaaaaagggaaaaaaaaaaaagcgaaaacaataagcagacaaaaaaaaaaaaagggagacaaagaaaaaaacaaacaaatacacaaagaagatggcaaaaaaacaaaaacaagaaaaaaaaaaacaacacaaagcaagaaaagaagaaaacaaaaatatctgataaaaaaaaaaacaaacaagaaagaacaaaaaaaggaaataaaaaataaaaaaaacaaatgaagagataaaattacacaaaaaagaaaagacaaaaaaaaaagacaccaacaaacgggaaaaacaaagaacaaaacatcaaaactacaagtaaacaaaaacatacaaaaaaaagaaaaacaaaaacacaaaagacacccaaaacacaggaaaaacacaaaaatcaggcaaaaaaaaacacaaacaaaaaacaaaaaacaaaacaaaagaaaacagaacagagataaaccaaaaaaaaagaataaaacacaaaaacaagaaaaaaaacagaataaaaacaagacgaaaaaaaagaaaacaaaaaaaaaaaacaaaggacgacatgaaagaaaaggaaacaaaaaaaaatccaaaaaaaacaaaagacaaaagaaaaaaacaattatacacaaagaacaaaaaaagacaatacccagagaataaagaacgaaaagacaattaagcacaaaaaagtatatcaaataccgacctaagaataaa

SEQ ID NO: 13182 - DNA, 772 bp, Emericella nidulans
  unsure (1)..(772): unsure at all n locations
tagcagaccgtgctgtttgaattagattccatttagatttccaaacaggctgcaagtatgtttcagagccattgcgggcatgacgactcctgaattcgtgatcgaccatatggacggatcgaaggggcgggtgcggagaagattgtcaattgagagcaagacagtttcaggtccaagcagcgtttggatttaattgatagcgtgggctagcaacgtagctgtggttctacagtccctttgctcgataatctgatacaaggcacagaccataaggcagttatctacgagtagcgaccagcattagacagggatctcagcccgaaggctgtccccaggatttgaactaacgtcaagctgctgcaggtccgggtaggctccatcaatcaaggccagacaccttacggccttgaatgcgagtccgtttcccgaccctccaacttgcttgacgaactccacctggtgaaaccggatcacggtggtcaatggctcgatctcggtgcctgggaagagcaagaatgtcatcacctcggccgatggcgcagtagccactaagcttcttgggaaatgcagcacaggcgcctgagtgggcctgtggctgcaaaccaatcgtcgcctagtaatgccagtgaacgccgttctaattgcgtccatgttttgaattgctgngggtggtctggctctgctctgaggcctcacaaggtcctgtcatggatttctatctaactagacttgtggcaccgcagcgctgccatcggcggaacagagaccccag

SEQ ID NO: 13183 - DNA, 115 bp, Emericella nidulans
ccccccccccccccccccccccccccccccccccccccccccccccccccccccccccccccccccctcccccgcccccccccccctctccccacccccctcccgctccccctcc

SEQ ID NO: 13184 - DNA, 859 bp, Emericella nidulans
  unsure (1)..(859): unsure at all n locations
cccacccctccccccgncccctttttcccttaacaaacaccccccccccccggccaccgggaaaccccaaaaacggttagccccaaacacccaccagcccgttttgcccccccccagcgacccaccccggtttttaaccgccccccacccctaacccacaccaacccccacccccccgcccccccctgacacacccccccccccccttcaccccccccccaaccaccccccccccaaaccaaactccccccaaaaagccacccccaagccccaaagaccccccacctaacccccccccccaaatagggnnngnccccccccccccctggaacctncnccccatccagccaaaaacccccggnccggctacncccccccgaccccccgcccccgcaacccccccccccccccccaaccaaccccccgccccgnnntcccccccccccccctaccccaaacccccccgcccccaccacccccccccccccccccacccccccacaccccccccgcctctcccacccaccccccccccccccccatcaaccacccccctcccccaccccccaaccgacccgcccccccccccccccccacaaccacgatccccccccccccaacacantccaaccccccccccccccacacaacaaccgaccccccccccttcccccaaacccccccccccccaaccagcgaacccccccaccnccnccacccccccaaccctccccccctctccccccccacaaccccttcacccccccccccccccccatacaccncccccacccacccccccccccacccacccccccccccacccccaccctccccacgaccccaccccccccccccc

SEQ ID NO: 13185 - DNA, 536 bp, Emericella nidulans
ccagtcttttctggtgatccactttactcactctgcccgagtcggtttgagcgaccaaaggctccacacgcggctgggggtaattggacggcgctggctaggcctgcctaagtgccgaactcgggcgggagcgctcagtcactctaagcgtgattgggctaagagctagaggagaactgggctgacaagggctgaccgtttagaccaatctcggtaggatgaggctacaactgactgtgcggggccggtgcccatatgccacttcgtaactatgacgggccacataagagttgcgcgcacagtatccctgctggtaacagaactgcaggtccattagtgtatgctgtaccctctcgcgggaatcgtacaccatggctttgacggaaactggactcatttgggtgagtcctatcagatggtatgtgaagaccctgcgatcaggtctgtgccccattgaatatgggcccctggagcatactcgaaaggcttagggtctggatccccgggaccccaacaaatccttgaagctagtctct

SEQ ID NO: 13186 - DNA, 382 bp, Emericella nidulans
gctcagtattactgaaagcatcggtgggacgcatgctagatacacgttatgtatccgatccagattttgtgatcatggcctttcttatgggcaggggtggcttcaacttttgtggaaggaagaaaaggcataacagccacagtgaggggcatgggcagggttgacacgtgctcagtcctcttgctagtattaccgaaaggatgaatgacacgagtaactttcttcgtgtccacattggctcccataggaaatatgaacgacactgaatactaaatactgattaaccatgcactcgaatatcagctcgtagaaagattccagcatttgcgttctccaggtaatactggcacgtatgaatccgacctcatgatcggacttcata

SEQ ID NO: 13187 - DNA, 1063 bp, Emericella nidulans
actcagatcatgtcagtgagggaactttgcaaaggtgaggccctacccattttcgtccctcttcaagcataaccacttacgccaccctttgccgcagtggtgcaaagctatgatcaattcctttcctacattgtagagcaggacctccaagacgtctgtgatctgaaacatatagtaaaaggggacgaagtcatggaggcattcgaaaccagaacgaaggggccctgggtctccaacgctttgaagctcgtaattgagtggcaattactgcaccctggcgttgaagacaaggaaggggctctgaagtatctttcaatctaagagagaagagataggtctttgagccatttcaaaagaaatagagtaatggtggtttgtagtctcagactttcaaggttagttgtaccagttggttacaaatattatgatttctatctatcataattttggtgctttcctatttacagccttgcgaactaagctatggtatcctgtaactttttggacttttactaggaccttgggatgttaaaaatacttagttggttaaaataatttatcctatacacgggaaaggatctttgtaatggttgataaatgaggttttataaaaggcatttctttcatcctagttctgatttaaacgtagggatttattattaatctattgtaattcgtataaggaagaaacactacctcacggtatctaaactcaataagttctctcttgatatattagagtctcgtggtgttaacataatgaattctttaaacctataatgctttgtgaaattaatatcatactttaatatataattagatatgtctttctacaattattcgcttaagttcattttcacgcatttagcagttataaaattattaggagtgcgatcgtcacatcattggaataattatagtggtaccatcttactgtttcatgatttcttaataagattaacaacatcgcctcttttttatatatggtccctcgtcgtatttcacatcctctcttcttttgtataggcacttctcatctataatatagcgtcgttcgtggggg

SEQ ID NO: 13188 - DNA, 1188 bp, Emericella nidulans
accatttcctaccttcttttggattagcatccattccaaaatttaccctttttttggaagtgtcctcccaccattaagttcgcctttcacgtcacgaaaaattccggccccaatttgtttttttggttgcttgcttaaccgcttttctccgccttgtcgggacttttccattcagtgcacccgcttcctatttgccttatgaacctgccggtcccacgcccagtttggtttattgtctcctcgctaaggaacaggcctctcaaacttttctctttgcataacccaagctttttaataaaatcttcttatctggttctcaatttggtccacgaacccatattgcttttgttgcgactttgccgctcacacgcggactttagaccgattattcagttcttgcgtggctcacgttcgacagcccggcttattgaaatctcgaatccactcgcgacaggagtcgcttttatttgactcatccacctctgaatcgcatcgtgtccgcgcgttgcctccattgaacgctcacgtcttggcccttctttaaatcgccgcattatagccccgacattctccctttggtcggtaaagccctatccttgccacgaatcttcccaggatctttgtcttcccgatcttgatacataacgcattttctttattggtctttaggcaatctccagctaacaagataaatgtacgcagactcgcgccacccacccttattctccgtcaactaaacgtcttcgcttgccgcctcagtcagcttagttcgtcattccgaagcgagagggacacggaccaacaatttataacatacctcagcttccctcgccctcttcaacacgtgagcgctgtttgagtttttaaatcgtgatattcgttttttattattggtttttggaccgtaagggctccctgtggataaaagaattgccgacttcaagttgctcaggccggatgcaccatgactgaagcaagaatgttcatcaaaactgagcctgacgagcacaacagtgaccaaaaccactttatgatgtcccaatccggatattctatgcataaccaattcgggaacccgaatgatgggatcgacccatcggacctgaccaacggaggatttatcggacgctttggatttggcctcccacagaatatgtcatccagcttcaattttggaaactccggcat

SEQ ID NO: 13189 - DNA, 1075 bp, Emericella nidulans
  unsure (1)..(1075): unsure at all n locations
aaaaaaanaaaaanaaataaaaatatagaaaagaagtaaaaanaaagagaaggaaaaaaggaaggatgttatatagaaaannggaaggagggtaaaaacacaaaaaaaaaagaggaaaaaaaaaagaaagaaaaagaaaaagaagaggaaaaaaaaaaacaaaaaagagaaaaaagaagaaacaaaagaaaaaagagaagaaagaaagaaggagagaagaggaaaaaaagaaaagaaaaaagaaagggggaaaacgaaaagggagaaaaaaaaagaaaaaaaaaaaaagaaagaaacggataagaaaaggatggagagaagagaaaaaagaaaaaactatgggaaaggaaaaaaggggagagaaaaaagataaaggtgggaggggaaaaaaaaataaagagaaaaaaaaaaaaaataagaaaggagggacaaaaaaaaaaaaaaaaaaaagaagggggaaaagaataggcaagaaaaaagaaaaaaacaaataagggtaaacaaagaaaagaaaaaaaaggagaaaaagaagaaaagaaaaaaaaagagaaagaaataaaaaaagaaatgaaatggaaggaaaaaaaaggagaaagtaaaaagagaaaggaaagaaacaaaagagaaagaggggacaaaaaagagaagaagagataaaaagaaaaaacaaagaaaaggaaaagaagaaaagaagaataaaaaaaaataggaaagacgaaaaaaaaaaaaggaaagaaagaagaaaataaaataaagaaaaagaggaagaggaagaaaaaaaaaaaggatgaaaaaaaataagaaggagaaaatgaagagaaagaaaaagaaaagaatgtaaataaaaaaaaaaaagagggacaagaagagaaataaaataaaaaataaaaaaaaaaaaaagaagaaggaaaataaaaagtacaaaaaaaaagaaagaaaacaaaagaggaaaaaaaataaaaagaaaaaaagagaaaaaaacaggaaaaaaacaacaaaaaaagcgaaagaaagaaaaggaaataaaaaaacaaggagaaagagaagaaatagaaggaaaagagatgaaaaaaag

SEQ ID NO: 13190 - DNA, 984 bp, Emericella nidulans
  unsure (1)..(984): unsure at all n locations
gacccagggacaaagggacagggacccttcccttacacccacgccattttaacaccgcgccagaaaaaaacacaattgtgcaattaaaggggagaccggcagaaacccccggaagaacagaccgaggcagacggacgaaacaggacaaaacgggagagcacaaagagcaccgaaaaggacacagaaaacaaagcacaacccgggaaaacaaagccggaagccaaaaaacacacaagaccgaaaccaagacccaagccgaaacaaaaaaggcgaaaggcccgaaccacgcaaggaaacgccgacgccaaactgcccaaaccaacaaaagccaacaacaagaaaagaagccgaaaaaaagaaaccgaaaaaagaagccgcaccacaaagcagaagacagcaaacccgcggggcaaccacaaagccccgaaaaaacaaaaaaaccacacagggacagaaagagcacccaaaccaaaacaaggagacagatcccgggggcacaaaaaccgcgagcaaaaaaaaaggaccaagacagaaaacgagaaaaaagaaagaagaacccccgaggaacggaaaaacccccggccccaaaacaccggcaaaaagccgaaaccaaccaaaaaacgcaaaaaaacgaccagggccacacaggacacgagaactcgaaaaagaaaaccacaacaaaacaaaacaaggcaaaccaaagaaggacaacccccagggcccggaaaaaaaaaaacagcaccaccaaaccaaaaaaaccaacagaaaaaccccgaggaaagcaacacaacacaagaaagaatccccaaaaagaaaaacgaaaaaaacccaacaaaaaaaaaagaccccgaaaaaacaacaacagcaaccaaaagagccagaaaaaaagaagaaagaaaaaaaaaaaaaaagtataaaaataaaagaagaaaaaaaannngggggggggggggggggggagannaaaaaaccnccacccccccc

SEQ ID NO: 13191 - DNA, 891 bp, Emericella nidulans
  unsure (1)..(891): unsure at all n locations
aaaaaaaagaaaaaaagagcacacaaaaagaaaaaaaaaaaaggaaagaaacgaaaagaaataaaaaaataagaanannnaaggaaagaacaagaanaaatnttnagaganaaacccgggaganaanntaaaaaaaaagaaaanaaaaaagaaaagaaagaaattgtaaagagaaaaagaaaaaaaaacaacgggggggagaagaaaaagagaaggggagaaaaaagaaaacacgagggaaaaaacaaacagaaagcgagaaagagaaagaatacagagaagaaaagaaggagaaaagaaaacaaaaaaagaacaaaagaaaaaggaggaaagaggagaagagaaggaaagagaagaaaaaaagaggaaaaagggaaaaaaaaaagaaaaaaaaagggaaaaaagaaaaagaaaaccaaaaggaaaaaaagaaagagaaaaaaagaaaaaaaaaaaaagaaaaaaaaaaaaaaacaaaaaagaaaagaagaagaaaaaaaaaaggagaagagagaaagaaagaaaaaaaaaaaaaagagaaaaaaaaaaaaaaaaagaacaaaaaagaaaagaaaacgaaaaaaaagagaaaaagaaagaaaaagaagacaaaaaaagaagaaaaacaaagaaaacggaaaagaaggataagaagaaaagaagaaaacagaaacaaacgaaaaaaaggaaaaaaaaaaaagacaaagaaaaaaaaaaaaagaaagaagaacgaaaaaagaaagaacacaaagaagaaaaagaaaaaacaaaaaagaaagaagagtgaaaaaaagaagaacaaaaagaagaaaaagaaaaaaaagaaaaaaaaagaaagaaagacaagagaaaaaaacaaaggaaagaagaagaagacaaaaaagaaaaaaa

SEQ ID NO: 13192 - DNA, 99 bp, Emericella nidulans
cagcacacggagaacaaataccacggcattatcccacgctatacaacaccgccgcctcttcaatagcgacaaccagcgcgacccatgcaaccacaagaa

SEQ ID NO: 13193 - DNA, 875 bp, Emericella nidulans
aaaaaataaaaaaaaaaaaaaagaaagaaagaaagaaaaaagaaaaaaaaaagaaagaaagaaagaaaaaagaaaaaaaaaagaaaaggaaaggaaaggaaggaaaggaaggaaaggaaaggagaggaacagccgaagccgacataccagaaatatctccaacctctgcacgaccagacggttgtctttgctctcaactagtctaaactcagccgctgtgtgcgataaaacatgttgcccgtcctttccagtaaattcataactgttgatgaccacgacatccaacggcgaaaacggcgagacataaacgcgaacaggttggtgtttcagcccagggaactgagtccaaaattcttctcgttgggctcttattgctggttcacattagactatagcttctcgaaaaactcgctgttcgagtacgacgggcccaaataccttgtcgtccgcccagggtctgaacaggcgtgacaaactcagcgtcgtctgcaaacatgtcactccattcttgtgctgcttccggggattcaccgtccaagagagtgtagaactgctgtatgaactgcattgtcgccacttgggcgccactaccatctcccatttgacctagattgacactcgacatttccagtacgggttataggggagatagatggtggagaatatccaaaggcttcgactgggcgagcctgggcgggacaacgcacttctatgattccctggccctttggttacaagtccccaacccttgggacgctgaatgccccctcttgcacaccagggtggttgctttttggggcccccggagattgctccctagcaacatcaggcacctttgggaggccagaaccaaagcttggtcccgtcttgccaac

SEQ ID NO: 13194 - DNA, 570 bp, Emericella nidulans
acgacaccggcgccgtgatcctgaagatcgcatatgggtatgatatcgagccgcatggcaaagatcccctcgtggccctcgcgaatgaatcattggcgaactttgctgttgcaggaacaccgggggcttggattgttgatacgattccattcagtcagtgcaaacctgtccggatgaacgttttgcctgaattgtagctaacgaaggaacgtttagtgaaatacctcccatcctggttccccggcactggcttcaagcgcaccgctgcatcctggaaacagaccctgcttacgacgattgagaagccgtaccggcttgtgctgaagcagctggaatcgggcaagtaccctgactcatacctgtcgaatctactggaagagacaaaaggccgccccctcagcgcagacgaagagcaggttatcaagtggacagccgggtcgctgtataccggtggtgcagatactgtacgttctccagtctgaatcacgagccgtccttaggagcatttttgctaacaggcagcgccaacagaccgtctcgacactctcctgcttcttccttgccatggcc

SEQ ID NO: 13195 - DNA, 162 bp, Emericella nidulans
tttagtattgtctgctagtgtgctttaaagttttttactgtttatttccggttttgcatttctcttttttgtctcagtcgctatactttatcacagatatttccgtggagcggtcatccactgactcagcacttcggtccaccaccagtagtgagctccaga

SEQ ID NO: 13196 - DNA, 808 bp, Emericella nidulans
aatcgcggggggtctgcatgttgcttggctatcggagcatggtctggtgaaggtcgagtagtgatgttgttgttgaccatcatggtccactcctgaaatgctgatctgtagataccgcgccaggaaacctacgaggtctttaagccctacatattgaaacacaccaacatctgcctacaagatctgctaactcatgcaaaagagggactgattcaggagcatattacccgagttaggactggacggatcggtttcatcatgccgggcgtatgcttcagagaccacatggtggggatgttgctagctgaataaaatttctattcagctgcaatcaaatttgcgcaggtcaactaacggaaattgctcaatcgagccatcttgtggtcatttcagctcttccaaactgacttagcacgttttggcttgatccattttccgtatcattttttgtctacattttccggctaccaatggatgaacactatccaccctgatatttgaccttattgatttttaaaagtgcttgtataaactttaactcactttttgtattcccctcatgaatacttttctgactccctttttcacgaggccaagtatctttctcaccacttttccatataatatctcctctatctctaatatttatttcttttatacactcttttctcctcctctaaaattctctttcttcttaattatacatctcatccttttggtctccttgcatgccaaatctaatgctcttacttctcctcccatctccgtttacccccattatctccttcttgttacaatttctattttc

SEQ ID NO: 13197 - DNA, 1019 bp, Emericella nidulans
  unsure (1)..(1019): unsure at all n locations
gtcaataacagccaaagcaagaggtccaagaagaatgttgaaatagggaaagtcttgctcttcttctttttctncatcctttctcctccctccgcctctcttttctctctccctcctctcctcctccttcttccctcttcccctcccctccttctttttcccttcctttcctctcttcctctttctccctccttctcctcctctcccttctcttccttcctctcctctcctccttcttccttctccccccttccctttcctcctcctctccctcttcttcctccctcttccttccttccttttccccctctctcttctctctttttctccactcctctctcctctcttttcccccccctcttctcctttcctccctctctctcactctcctctcccccctcctatccttcccctctttcttcccctctcctccctttctttctcttttccctccccttctccctctcttcccctcctctttctccctctttcccctctccttcccccctcccccctcctttttctcctccttcttttctcaccctccttccttctccctctcttccccctcctccttccttttccccctcccttccctcctccttcccttcttctcacccttccatcccccctctttctttttctcctctctctctcttccctctccccccccctcctttcttcctctcctctctttcattccctccttccttcctttctttccttctcctcttctcctctctccctctttcctccttctctcctcttccctctctccctctttcttccctcttcttccctctcaccttccacttcctcccccttctcctcttcttctctttccctctctttcctctcttcttttcctttccctccctcctctctccctctccctccctctctcctccctctccttctctttctctctctctctcctcccttcctccttcctccctctctcccttctcctccctctccctatctctccctatctcatcctcctccccccctcctcctct

SEQ ID NO: 13198 - DNA, 938 bp, Emericella nidulans
tggcgaattaaccctcactaaagggatcaaagtcctggataccgggtcccacggacggccagtagatgcgctttccaacacggccaccgagcagccggatggctacggagacaagctcgtagtgtttgccgatgagtcgggtgagcggaccaaggcttccaccagggaggaccttgaagagcgcagcctgtctgattttctggcgggtcgacatcttcgagacagggcccgtctgggcacggccacaggtcagatcgaggatcgccttgatgatcaggatggcaatgaaccagatgatcgggcccacaacggcatagtagattctcgccaggatatgccagccaatccgactcggtgttgtgaaccagaagatgatgactcgaagcatatcgtatccatgaagcgggtagtgtaggacaattgggataagtccagcaagccagggtaatctgtacgcgaagcccgcgatcaggcccagcggctcgacaaggagcaaagacaagagccaatgcgggcctgggatgttcgccgagttgagatccttgtttgactcgtctgcgctgtcgatctcccagctggaggagttgggaccgaggtatgtgttcggggggaggttggagccgggcgcgacaacggtgcgaagaccgatctgtgaaccagagccaatggtgatgggctgcaggagcatggaggtgtttcgttccaccgcgaacggacgaacgatgcagttttccagcacgacgttatcctcaaggcgaataaggtcgtattcaccgagcgaggcggactggtggatagtaacgttgcggacgatacggcagccaatatgcccgtagtagaggatgcgggagaaatcgaagtagttgtagactccctaaacctggattagtgccctgactgatgttgtagagccgaaagggcataccttttcactgatc

SEQ ID NO: 13199 - DNA, 886 bp, Emericella nidulans
agggcatagcgctgttcgagagatgttaaattgttacggtgctcatcgcgcgcgaccaggcggggcgagtgtgcaaagagagataatacgatgtctcttgcttcgcgccgaacggcctccagggtctcgtttgccgcttcgctccccctcgccccctcccttcccatcctatcctcccctccttctcctcccccctccctcccctccttttcccccccccctccctctcttccctccttcttctccctcttcccccctccctccccctcccttctcttctcttcctatccccccttccccccctccccatcccctcctctcttctccccctctcccctcctctctcttccccctcccctatcttcccccctgctctcccccctctccttcctcctcccccccccccttctctcttttccccccctcctctcctccccctccccccctctcccttccttcttcccccctcccctctttctctctctctctcttctcccctcccctccctctccttccctcccctccccactcctctcctccccctccttcctccccccatcttctctccttcctccttgctccctctctctctcccctcttctcccccccttatcccctccccccctccccccccccttcccctccccttccactttcctctcctctcttctcctcgtctcttcccctcctcccccctctccctactctccccttccccctccctccctatcttattccctccttcactcccctcccctctcttctcctcctcacttccacttctcttcctctcctctcctttctcttcctctcccctcttcctcctctcctccccctcccccctcccccctctctctctacccttcctatctcctttcctccctcc

SEQ ID NO: 13200 - DNA, 409 bp, Emericella nidulans
cggaatttcgtccagcgtcgatgcttgatcactaatccaggaggccgctattctgtgtggtgttttggtccagattggccagttctctggaagcgcgggggatggatctatgcagcaggagagaggtacacatacctcgttttattgtgggcaagcgcagatccttaacaccatactacagactggcgctctatcattatggatatctatgccgctcagagagtggcagggatatcagccgagacggtactcagcaggagtgcttttgtgggtgtgatgtttaacgtaaaggtttattggcctgggcgagccatattgccgcttatgaatctacagtgattttaaagatgaggggaccaccgttcaaaggtctcacgaggttcagcattaccgaagcctaaggggccac

SEQ ID NO: 13201 - DNA, 828 bp, Emericella nidulans
cttcctttcataaaattctcaatccccggacgtgctgacatctcttccattttggaaagggctctggttatcgcggcagataaagtagttattttgtatagggacatgaaacagcaggtatgggacgactgcagcaaagtgagatcagcaacgcttgaaggaaaagataacaaaaccaaatatcaactcagcgtcgatgcaccgctctatgagactgaaagtgtatatttataggctgtgtcattaagatgctgtgtcctttatgtcgggggagagggtgagctatattgcctggacccaactgatagcgtggttgtatttatgatagaccctttgtataattacacatattaatgcctcttcggcatctatatctactcgggcgacaatatactgtttgtgttggagcgctaatttgacaaagttccaaggctgtcgaagctgtacctgtagcgctcagtcccttaattagtgcattttcaacaatgattatccggcagcttataagccaatagaggttattttgaaaacaatcagatggacgctcactgtcagcttgcatagaccactgttgaaatgagagggtctggtgacgtgcggttattctgactaaactcaatgtatgaacaaatctgcaagatggagatggggctttgtgtcagacgtgatccaaggatttccgttagcctcgtgtactgtgtacagtttgagtagagtgatctcggaatacgattgaatacaatataggtgtaaccttcttactgttttctataaatggcgtcgaatagtgtccgtgctataagcgtgccctagacaatatatatgaca

SEQ ID NO: 13202 - DNA, 139 bp, Emericella nidulans
gacgagagaggtatatgctacgggtctcatattggaagttggtgaagcaaagcgtgaaaacgtcgcaaaagatgtggtgaaacgacttgatcgacctatatggtctccggtatcgtgaccctggtgcggagaagcttcc

SEQ ID NO: 13203 - DNA, 503 bp, Emericella nidulans
ctcgaagatgaggatgaagatggtgatgaggacgaggacgaggatatttctgaaggaagcgaagatgagcggcctagtaaatcaaaggctcacagcttgaaaggccgcgaggatgccgatgtgggtatggactcggatgacagcgaagaagatgaggatggggagggtttcgacgacgggttctccgacgaagacgaggatatttcgggcgaggatgacagcgaagacgatgaagatgctaaagaagaagaagaagaagaagaagaagaagaagaagaagaagaagatgacgagtctgaagatgaagaagaaaagaccgcgaagcccaaacgccgcgtccagtttgcgaacgccaaggtcgcagacacatcagacgaccgcgcccaacttcgtcaactattggcgacagaccaaaaaactatcgcagcaaccatctctcaagctgcaaagagccgacgcaacaaaaggtcgtgccgttaaacaccaacgtgcaacattcgatg

SEQ ID NO: 13204 - DNA, 1327 bp, Emericella nidulans
  unsure (1)..(1327): unsure at all n locations
aaaaaaaaaaaaaaaagaaaacaaaaaaacaacaacaaaaaaaagaaaaaaaaaaaaaaaaaaaaaagaaaaaactatttaaaatgaaagatcaattgaaacaccanacnatataaaaaaaaaaccaggaggaaaaagaaaaagaataagaacaacaaaataaaaaacgaccaaatatatttaaaaacgagaaaggaacagaaaaataataaacaaaggggggatattcataaaaaagcataataaaaagggaattacaaaaaaaaaaatcaagaacacaaataaaaaaaaaaaaaaaaagaaaaaaaaagaaaaaaaaaaaaagaaacacaaacaaaaaaaaaaaaagttatggaaaaaaaaaaagaaataaaaaaacaagacataaaaaaaaacaaaaaaaaacaaaaagacgaaaaaaaaataaaaaaaaaacaagagaacacaaaaaaaaaacacaatccaaaatagaaaaaagaagagaaaataagataaaaagagaatgaaaagaacacaaagagaaggacaatagacaaagaatataagagataaagatccatgaatacacaatacaactaataagaagaaaaagaacaagaaaaaacggaaaatacacaaacaaaaaataagaaaacagaaataaaataaaaaaaaaaaaaaaaaaaaaatgaaaaaatagagtaaaaaaacagaaataaaataacaaaaaaaaaagaaaaataaaacaaagaaaagaaaaaaagtaaacaaaaacaagataaaaaaaaaaaaaacaaagaaaacaataaaaaaaacaagggaaaaataagcacaagattcaaaaaagaacaaaaaaaaaaaggaaacaaataacaaaaaaaaaacaatggggaaaaagaaagaaaagaaaaaaaaaaaataatacacaaaaagaaaaaaaaaaagataaaaaaaaaatacaaaaaaacaaaaaacatagaaagaaaaaattgaacaaaaaaaaacaaggaacaataaaaaagatagacaaaaaaaacaaataaaatagaaataaagaaagatgaaaaaaaagaaataacaataaaaaaaatatgagaaactaaatacaaacagaaacgaaaaagtaaggaaacgaacaaatggggagaaaagtaaaataaatataacatccacacacaatataaaataaaaagaaagaaaaataattaaaagaacaagataaaaaaaaaaaacaaacaagaataaaaaaaaaaatcaaaaacaacaaaaaaaataaatcaagaaaactaaaaataaaaaatagaaaaaaaaggaagaaaagaataacataaaaaagaaaagacaaaaa

SEQ ID NO: 13205 - DNA, 581 bp, Emericella nidulans
cctccagcgtcttcaaatccgctagttccttcgctaggtccagatcttctcgagtctccagaatggaagtcttcgtacacaatcttcccggaaattttaccaaggattcgttgaaacatcagcttgagccgttcatgcggtctctggccatcactgactacgactgcgaaaaaccgaggaagaagcgttttggccatatcctattcctgaatcaatccgatggcaagagatttctggctcatcatggagaagaacggcgagccgggaggcggcgtcccttatccaagctgaacttactcggatctcaggtactctgcaaaccgagccaccgcaaaccggacgaattcgaccttcgagccctggaaaacgaggtgcaggagcgaaccaacccttcccgcataatcgaagaggaagggggctcagtttcgtttatattgtcaacggctagctgtgggtacactgtgtttgtggacaatgagttctcctacgtgccagaggtggaactccaacagtatgactctatcatcttcaggaagcgaaatattactgttcacttgggtaacactcctcgtatcaagatt

SEQ ID NO: 13206 - DNA, 549 bp, Emericella nidulans
gacacctaacactcagtgccacagaaaggatgaggttattcggtagtaggaagaggagagaaacgatgacccgaagcaaatggccaagtacctggcgacgggacagccgccgggccatcaggtagatttgtcgcctcgaggtagcatttaaccgccgtaacccaaaagcgaccatgatgctttgatagtggaagtttgtctcatgcttgagggaagaactttcgcatttcaggtgctatagcctgctaggtgtgcctgtgggctagctgtctcggtggagggtagaaccctccaaaacccaaccacgtcagcatgtattttataagtcatgaaatcggtgcccattcttaagtggcggtaagcgattgcattgcgatccagtgggttatactccaaatttgtacacttcacccatcatacgttgtaagaatgtgcattccgaattgtccgaattgatctggagagtggtcagaagtcccctaacggagaatatgagatggcactcggtcgattcggtcgcccaacgatattgaagctgtagctgtggga

SEQ ID NO: 13207 - DNA, 764 bp, Emericella nidulans
ttacaccgaacatattctttctttgagaactgtgcgacgacgtttggtgagttcaaaaataagaaaaatgaaatgttgtatttctgacgccgtgttagctgcgtgatacttcatcggtggtgtgcgcgttacctttagtactggtatcgcagctggagggaatttggcttactggttcgtttcgcctctaccctgcctggaaccgtcttaaccggactaggacgagctatctggtgaccatggtgttcactttcataactgccgcccttatcgcagaagtctgttcggcttcgccttcggccggctcaatctacctctgggccgctgaggcgggtggtcctaaatacggcagactgtttgggttcattgtcgcttggtggtcaaccaccgcgtggaccaccttttgcgccagcaacacccagtcggcaacaaactacatgctctccgtaggtgtgccccatgcagcttttcgcatgtatactgacccactgcaggaattgaccgtattcaaagtcgattttcccaaggatgtttcggacgtcaagttccgagctgtgcagtggattgtgacggagatttttctcgcacttgcccgtttacttaactttatccgcgtacgttaactttttttccccgcagcaggtacatttaagtctacaggcaatactttcgtaccgtttttggtcttgcagcagttgcatctagacttttctcacggatctggttccatgcgtggcaaacatgggattagactgcgaaaggct

SEQ ID NO: 13208 - DNA, 1235 bp, Emericella nidulans
  unsure (1)..(1235): unsure at all n locations
ggaaagagaaaaaaggaagaaaagaaaagagaagagaagtggaaaaaagaagaaaagaaaaaaaaaaaaaataaagaaggggggggtatctgtgagcagcagagtgaaagagaaaaagggggaaaagaaaaaagaaagagaaagaagagaaatggtattgaagagagaaaaagaagagaagggggggaaagaagagaaaaagggggggaaaaaaaagaaaaggagggaagaaagggaagaaagaaaaagagaaaaaaaaagggaaaaaggataaggaaaagaaaagagagaaaagaagaagaaaggaaaagaagagaaaagaaaagaaaaaggaaagaggagaaaggaaaaaaaagaggagaaaaaaaaaaaaaaagaaaaaagaagggaaaatgaaaaaaaggaaaaagaaaaaaggggagaaaaaagagagtaaagaaagagagaggaaaaaaaaagggaagggaagaaaaaggaggaaaagaaaaagagaaaaaaaagggaaaaaaggagagagatgaagaagaaaaagagaagaggagggagaggaaaaaaagaagaaaaggaaaaaggaggagaaaaaaaaaaaaggaaaaaagaaaaagaaaggaaaaagagaaggaagaaaaaagaagaaatatgagaaggaaaaaagaaggaagtatatggagaagagaaggagaagaaaaagataaggagagggaagaagaaaaaggaaaagaagagaaagaaaaaaagaagaagaagaaaaaaaaaaagaaaatgagaaagagaaaatagaagaagaaaaaagagaaaagaaaaaaaaaagagaggaaaaagaagaataaaaaggaataaagaataggaaagagagaaaaggaaangaggagaaaagagaaagaggaataagagaaaagaaagaaaaagggaatgaaaaaaaaaaaagaggaagaagaaagatggaaatgaggaaaaaaaataataggaagagaaagaagaaataggaagaaaggagaaagggaaaaaaataagagagaaaggaaggaagagataagaaaaaaaaggagaaaagagaaaagaaaggaaagaaggaaagagaaaaaaaaggtaagaaagaaaaagaagagaatatatagaaaatataagaaagaaagaagatggagtttaaagaaagaaaaaaaataaagaggataaattgaagagaaaataagagaaaggaaatagaaagaaataaaagaaaatgaagaaaaaaa

SEQ ID NO: 13209 - DNA, 892 bp, Emericella nidulans
  unsure (1)..(892): unsure at all n locations
cccacatgnttgggagagacctcgcctaggctcgagaagcttgtcaacgaattcagatatacggtttgtttatctaactcatgatgaaaaacaaaaattaaaagtggcaaaaaagaaaatggatgtaggacgaattcttactacattattggctaatcgtgcagaatacagggtttacgacaggaggacatccaggagaggatgtattactacattcttatggaccttaaaaacccagcaaggttgattccaaatacacacattgcaaaaacagtggcgaaagcaaatgtctgtaactttgaagaagtaccgaataacatcttttagaggagtgacctatcctttaaagaaaaatcggggcacctgttaaaagtccctcaaaacccactggagcaaactccgtacccccttggcaacaaacaaattaaattctaaagtgcacattttttcggagaccaaaaatagaattcttgataaaatggtatggggggtatgaattttaagaacttttttcttggtcatctggatttggtaaaagccttctcctctcccacagaaggcgcttctacatctctggattcggcttttttattcttgaacaatttttaccccattaacttttatctgctgtccacctttcgccatatatcctaaccactatcatatgcaatttttccccacatcccttatcaggttccctatttgacggaaaagcacaattcattctttccatcatcaaacattcatcccctctcgatctatcttttcctctcacacacttctctatgtcttccttttttctgatcacacgtcatttttcctcatcctcttcgtcacaatctcctctggataactctcctctccccgcttacccccatcccaatcccaacat

SEQ ID NO: 13210 - DNA, 802 bp, Emericella nidulans
ggcggtctatccatgcccccatgcttactgtcgcacaacgcgcgtgaaatgtctcttttaaggtacagaactcttgcgggcacttggtaatggataggaccctcacttggaaagaggaatctagcgacttcagtgccacttcgatgcgcatgaatggacgtctccaccagccctgctttgctagacctattgtcccggcctggcttatcataagcacgactgaaagaaagtcgagactttcatggtagatgcaggtcccaacctcacatcgtatacaccaacaagctctgctccactgtacacccactccctttgttatctctctcttcaccttaaacacatgttccatcattgtctcccatgacacccaaaccatatgatcactcacgtttatatccttccacacctatccaacttaaccgtcttaccccccattctcttccactatactaacttacccatcattctcacttattcatctcatcctctttcttgtataccttaaattctactttcctttctctcacaccttcatacttcatctacacctcctagactattatcacacctttcctctcctccttcataacccatcccacctccttatacctaatcattctccctcaaccacaatatcaatatcaaactccaccattcttctccttccgtatttacttacctcacttccccctactccctttgtattaacacccatcttctcctatctatcacttctttaccatatatctcctatctatctcctaatctcttcttatcttatcccaattcttatcttcactcc

SEQ ID NO: 13211 - DNA, 518 bp, Emericella nidulans
accaatccgactgagtttcgccaataaaccgtcaaactccgacgttaaccgagacaaactgttggctacgggctcgtcatcgcctgcttcactgctcagtacaagtatgccatgtaacagctgtccaaagcgctgcgtgaggaaatgcggtgcagatgactgattcagatcgtcaccacccgcaagagacagggcagataccgcactgcggcttgtattggcgcctatccgtttaagagactcgcaatgggcatccatgattacttgaaaccgaggccacagatgcatgttgattccgttgatgtacgagtctgcaacagggactctgcgccgctggagttcgaaggcagcttgttggtttagccgtacgcacatcagcacgcccagcgagtcagtagtgttctcaatcagttgtttggtcaatccctggccaagggtaaagactggagtaaatatttccagagccttgcgagagatttgctggaaagacaaggtcgaaaacatctcagtcatgaacg

SEQ ID NO: 13212 - DNA, 557 bp, Emericella nidulans
gtacaaggtctgttgatcgctgagactggaaacttcttggtcacggacatgattagcagttacagacttttgagccaaggctgaaagggacgggtcttgaggaggcacatatagctggggctgacaagaacgactctgtcccataacaggagttcatggagccgaactatttgcgagagagcctgagatagaggagcacactggatgactgagaagatgatactaatatgtctggtgaacactaacaccgatcacatattgcgagagagtgctatgacatgaaccaaaagtacaaaagccaggtatcagcagctgacggaacacatgaccaaatagagggacagctggcgaacttgatactggacagaaagcggctaagagaactgcataatagcccagtccacactagatatgatccacattcagactcaagagaggcacgtgcgagacgctgactaagcgttgttagatgccggatgagatatggtgcttaatatcgcttggtccttagccgctatagatgcttgatcactagatgatgatgtgatctgtgaacg

SEQ ID NO: 13213 - DNA, 369 bp, Emericella nidulans
agcggacggtggatcattgcgagcccgctcgatccccaccacgcgtttctttagcgttggcccgcttaggccatacttttggggatagttagggaaccgaccgcaagtactcccacaggcatgcagcgatcgctcgtacgcccaccagagcggccgccggtattaaatacacactgacctcgaggtggaaactcttcctgcgggcaactcacgggggccatccgatccaaatgcccagatgttgatttccccggggggattcaggcgattccagccctattaaggggagaatcaagcccttacctaggacccccccagaacgacgcacccgttatgggacgacccccaggaacaggctcggaggagttt

SEQ ID NO: 13214 - DNA, 339 bp, Emericella nidulans
ggctcgagaagcttgtcgacgaattcagatagattcagaaattttttcaactaacttcccggcctttgtaacggggtgacagtcaactttattgtcgaaacataaagtaccagttttctcaccgcaatcgagaggacggcaagtcctaacaggacgttacataatacattccgagcgagccgctggcatcatatacgaatgacaacttgcctcatctagacactagaccggaacgttgccagtcttctgtaccatcccctgatacaagaaaatgaatgctctactgaacgttgatttactttctggaatccgaaccaattggggaacttgtggtcccga

SEQ ID NO: 13215 - DNA, 391 bp, Emericella nidulans
gtgcagccgagtgtggaggattacgagccagcgctatcactaacaattctatcgtcagccagggcattctgagaggatacggtgggctgcagtacccaaccatcccggatacccaccacgaggtagctcagctatttttctacatatcagaccggacacccggaccggtagataacttcccaggaggagcgagcttctctcacgggcaacccaccactgacgtatcgacgaaacgcgtggctgatacgcctcccggacggcttcaactgaatcacgacttaccagggtgcaacaaacagccactgccagtaagttaagatgaacggcacatcctgtaccaagcggcaaccgcgagcatgctaggggagcttgctattgacgggcctctaga

SEQ ID NO: 13216 - DNA, 722 bp, Emericella nidulans
aggctcgagaagcttgtcgacgaattcagataagcagctaatttttttacagaagcaatcgaagaaaatccgagagatgcgcttgggtacattaattttgcaaatttattagacgtattaggtgatagcgagcgagcgattttattttataaacgtgcactagagttagatgataaatctgcagcagcctattatggtttaggaaatgtatattatggccaagagcaatttactgaagcgaaagctgtatttgaacaagcaatgcaagctggattacaatcagctgatgtaacatttatgttaggtatcacacatgtacagcttggaaatgatcggcttgcactaccattcttacaaagagcaacagaattagatgaaaacgatgtagaagctgtattccagtgcggactttgctttgcgcgattagaacacgttcaagaggcgaaaccttattttgaaaaggtattagaaatggatgaggagcatgcagatgcgttttacaatttaagtgttggtacgtttttgaggaaaatatgagaaggttttcctttatttagaaagcaactgaaattagtcagatcactttttaggggtaatggcgttcgttattagagcagaggtgataagataaaaatagttaatgggtgttatcctttttaaaaggcggggtgtctgttattaagagaaattcggaagagggaaatgggaataactgcaaggtt

SEQ ID NO: 13217 - DNA, 525 bp, Emericella nidulans
ggaccttgcttcgtcagcccaacgaagagtcgcacgagatatatttgggagggatgggtttgccgtaagtatactgatcaaacaattggttgttggcgtctgacttttcaacaggtctggtccgtgcgattttcgggagatggccgcgagattgtcgctggcactggtgaccactcggtgattgtttatgaccttgagacacgtcaatctgttcttcgcatacggaatcatgaggatgatgtgaatgcggtttgctttggggacaagtcttcacctcacattctctattctgggtccgacgatagcactgttcgtgtctgggataggagatctatggccgatggacgagaagctggggtatttgtagggcatactgaaggcttgacctacgtggacagcaagggtgacggtagatatgttctgtcgaacagcaaggatcagactatgaaactctgggacttgcgaaagatgatgtcacagccaaattcgacacacttgaacctaccagttacgggacgggatttg

SEQ ID NO: 13218 - DNA, 781 bp, Emericella nidulans
taccctaggctcgagaagcttgtcgacgaattcagatgatacaaatggttttttgtcggatgaggttttaagattagggggtataaatagttacttccatacaaataataaaaatgaaattgatttatcagttatacgttatgtaaaagatagtagtaaatatgatttgtctcaatactccaaaatagatgaatgtctatttgattttgatagaagaagagtttcagttgctatagaaaaaaatgcttacgaacgaattatgctttgtaaaggtgcagttagagaagttgtattaatttgtagttttataaaagaaaaataataaggataattctctattacagaatgaaaatccagcgtaggaaataaaacacctaatttgaactttgggcaagagcaagggatgctaaggtgttggcagttggcatattaaccaatttaaatagggtttaaaaggggaaagtaattctattaaatgaatgaaatagaaattgaaacctcgttggatattgtagggttttttaaattcaacccaaacaattgggtttttgttgaactttatactttaaaaagaaaggagtccaagggaaaatttttaccaagggataacgaggtcctggacaaggaaattatgttggaaaaatgggcttgtttatagaaaaaccagaactgggtttgaaaatgattgaccttccgtataggtgtttgaaaaactgcaggacaacagggtgtttcgaaaaaaaatttttcaaaaaattccttttaaaggcactaaaaaaag

SEQ ID NO: 13219 - DNA, 588 bp, Emericella nidulans
tacagaatcggcaaggagtcgaatattgccaaggctgtcgcagacaagtgataaacaccagtaaggataaagacgtcgactgcgagacggctatattattagaagaaagaaacgaaaaacacgctgcctgcaaccttccgcggcgctcagagatggcagcgaaaatactggaatctaaattaggcaaaatgtgaagttccacctgcgaggagctcccccttcagccagcagaccgaacacaatcgactgcatacgcggcaggtgagatgctcttagcgaagagtaggtggcatgagccagtaacggtgcattgggcattcagcgatctctgaccctcccgaaagtacatgtttgccgtaacaaaaggacccaccattaagttgcatgttgttcgggcgatcagtctcgtactagcgcatacagttttgatcagcatatgtattttttggacccgggccggattggtcgatgactggcacggagcggtacaacattgaggcgtgaccgtccgccgaatcccgacagcagccaagctgcgctattccgttttaagcccagacaaccccctttcctcctctttctcacaag

SEQ ID NO: 13220 - DNA, 273 bp, Emericella nidulans
cgcggagaattctgcgacgaactctcccactactgggtggacggttgcgagccagccctatgactgacacaacttttgttagctgaggccagttctgcccatacagtcgcatagagatctaatccaacaaggatgcgccagaacaggcatcgcgtcataaccgccgatcatcacagagccaagcgtgaacaagagacataatccatcgaggcatgtcctatcactacgggcagcttacacgtaccgtatggacgggctagctgacatgtacca

SEQ ID NO: 13221 - DNA, 462 bp, Emericella nidulans
tcacggccgcaattaaccctcactaaagggatcaccgtagtacaaaaatttccttgctgtcggaaccattttgcctatggcgtccaggtccttgttgaattgctgcaaaacatctggaggcaagaagcccttgataatcacagcgccatcttccttggcaacattccagatttcaccgggattttgagacactggaagtcgtctaatttggggcttggttgcgggagaaacagtcatggtgataggtcgacgtataggagaccagaaagaggaaagcgaagggtggacagctacgaggcctaaagtgatgagtagagtaaggcgggacgggaatagtatgagattccaaaccaaattatatattggacccacgaccgcgcgatctggctggactctgtctcgggagattctggctctagagagaaattggaggtgatggacagcacacagacgcacggtcga

SEQ ID NO: 13222 - DNA, 782 bp, Emericella nidulans
cccccactcgttggaggaacgctcgcctaggctcgagaagcttgtcgacgaattcagatttgcagttttttttgctttcgctatcaccgctgcaattggctgtgacttttcatctcccgaatccccatgaccttgcgaggatttctgcttgaccaatgctgccgcttttgcctaggatctcgctctatgttcttccgatacttcttctgtccattctcttttctgcttcgctaacgccacacattttgccttggctttcgcattttcttcttccgttacttcttctgtccattttattttctgcttcgcctaagcccgcccttttgccttggctttccgattatttcttatttccggtacttcttctattccttctcttttctgcttagcttaccgccccacttttgcttttggaagccgtgctagccttcccttgggctttcgctttttccttatttcgttacttcttcaattcctctctcttttctgcttcgttaccgtccacgcttttgcttttgcagatgatgaagacttccccttggctattcgtttttcttgttccccaattctttcggtaccttttatttcttgttcctaacgctgccgttttgcttttgaagcccttgacccaccccctggctttggtaatatattccctaattattggcgctcctattttggtcccaaaccccgctttttttttttaaccattttaccccctttgctttcatacaaaaaaccttttggcgcctttttttttactaatccaaatatttttcccc

SEQ ID NO: 13223 - DNA, 800 bp, Emericella nidulans
attcgcgtccgcaattaacccctcactaaagggatcttccccagcctctttttcccaatatcaaccttctgctgaagcctataaacatatcagattagcaagaagttcagctcacgacactacgatgaaggaaaacatacctcgtggcatcctcatccaccatccttaacatctcattctgcacctccaactcctcgttaatctggatacctagctccttctgccgtctcacaatcttcagcaactcctccacactcatatcctgctgctgcatcatttcctgctgcaactgcaggacaccctgattgtccagctcgcgggtccgctccgtctcctttccaagtaccctcccggtcctcgccggtttcctgctacttccccctcccgtcccattcgcggcccctataagcgcctctttatccttgatcgatgcaaccgcgttatcaacacgactctttgccgccatcgcattcagcaggttctctaacccatccctttccttccgagcgttgataaggaggtcctttctgcgccggatttcgccttcaccgagcgagtttgagctcgtataacgccccttggtaccaccattcgaattcccagcgtcggccattcttttcagtccatcctccaaggccgttatcagcgaccccgcacgccaccggcgccacaggtgcggttgctggcgcctatatcgccgacatcaccgatggggaagatcgggctcgccacttcgggctcatgagcgcttgtttcggcgtgggtatggtggaggcccccgtgcccggggactgtggggc

SEQ ID NO: 13224 - DNA, 594 bp, Emericella nidulans
cgatttaggtgacactatagactactaggatctacggcgtacatcgatacatcaatgattgggaatgtcatgccatagatgcggccggactaagccagttggtctctctcagctatcaataggtatcctcgaagaggacggagcatgtgtggcgcatggggcgtggcggtgcagtcaatagaccgagtccggcgtccactaatctgggcgatccatcagcgcttaaaacgtaatgcgatcttctatatggagtcgggaacactaatcaagggtaataaccatgaacaacactgccgatctgcggttgatcgcgcacagtctttcgaatgcgagttgtgtccacgaattgagccaatcgactgaaagttactgcaaatccaggctcgtaaaggagcgaagagctcccccaggctaagatcccgagggtgaggtccaaggttgaggttactcgttccgtcgaggtcatttagcgttcctttttggagacgccctcgattctctaccgacgtcactactatcactacctaccagcttggctccagctcattatcttactgcctgtatttcgcttaatattattccccatttatgagc

SEQ ID NO: 13225 - DNA, 766 bp, Emericella nidulans
ctcgcctaggctcgagaagcttgtcgacgaattcagattttattcttttttgtggagaaacaggtgaaccgcttactcttgtattgttaagagatggaaaatatattcgtacgaagctaactccacaaaaagacaacggtgaatcgtcttatcgaattggcttgtatatccgtgattcggcagctggaattggaacgatgacatttgttcatccagattctatgaaatatggggcacttggtcatgttatttctgataatgatacgaaaaagccgattcaagtcgaagatggacaaattatgcgctcgacagttacatcaattgaaagaggtagtcatgggaattcaggggagaaattagcaagattctcaccagaccgtgaagtgattggcaatattacaattaatagtccattatggtatttttggaaaattaaaatccaatatgaaaaacggtataatggataaagcaatgcctatcgcattttttaattaagtaataagaaggaccggccaaaattttaacagtttattggcaagatcaagtagaagcgtcggttttggagttggtagtacaagggcacaaaaatttccacctcaaagggtttggaataaaggaaccgttaccgtttttttggaaaacggcggttttgcccaaggtattgcggaaacccttttccaatggaaagaaatgtgcttttcccgctttgaataatccacctaggatggggtctttgaaggcgtcctcagcgggttaatttttgcaa

SEQ ID NO: 13226 - DNA, 586 bp, Emericella nidulans
ggcattttggttattatgtgaatacgagagccggcgcgcaacctggctcggacaagctgatgagcagaagagtgaacaatcagtagcgagagtattgagatctcgtctccatctatcatatttcctccgagcgcccatatactagcccaggtcttctgcccgagtagtcgctgctgcatcacatcataaccctaactcatgacgttcgcaacaccaacttctccaaccgtgagtcaggagaagtctatctcattcactcttaatacccgccttccacagcctaccccaactatctctacagcgtcagaacctgaaattcaaggtgcacttattgtctttgtgccgttttggcatctagccggccgccaagcaaacgattggtaagatgtatgttctgttattgtacgtgaaactgaccatgacttctctcattctttattacttttattgctcttttattgctcttttattactcttttattactctcttatttttatttttattttcttaccctttctttcttcacttttcccatctataatgacaatacccatttataatcaggatatatgtccttactggcaa

SEQ ID NO: 13227 - DNA, 537 bp, Emericella nidulans
tttaacacatccgatataggtgacactatataatactaggatctccgatcatccgcattgagggaacagcgtatcacgtgcacattcttggctatagaactctgtaggtatagcttgccgtgccaacggccgcgggttaaaaactagcaatctcacaacttgcttggatgttctctataggcgtcagttagatctaggtttactagtagggtcttcttgttgccaacgcaggttttcaatctacgctacttctataacgcaaaggaccaaaaatcacgcttaatatggtcttgtcaatcttcaaaggattgaaacaatgagaatgtcggaggtggctagactgagcgtcgactcggggtatctacctagaacattcgaggagcttcgtaatcgtctcttctggaaaacatgtctccgttcacgccgaacaatgatgccaatcccatgccttccacatacaacgccaagcaagcaataatgacaaccgaaacaatagagaaaacggggaaaagatcagtcaacccatgtccatataac

SEQ ID NO: 13228 - DNA, 590 bp, Emericella nidulans
ggatgtgtgatgctgactccttcagtctttgctggtctagggagagagtatgggtattcctagctttttgacttgctttagtctaagttcaccggcctggatcctttcagctttgagcgctcagcacatggcttcagggttaactcagaaacggcaatgttcggagtccggtggctgtccggaagactccagaggccgattaaacctggcttccgggacccagaagcttggaactggatcttctgccaatctaccaagagtgcgccactgagcatacaaaggaacctactttccgtccgcaatcagcgtcgaggaaaggagggtattgccattgcgagtcgtggtctcagctgcgacccatgtttagtgtggcgagagctggattgaaaggattcgacgagcattagatagacttgggaggcaagtaaaagcagcataattgaagactattgacagtaatcatggcaattcaatgcatcttagcaccgaaactgcctgtcggctcccctttctctcactttctgcggacacttgccgagtacctttagaaaagccgcttcgtgcccattcccattcttccagcccgcaac

SEQ ID NO: 13229 - DNA, 738 bp, Emericella nidulans
ctcgcctaggctcgagaagcttgtcgacgaattcagatatcgtttttctttgtgaaaccacatcttgttttacttgatgtaaacttaccgaaattcgatggtttctactggtgccgtcaaattcgtcatgaatctacttgtccaattattttcatttcagcgcgtgctggtgagatggaacaaattatggcaattgaaagcggtgcggatgattacattacaaaaccattccactacgacgttgtaatggcaaaaattaaaggacaattacgccgtatttacggtgattatgcaccaaatatttctgaacgtattcgtgaagtagaaggtttaaaactattcccagaacgtcctgaaattcacttcggatctgaacaagttcttttaacgaaaaaagaagctattttagctgaaatgttattatctaaaatcccttgtaccgcaaggcctgaagatttattagcttgcccttgggaagaccaaagctttcttgaagaaatccattaaccgtaacattcccgtttcgaaaaaggttaaggcttggattgagactttttgaacaggacgggcttggtatcgttttaccaacttgggtggatagctgaacttttttcccggcaatttgcttttctacggtcgcttaaaatggggtatttctcctttgatgcgcaaggggtcaacacaaattttttccggtaagaattattattttttttcccttaccgcgctccactgaag

SEQ ID NO: 13230 - DNA, 755 bp, Emericella nidulans
tcgcctaggctcgagaagcttgtcgacgaattcagatgaaagatttcgtcgagtatctgaaaaaaaacaacttatgtttagataaaatctttattattcatggggatccagactactactttggattagagagcattaaagccgtttacccagaagctatagcgtatgcaacagagtctactgttgaacatatcgttcattctgtcttagggaaattaaaagtttggaaagacgcccttggagaaaatgcaccaagtaacgtggtattacctcaagtattcaaagaaaaagcgattgattctcaggggttaacatttgaactagtaggcttagatcattacagaactagcctatttaataaagaactaaaagtattaattggcggtattcgatgtatttaacgaaataccatgtgttcttagcggatactagcctaaaagcggctatggaggcatggattgagaacttgaaagtttttccagcattacatgctgacataattgggcctagccctggatcaattctaaaaatcctaataatcaggcctactgggacaatggatttttaagacggcggttaagcttttgggtatgtggaacttaaaggatttggggcaaacttgagcctatattagcttatgcaaaaaggggaataaaacaagtgcaaagtgcccaaagaaagcctggggtatgatcttacctttcaacactttcaccgacttttgttcctgccacggtatgcgtcttcaacctctc

SEQ ID NO: 13231 - DNA, 810 bp, Emericella nidulans
aatggggcattgcgctaaaccctttcgatgaagtatgcatgatcgtggcggtttttgtgggcaagaagcgctatatgatggccagcccttatcgggccattgaactcacccaggtatctagatggtttcttagcataacgaaagtaacggatctttggatgctgaagacgcaataaaatacgggtatgattcgtcttctaccattcagaatactccatctctgtgagatcctatggcggtttatatatattcatggacatactaaagctcttgcggatttggagcgcttcctctggtgacagatctctctttaaattcttgatccgctcagataccgcgaacaaaatgctgcatctttcgtcaccccgtgctcaattaggaattaaatatgctcttgagcttctaagctacgatcgataccattttagagattacagtaataacaaattaaccttggggatgcatgcttagcacttgcatcttggacattcagtctcaagcgtaagctagctctttgctatcaagcattccataagcaatgaacatataatggaacctttattcctcaatcaactgtctagcaatcatctctcgcactgatctggggtttttgttctaagaaaattcctgtgccgcgacaaccttggtttgcagtatcccacctccgtggatatctcttgtccccctttttcctctatcgtctttattttaccgatctttttctctttcagttttcactctcatttacaccatgccgttctcttccttccccattcccccttctctttttattcaatcttttttactctc

SEQ ID NO: 13232 - DNA, 787 bp, Emericella nidulans
cccacttgtttggagtaccgctcgcctaggctcgagaagcttgtcgacgaattcagatgaggatttttttttacctgagattagtacggcaaaatggcttgctattattatgtctacattacttgccggaggtggcgttttttgggcagcagcagagccaatgtatcatttgatgacggtgccaccaatacatgatggtatatctgctggaacgaaagaagcagttatgcctgctttagcacaaagttatatgcattggggatttttagcatggacgattttaggtacaattagtgcggtagttatgatgtatggacattattataaagatatgccgctaaaacctcgaacgcttttatatcctatttttggggaaaaattaagaaagagcctgcttggaacgataattgatgcagctgcaattattgcagtagctgcaggtacaattggcccaattggatttttaggtttacaagcaagttatggattacaagaattatttggaatttctaatgtgtttactactcaattagcaattattgtttgtggggtgggcgcgtctaccatatgggagtaccaggtttggtaaagggatttaaattataggaatttaaatgtcagattggcaattgtttaatggcattatattactatttgggccaggcggattattatggatcctttgtcttggtcggattaagtaatagttttcacgtgggactaccggggatcagttggtaggacttgacctttttcttgggaggttatgtaacgcacttgtcggatt

SEQ ID NO: 13233 - DNA, 866 bp, Emericella nidulans
taacggtatttgatccagcattttgttcaggtggagggaagctaagtagagcactgaacctgctcttgttatttgtgatgcggccagcgactcttggttcgggtgctcggggcaacccccaacgcttccatggtcgactaactacctccaagagctgagctgtcagccagagccaccgctgcttgtttttatgcactgttattttccttgcacgagcccagtcctctttttgacatccattggttctcgagatttatcaaaacactaaacactcattaactatatgctggcattactgaatccttaccgagctccacgcgcctagcccgtcgtgggatcgtcggaagagtcctctttcccttcgtactcaacttcttttctggtatatgacatccgctctttcccactgtatccctgttgactcatttacccttcacgtcctgacttgtatattctcttttaccctttccttgcccttgtttttcttgtgcgccatttgctgcatatcttcacatctcttcttccctactctactccgttttattccttacttcttcgttatctcaccttattctataatttttcctctccactcctcatttatttcctttttcattttatactattcttttatcattttcctctcatatactttttttctatcactcattttcttctctctattcttaccttccacttattcttctttctactacgtgtattactaatatccttttactaacttttctctcttactcttatatctatcttcatgcttgctctcacatatatatcttcttttcctcatctctctcttaattctccctactctctttcttttctttatcccaactcttcatatttca

SEQ ID NO: 13234 - DNA, 648 bp, Emericella nidulans
tgggtgcgagctggcccgtgggttgatggagggactgcagggtgcggacgatggattggtgggcataccggtcaggcaggatggtcagctcctacgagtgcctgtcatcgggacgaaagtggtttcgtatgagctgcaatgggcagattaggtggtcgttgatctgacagcgagcgataacctctactaaacctccaagggcaaagctggcaaaattgcctcctcttttatcctttgttcagctagcgggactagaactttctctgatatagccttatactctgccgtttctcaggaaattcagacgactctacagttatcagacgcttatattcgttcatactaatgtaccagctgaatgggaggcgcgcaacccctgcaccaggcccttccatccttgcacattgccctggtctcatgcttgccagttctgcgtagctgattggcctcggcctctgaccagtactcccgtctcaagtatgcatagcctcagatgctgctggatatactcgagtttcctggaccgggatgctcccgctctgtgcagtccaaatgtgccggcagatgcggtgagctggaagggaattattgccgcctgctttatgttcggcttctggtctcgttggcaacaagatttgtctgcgtgat

SEQ ID NO: 13235 - DNA, 570 bp, Emericella nidulans
gcgtcaaggcagcgtgacacccaggctataggagggaccgccccacttgtacggtcatctgtgtacccttttggtctcttctgatgctactagagtaggcatgtagggtttctctaacagatcgtgtgatactatttacgcaccctgcggcttccaggatctctcattgcacatatatctttgttgctgcctatttaataaggtgcaattttgagccagatcgccacgcacgccctcgttggacatacggctattcggaagcgattatatacttcccaatcattataactctctatcgaagaaaaacaaagatcatcaccgaggcaaagttcgccacgtcgacagcccctgaggacaatatcacttatgatagagcgttgagaggcttggagctactgcttctggactcgaggatttcaactaaggagctgcagaagacattcaaggagacatgcgtaccggttagggacggatacatgtttcggcgagtcatgaactaaacaataagtctctttcaagaatcggactatgggaaagttgtcagcacctgcagaatgaacgacctaagct

SEQ ID NO: 13236 - DNA, 614 bp, Emericella nidulans
ggcggcccccactgttggagagcgctcgcctaggctcgagaagcttgtcgacgaattcagatagcgtcagtaatttgaaaaattattgtagatggaacaagtggttttgcagtaacaatgttgttgccgatatgaggatgaatcatctcatatgaaaaaagtgaataatctcatgtgaaaagaatgaacttctgcactgagcaggttcattctttttgtttatactaaaagcagagaaaccgaaataggggtgaaatgatgaatacattagaaattaaaaatttaacgaaaaaatttggtgatttcatcgcagttgataatatgtctttatctattaaagaaggagaaatatttggctttttaggatcgaatggtgctggtaagagtacaacgattaatatgaatgctggtttgttaagaagtaatgaaggcgaaattagcatactaggaaaaaatattaaggaacataaccgttttgcgaagatgaatatcggtatcgttccggaagatattgcgaattatgaagaggtaactggctatgaaaagggaaaatttttgctgggttggccggattaagggaatttagttaaaaacaaaagtggagaagccttgaa

SEQ ID NO: 13237 - DNA, 730 bp, Emericella nidulans
ctcgcctaggctcgagaagcttgtcgacgaattcagatgttgtcgtttttgatctggaaatcgcaaggatcgagctgggttgggaccgtaacttgttgggtgactactatgtcttatttcatattttactggctcggggattcctataaagctttgacaattttcggtttaatttggatgccatttatcattttcgcatcttatcgattaataaaaaaaacatatggaagtcctgtatttccacacgaaataggtaaattggcgactctaactatcattatcatgacctcttttatatttatttattagaacatgactgccttacaatcaactttttataagaatcagaaggaaacagatcacttcatcttttacagctctaaagcggattattcagaggttgtaaagcttgctgataatttagaacagcattacgggcgtatcattggcttacttaaaacagagccaacgacgaagacaaaagttaccgtttttttaaaataaatcaatctggggtattcgttggggctattttttaattttggtcattaggcgtatttagcgataaaaaacttttatcttttaccgaaaatcgggcttctatttaaattcagcattatgatttacccatgcgactgttcatttgacagaaacacctctcgctggagaagggtgcaatttttaggatacggtttaatgccaaagcctccaacctgttttgggtaaacct

SEQ ID NO: 13238 - DNA, 1327 bp, Emericella nidulans
  unsure (1)..(1327): unsure at all n locations
tcaacggcaaccttcatacaagaggaacaagccgatagggaaaagatccgaatttctcagtactgtcccttcatctttggccgcaactctcttttgccgtgcgccaacaggctgtttgtttgcatggagtcccgatccttagcagagctcatgtaccttcgactaaattcttcgatgcgaataatatctggagcaggacgccagacttgaaaacataatgagatgctctgtatttctccacaaggtacctgatgaacgtgattaggacaggcccagttccagttttctgggaggtcacttactccttatatagcgtagcacactggcgctttaggctcttcggcctatcaaggcggtgatgttcttctgatcgaccttctttctcgtgggctcttgaaatatatccagaaacaagacaacgctcgcggcgcttcttcagggtatccccactgcactgaggacttctgccattgccagcgaattgattaaacctcgacggtaagagagcagccatccgcatatggacgaaaaaagttggaggagaaaaggaacagtaatcggctgcctcattaacttgcaaacggaatggagacatcttctgatgcttgccagagctcttgtgaccagcagtacttgagcttagtgaatttggcacttcaaagacttccaacacccattcacaattataggcctcattcaatagcaatagggcaactcacattgattctaggaaaccaagtctgtatggaacatatatatcgaaatactaccgtccagcggtcggtcttgggtcatttataaatgcgtaagtcattgtcgtatccacgtctagcacaggattcgtctcaagacgtgtgcaagacctgtcggcttccggagcaaaaaccgtattcttgatccctggatgctgaaccgtcctggatcgagagtcttgatcgcattcgcattcaaattcgcactcgcacttgaattcgcctttgccggtcttccaggaaccatgaaccggatagaaccaattttcctgggtaggacccaaaggtaatttgtcaccatgatgccgcagctacaggataaaaaccgttaaataagcttggcaattgcccctttttcattgaaaaccatccaaaaggccggcggttaaaggtttgatctagaaccttaattccaccgtgaaaaaaaaggccgttaaaagaatttttttttccctaccagggttgtttctgtcctttttgctttttatttttcttcttatgatctctctttttcaattaaaannactttnntatattttatttttttttttttttttttttcccccccagcatgg

SEQ ID NO: 13239 - DNA, 870 bp, Emericella nidulans
tctacggcgcgtccaccacctaagtacttaactatagctcggaggcggaccttgcctgcgacgtcttcgacctgatcaataacgaagccttcgcggcgaatacctgcttcgacatctacgaggtcaatctcatgtgtcccctgcaatgggacgtacttgctttcccaacagagcttacgtaccagcccgacggggcgccgacggactacttcgaccggcccgatgtgaagcggtccatgcacgcacctgagtcagctctatggtctatctgttcaaacctcgccgctttcatgggctgtgatacctagccctaagtctgataggtctcttttttgctttctcctttttctttcttccattcttacgtgttcccaacctatctaccttctcgcttattcttttccacatcactttcttcttttttcttcacttctatccctcacctttcttattctttcctattctctctctttctcttctcattatttctcttcttctcttcctctctccctcccttttcctctacattctttttcatttctctcttattctttcccttcatcctttcttcttccttccttttactattttaattttttccattcttcctttattctttctcttttcattttctttctctttttttctcatctcacctttcctttcttttatctttcttatattctacccttcctcgtcctttattctctttttctttctccctttttctcttctattcccatatttcttttatattttttctttccttctcttatctattataaatcttactacactattctcacctcctctcttactcttaaccattttaattttcctaatatatttttctcttattctttcttatta

SEQ ID NO: 13240 - DNA, 221 bp, Emericella nidulans
ccgtttttcggtggcgatcttgccaggctgatcaaagctcctcgtatttgccagcgatgccatcatgctttcttggtttctatggtccttgattgaaatcctggccatgcatccaacatttcggttgctgagcctcgattgtgaagctctcaaggtcggccgtggcccgtacggttctccgtccttcctcatgatccctttagtgagggttaattcgccga

SEQ ID NO: 13241 - DNA, 912 bp, Emericella nidulans
  unsure (1)..(912): unsure at all n locations
ggcgaataaccctactaaagggatcgagagaggaactgacaagccatgcatatctgctgcaattctgaaggttaaggaaccaaactgacgggcatcgaggtgtcgagtatctgtctctcacttgtgtcgggcgggtttgagacgattcccgggacacttgcctctgcgatcggattaatttcacgccagatggctgcaggcctggcaggaccatgcgtatgaggatatcaagcggtggtacccagatctgcaggatacatggacggctgccgtgacggaggagagggtgacctatatcaatgcgatcatcaaggaggcagcgcggtactatactgtcagctcgatgagtttgccgcgcaagaagtgacagaaatcaactggaatggggcaattattccgcccaagacgatgatcttgattaatgcccaggctgggaatcgcggtgcggtttacccttgatatctccgcgcttctccatcgttactgccaccactactggctcatgtagacatcgaccacctcggtcccaccggcaacagatttaacccagagcgctgactgtcatcctagacctcttcagcatcaaagcccacgttgctgtcgtgactggcggcagcagcgggataggccccatggtcgccaaagtaatcccatctctgtatgacaccccaaattaaagctaaaggcgattggatttatgnggatcatgaccaacggcgcaagagttcacatagtcgccctccaacggacccgatcgacgaaactgtctcggacttaacctcctgggttcagcatcctcagggggctccgacagggttacgcctgtattctctgaccaaacctgctttgcggaactgcatcgacatcctcaagccaaggggggaagctcgcattctatatcgacgctggacc

SEQ ID NO: 13242 - DNA, 719 bp, Emericella nidulans
cctcgcctaggctcgagaagcttgtcgacgaattcagattaactcatttatttctttttgaactttttctttcgaagaatgttgctcacttttttgttttgttaaagctacaattttactatctaacttagagatttcagcttgaagattcgttaaaaccccttctaactcctctttacgcccttgcatttttactcgatcttgcaaaaacccttcaatctctaaatcataaatagacaaccgatcattaatacgatgttcttctaattctaaacgattaatctcttctcttaatttctgctcatctacacgatctgcttctacagtttgccttagttcgcgtattttcacttctatttcttgaatctcttgttttactgctttaacaaagttttctaacttcgttgattgttcttccatatcaggtaacttgcgagtacactcttccagttcacgttggcgtgctaataaagaagattacgcttgctttaccgccccaccagtcatagaaccgtcaggatacactacctcgccttcgattgctaaatgcgaaacggtattgcagttgttttgccacttaattgctccacgtaaatcttttgcacaataacaatccttataaattggaactacattttaatattattgctgactggacagtctgccgcacacttccaacgatggtgttgatttcaagcgtaatgttaaaagatacgact

SEQ ID NO: 13243 - DNA, 909 bp, Emericella nidulans
tccctctactataggacgacccactgcttaggctcacttaaagcttccctttagagacgggggagaaaaaatcttccttgagaggctcaagggggcgctaattcagcggaaatggctgctctataatgcacctcctgcgccacagcgaccatcgcagtcaacacccacgtcagcaccagatcaaactggcctgtcaactagtgtggatacccaggctcgctcacccgggggatggggattgccggtctggaacggcgagggcttgaagctcgcaaaaacaatgaactcgtaatcggaaatgcttttgaggaccttgaggcgctcatggcctctgcgaaacagatcgtagcgcttgctgagacactggcgcgagagtcgggcatggccagtgatgaatcttcagcagaaaccagcgcggtactctccgaaagtgctgccgctttaggaatgataaccacgaaagatatgctcggatccagcgcaggaaacctatatctctctgaactgtcacgaactctcgcagagtatctcaccgacgatcgaaagggtgtccttcagagagaaggtggtataatgagtctgattgacctttgggcagttttcaatcgctctcgaaacggcgttgagctggtaagtccctcggactttaaacgcgccgctgagctctgggagaggctcaaattgcccgttcgacttcgccggtttaaaagtggccttttggttgttcagcggtacgactggagcgatgaaaagacccttcgacaactccaggactggatggccgatctgcgtcgcattccacctccggaccctgtcccttgggactggcgcctttttggcccgtcaggtacagcgcaagaagcagcccaacgctttggatggagcgttggtgtgcagctgaggaactgg

SEQ ID NO: 13244 - DNA, 157 bp, Emericella nidulans
ctggggacaaccgatgttccccgctctgtgcgagtcgtactcgacgaccgtgacatccaaggtggcttttttacagtcgagcagctctgaactcgcaagcttcacatgagcaaaaagacggctcataccctgggagcactgagcccgacaccctctt

SEQ ID NO: 13245 - DNA, 826 bp, Emericella nidulans
cgataatacgactcactatagggatcgagatggatgccggaaacaacggtatcggcggaggcgttgggattcttgcctctgtcgtcttggctggtttcggtagttctcggatttgcgggtgtctgttgttctggagtcgtaagggcggagtcaaggtcacggatggcttcgatgcaagtttgtgcccaagtgttgccacgctgcgaaagatgcttgaggatggcgagaccacttctggcatatcttccctctactattagattctcggacgatctcgaaagggatacttggggtggtacctagatgccgaggaagcgggaaactcgccttcccatgcggcgtagattaggatcaggcagctcatccacacggcccaagtgaatgatggccatataagtggtgtggaagagccagaagattcagcgagaaactgtcgtagcgtggtgattagggagcgtgaggactcgatgcagatttgtagagcggtgcgatattccggagaagccgcttcggctgccagcagcggacggttcagtgaaatgatggcttcgtgacggagagcgatgaggagggtacggtggaacggcgcaatgggactcgatactatagtgtcggcatcgtcgaccccaaggggatagacatcgtcgtagacttcgttccaccagtgcgttagctcaccatgaagagcctgggtcgcgtccatagagtcttctctatgaatgatcgacttattccgtacttcaataatacgtccgcggagactcgcaaattttgccaggtaacctaacaaacgaagtctatgatctaagaaagcgatagtgaggag

SEQ ID NO: 13246 - DNA, 476 bp, Emericella nidulans
agaaactacgcacgtgcatggcgctagaatatagtgaccgctcatccaaacctttgtgacaggaggtaggacgcacgagacacgcgggagcgctggagaattgcaggaaacacgcccgagcaaggtagcttgatggagctcaacataaacatcatgcacactgatctcatcccctttgatgccaaagtacaacaatctggtcgctggcttggatactagcccatattcataagccaggtaaacagtaacaaagactgaggttgccggtactctcgagcgagcagagctaacaacaagaaatattccaactagtgtaagactgctattcggcacatataaaggtccctgtttaacatgagccgtatctcatattatatacagatatgctaaaccggaagagcatggatgacgattgtaccttacaaacgatgcgcctgagcgaattgatggagcgagtctagctcgtagcacgaatg

SEQ ID NO: 13247 - DNA, 542 bp, Emericella nidulans
tatacactacgatttaggtgacactatagaatactaggatcagaaaatgaacaagcatctcatcgagttgttagacttgaaacttcttaacgaatttatccttgcttttgtggcattacaaggaacttgaagacgacacttttttttaccctttttctttttctctttccctcccctatttttatttattttttattcatttcttataacaagtgagcatgaaagtagcatgggatatgctagacacgcactccgcagatttaatctcgtcttgcgtcgttttggatgacgggacgatctcaatgagcggcatcaaatagggtcaattataagagcgaatggctctgagacgcgatctgtcagctacatatgtgtttttggatagaccacgaggtgcccgaggtcgacgccagaactgcgctatcgagggtgcatactcatcgatcgtagaatagatgctgcgcttaaattctggcttctcttatccttgctctaggtggatatcggcgcccatgcaggcttctgccacctctgtccaggag

SEQ ID NO: 13248 - DNA, 787 bp, Emericella nidulans
  unsure (1)..(787): unsure at all n locations
gcccccattgttggagagcgctcgcctaggctcgagaagcttgtcgacgaattcagatgataaagtttattatcgtttagaagtattttcgtgaagaatgtacgcccgtttatatacgtgagcattcaggaaaagggcttttccgcacattcggaaaacgcctttttttaaatgataagtataggatagaaaaggagaagtaacattgacaacatttcgagaattaggattaagtgattctttactgcaatctgttgaaagtatgggctttgaagaggctacaccaattcaagctgaaacaattccacatgcattgcaaggtaaagatattattgggcaagcgcaaacaggtacagggaaaacagcagcattcggattaccactattagataaagtggatacacataaagaatcggttcaaggtattgttatcgcgccaacgcgtgaattagcaattcaagttggagaagaattatacaaaattggtaagcataaacgtgttcgcattttaccaatttatggtggtcaagatattaaccgccaattcgtgctctaaaaaacacccacacattattggtggtacgccgggtcgtattttagatcatattaaccgtaaacactncgcctgcaaaacgtatagacagttgttcttggccaagccgaatgaaatgttaaacatggggcttattgaggacattgaagcattttaacagaggtgccgaaacacataaacattactattcttagcgccattgcggatccaatccccgttttgtgagcgttcaga

SEQ ID NO: 13249 - DNA, 751 bp, Emericella nidulans
gtgaccggcggatacttcttcaaaggcccctgaatcaccgcatccttgcacggctggttgaagaaggcgatgctatatcaaccaccgatgtaatcccctgcactctcggacgccctgacccggtggaaggtgctcttgaacgatcgtccgatcagctcatcagcagatcgccggtattacacacgatctcgcccgtccttggctcgatcttggtccattcgtctccaatcccgaattcagtgacgctctcccgtctcgggcaggtctccaggcccgactgaccctctttctggaagaggagggtgaggaagtcccagtcgacgtgcgcgcccgcgctgaggtagggctggccttctgcacctgcccctgccggtgactcggacggcggcgggagggcagagtagtgcagcaatcggcatgttgtctgtgctttcggcctcgagatatcgtgtgctttgatgaagaaatcatctaggaagcccagtccgcgtgcgaaacaacgcatcaggagttctgaaacctcttgtatctgatgcatgaatgccaggcacgtctctctgaacccggtcagatactgatcgtccagccacagcgccgtccacattctcgccaaactggactttggatgacttcttctgggtcgggtttgccagtctaccggccgtaccttgctctttttttttccagccgactttttttgggtttcaagggaaccgctgctattgatggattcgggtagtggggaaaaaat

SEQ ID NO: 13250 - DNA, 1386 bp, Emericella nidulans
atacatacgatttaggtgacactatagaatactaggatctcgcctgtaataggagagtgcatggagcagcccgtactgaggaagctcgccactgtcctcttgcagctcgttacttgcgtcttgcgctttctgggcctggtactggatggtccgcagacgcctggctctggcatgggtggaccgagcagcgtgggaccgagcgagcctccgctcggctgccgagggcttagcagcctgtgacggcatcgtgttgtgaataaattgtatctcttgagactttaacattggatacctagggaattatggagcggaagatggaagaagggtcgaagacaaccagcttaccaaagtactgggggtgtcagctcagcctcagctagcctttagatatagggcctgtcccaggctaacctgttccagtttagattaacggaatgccaagcattgcgccttctaaaagaagaatagtccatgtttccaagtcttggcctgtggaaacagatattcttggaaacactaacattaggaagccgcccttgattacagctgcagagccttcggtgtcttgttaacagtactagcgacccaagaagactgttccattcaggccaaggccagcccctgtccgtgacagaagtgtttgtgatcgcacacgcgtagttgcgtatagatgctcgccagcggagtcagcggttttgctctccgtcatccgtaagtatagtaccctctctagttgatagtcctcagctcatcgatgttggtcagcgagctttttcttgatcataatgtctggcttagttgtcatcacgggagctaacggctcactcgctctcggcttcgtcgaatcctttcttgccttatactcccaacatacgctgatcgccaccgtacggaatccgtctccagaaagagaccccaataccgccaagctggtgcatctcatatctaggtacccctccgcacatgtcctcgtcgaaggcctagacctaggcagtctagcggccgtgagatcattcgccgacagcctcgccgccaggatatccaccaaggagctgccgcccatcttggcgatcgtctgtaatgcgttcacctggtcgctcgagtcggggcagaagttcacggcggatggatttgaagcgacatttcaggtcggccatctggctcaatacctgctcgggctgaagttaatcgagagcatggatccccgcgcagggcgggttgtcatgcctggttcaaccacccactacccgacaaaccgaaccctcttcttcattgcggccgggcttcccaggattttgagagctagttaaccgcggcggaaccgccgaatttgtgcatgaccggggttccagcgatcggacggttaatggtaaagtattttatgaa

SEQ ID NO: 13251 - DNA, 1413 bp, Emericella nidulans
cccccctccatctatattacgccctgttttacccaacatttcatatccaccaacgaaccgcttccccaatggatgggtttcttaaagcagtggggggcttacaaaccccctgaccgtaacgctgggcaatgagtaccgctgtgggcgccccatggcgacttcaccaactcctgggggaagacacaactatgccatgggcatcaaaagagaccgctgagacacttcacgaggccaaggatgaatagatggctccactacaggaggcatctcagatgggcgaccagagggatcacgattacgatgcgggtgacgcaggcaccgttggcgatgacgactcacgcagcttggaagcagttgccgacgggagcattgatgaagaagaggaagaagatgatgaagacgacgacgactatcgcggacgcccaggcgatcagcagcgtggcctcttaaccgatattccccttgtgttaggacctgctgagattgaagctcttccgatgattattcaagccgggattgtagacagcttcgggctcaagggtggtgaacggactggatcgcgaaacatgcaggctctgcgatgccacatcctcctcacacaggagacaggacgcaatctgctccgtgagcttttgatcttcattgctgcatgggaccttcctgacgacgagctctacttcaagatgatggtgcaaatcatggatgcagtcctaagaaacggcctcatgtctcacgcgtactcagattttggtcaacccaaggatataatctctccagcgcaggcagttgttgtgaaaatcctcacgcacatctttcgagccaagtactcacccgcttcagtcactggctccggccaagccaatgccaccaagaacccggcccctctttccagagtcgatgtcctcaccgtccgctatatcttcactatctagcgcggtaacatcatccccgaaacatgtgctctcatttacttgcagggccagattcgcgccggtcgcgctttgccagaagacttccctctcaacttgtgggacatggaacgggtataccgatagcgtttaccaattccttgaattcttcgctgtcctcacagagaacaacgattggtaaaacctttttgttagctggaagatcggttatgaccttgaaaccctcataagggaactcgagcttgcatcccaagggccactgagccagttgacctttgccaaacagcccttccaagagacaacaaaccgctgccacgttccttgccgttggcgactctacacctgcgaccacacctcaatggggccccgttagcccagtcccgcatactgggaacttcaatcaggggccctgaaaaactgtcgtcagtttcccttggggaaacctgagccggtaatctaggtgggggggaaccctcttcaattc

SEQ ID NO: 13252 - DNA, 373 bp, Emericella nidulans
catcgaataatacactactatagggagacccaagcttaggatccatggcatcgcaacagcagctgggtcgtatcgccacggtccggctgccaggacccgagacatgaagagctcgaggtcgtcgaaagactgggctagcggtcctgccgacggcgatatcattggtgtctcttcggccacgccggagacctgcccgccaaatggtacgcggtctgttgtcggcttgaaaccgtacagaccacagcaaagcgcaggaatccggatagaacccgcgacatcagttcccacgccgaggatagagcctcgaaaagcaatgagggctccctcaccgccactcgatcctcctgcagtgaggttagtgttgggggggggt

SEQ ID NO: 13253 - DNA, 767 bp, Emericella nidulans
aaacatgagattcgcggccgcataatacgactcctatagggatccagcttacacagaaagagcgtcgacataatggccctcaaatgtcggcctttccaccccgcgcggcagcggcacatcaggctatgtacagaaaaaccacgccttcttgcgcccgcgcaacaccggcgcaggtgcaccatatccatccccttcttcatctcaaaagacggatccgagtcctccttcagcagcggcaaccagatagagctatcctagagcacgaaatgaagcgcgagattgaggtcaaggtcctcgaggagcgcgaacggttagaggatataaatgagcgagtggaagaggggaagggcagagagggggagaaggtgcgaagtgaggaagagatcgagaagatctgtgatgagctgagggaaagattgacaagggaaatggaggataggaagaacggcaatgggagaaatgatgggaggaatagggatgggaagggcaagaggggttttaaggcctatcaagtgcatgagcttgcggaggcgaagattaaggagagtgagcgtttgaggagggcgcttggaatccgggatctggatgagcaggggggcggtggtggtggtggtggcagtagtagtgcgagggcggaagttgagaggaggagggagaaggaaagggagagggaaagggaaagggtatagctacgttcacttccaggatattggttctcataccatggcgttgggtgtcacggttttgggtcttgagttgggctgata

SEQ ID NO: 13254 - DNA, 995 bp, Emericella nidulans
tctaacttttcgctagagcccctaacaacatccatccaccattcccgattctagatgagcagattgttttgaaggcctatcagcaagatggcctcccgtatgcccttgcatgtgaaatatacgcgtgctcgctgctactctggaaatcatcaccaaaaattgcagcctctaaccgtccggtcccagacataagatacatgtggaatctgacggttagtgcgatgaacgatgattttctgagcccaaacttctcgacgatcttggcttgcatactggatctcctgggacgtccaattacctctattacatataacgcggttaatgtcggccgtgttgtcgccctatcgcagagcttagggttaaaccgtaatccttccacctggggcgtggactcacgtcagaagagcttacgaattcgaacttggtggggtattctgatacatgatcaatggtatgtcccttgacacctgatgcttgtgtagtcgtgaaaggattttgactagtatagggcgagcctctcacatggtaccccgccccatatccacaagtccgtttgggatgtgccgttgccggactcagactcgcttatggtgagcattacacctggcgaagtctttccacccgacgctcgagttcaaggagcccactctttcattgctctttgttctctaaccactctcctcggacaaattcttcccctaatctacgtcctggaggttcagcccctagaggcatcgttcagggcactccgacgccacgaaacagcactcaacgaatgggaagaaggccttccgtcatggcttcgtcccagctctccggtcttcgagcggaaagcagcaggagcactaaatctccagctctcattcttagctgtgaaactgtgtctttctaggattgcgctgctggagatacaccgatcgaatgagtctcccgcggaggaggataaattatactaccgatctatatgccggaaggcccaagacctgtgttgtttt

SEQ ID NO: 13255 - DNA, 1139 bp, Emericella nidulans
tggactcgtactgttcggcaccttaaggactcagggcccttagcaaggtccagggcgtacagcttctgttctcagatgtcgacgaagcgaagctcattcttactattgtcataaaatggcccctcgagtaaagtccccgatacttctaggtacggctagcagtaaaagagtgagattccaaagtcgaatatacggcgcaattgatgatgggtcacagcccaccaggcacgtctgccaggtttcaacgacacaagactccagtccatacctcagaaaccgtccacttctggatggaagacattcttggtctgagaccctcgcttgagctggaacggggtgagatggtgacacagcacccgctctattagaatggtagatatagaggtaagacgatcaatcaactcgatagctcggtgtgattgcgaaagtgaaactcgaggtcactgagagttgaatcgtggccgattggaaagcgccaagccccacatgacttcccaatcggttcaggcactctgccgggctcgattcgtgatgtttactccgtacctactccggattgccaagacgcaagagtaagactgtggtaggacttggttgcttcgtccactcaagccggtcattggccttgatgattattgttgggacttccccaagtttcatcgagtccacgtcactcttgtactctttttggtaagctacatttaaatccatgtaccccctagctgtaattccagccaacaataatccttatcgaaattattcgggatgtgattcggcttaggaattatcaagtctccgacgcaagtgcgccttctgcctcacgagtccttcagacaggccgtccaagcctggctaagacagtgcacctgtcatgcacataagcggtcgcctggaacgtgccgagatgtcaaaaccgtctctgtatgagccttctcttgcatgtccaggcagcaatagcgaaagcggcttgcgtttgtggcagagtatgcacgttggttgggaacctccacggcgcgtctgacggattccgcagcattgagtctcgatgctatgacgcactcacgaattgaggcggctcaatttacctgtgagcatgacatttcggagcaacaatggacgaactgaaagcaaatggggtt

SEQ ID NO: 13256 - DNA, 693 bp, Emericella nidulans
acacgtttgtggtgagcacgtcccggctcgagaagcttgtcgacgaattcagatacaattagaagttttttcgttaaatatgaacgctgtaaatagcagtttagaagaagcatacacaactgtgaacggtgtagctgaaatgacagaagagttaattggacaagcatatttagtggaaaaattaattcagtacggtaaccgttaccgtagtcatgatgaaaacctagcagaaagtttaaattatgctgagaaattattccgtgaataccaatacgatgcagctttagaacaagcggcttcagtgttagagcaacttgaacctggcgttgttcaaaaaatagctgaatatgtagacaatgaacaaaccctttcataaaaggggttgcttttttatgtaattttgcaggcgatgttgctataatgaatagcggaatacagttagggtattcgtttcaaactaaagtgaaactgtaatcggtgggaagattcattcccaatgatttctagccttcaccaatcgggcatttacgggcagttaatctcccattacttttttgttaactggattttgggtgagagtcttatgcccgttacgcggataaaggaaactgaatagggggcatccttacaattttaagcttcacatgagataaacgacctttggatctagggaagcccgatttttgttgattt

SEQ ID NO: 13257 - DNA, 546 bp, Emericella nidulans
cccttcttatcgaatccaatggctgggatggcggtgactgtctttttcttcaatgatgaaaacagccagtcgaagaatattatgaccaatgattcaggccatttttcggttcgagcgtcgctgtcctttgttcccacacacgtgcgcgtgcttgcatcggaggacctctccgctgtgaagaacgtcgaaatcattgaacctacaggcgtcagtatgatcagtgacattgacgacacagtaaagcattcagccattgcgagtggagcgaaggagatgtgccgaaatatattcgcccgcgagctgtcggatttgaccattgagggcgtcactgactggtataatgcaatggccaaagcgggtgtgcaaatacactacgtctcaagctccccatggcaactatatccgctgttagatcgcttcttcaagatggttggcttgccgcctgggtctttccatctgaagcagtatagtggcctcttccagggtatatttgaacctactctggagcggaagaaaggaaatctagaaagaatcctgcaagacttt

SEQ ID NO: 13258 - DNA, 504 bp, Emericella nidulans
  unsure (1)..(504): unsure at all n locations
gactgacaattcggccgatgatccatctgagacaacggggtcgattgtcccggtcatggttaacgtattttgagcgcaccaacgggctcctaaacatggggcatctgtcgacgtggataagatataatcctgaaacctttaggacgccaggggccatatctgatgtgtgaatcaccaagagccgaatcccttatttgctgattaggcggcctaatggaacaaggaggataatgctaccaaggagctcgcattggacgacgggcttgagaatataaagatcagaggactaataggatcagtagagcacacataagcgagagattttgtgagagtaggacctcaataaagattcaacagcacttcgcgagaatgtgatgagcgcacctgaatttgatganagnnggcattgtctatttctcggtaggggaccatgactgagattgacatcgactgatagcactacttcgatggatcgataacagcaagccttcttgcatataccta

SEQ ID NO: 13259 - DNA, 525 bp, Emericella nidulans
ggaccacacttcggatgagagaatctcgcacgcaacataggctcgcttgagacgctcataatccgctcgctcaaggtcctcaggatccaggtatccttgagaggatcagtctccttctctccggccgcggagtcatcatccttcgcccgagaaccctccttttgattagccgtgtccgcatcaccgtcatcttcatcatcgttcaccaggctaggggcgatcacgtagtccataagcttcttcaagacatcatcttcgcgtagatactctatgagtttcgcgttcagttgcttgagttcttggatcagttcggattcgtctagcagctcttcaaggctgacaacgggtttgtccagaagggagtcgatggcggagacgctcgcataccccccgaagcgccaaaacatgttggattaaattaccggaagaaacgattcatgtaaaaaaagtagggtatcacaagcttttttcaacaccgtactccttgcccaagcttcaatgacgacgagcggtctggatagaggg

SEQ ID NO: 13260 - DNA, 848 bp, Emericella nidulans
ttgggccatatcctcggaccgcgtgtcgcgcgtagttcatggacgttcacgcggacattcatcaccggctatctctgtgtattggggggatactggacgttttattgctgtccacacatctggtgttagactagctccaatgaatatggaaacttgttaacgcttgcttaggttgatggagagcattttttatcagaccacaacttgatacaagtagctgcattggggaactattatagatcactaagcattggatgccaagaccctgtaactttaagaggtttgtatggagagatctgacaagcgtcagctttccctaccttgtaatctattcgaacgtcaatcctggcttcctctctatctaatgtagcataaaatctttgtcgtttgcgctgccacaacttcttttggttcctttaaattaaaaactattcgagttttaacccgacgacctattacacatggtgagtttttagctaaaaacatggtggtcaggacacaaggtctcttcccaaacctccttttctttgccgtatttttttcttttaaaaaataaactgctggtatggggaacctgcttaaaacttataattttaacttggttttaaattagccctaaaaatgggaatttcaaaaaattttaagtccacaaattttccctaagactatttccctatggctctacgttatatgtcaccttcctaatgaaaacccttaacattacccctctcccgatttattaattgtctccccccaaagactattatatgtggaaaatctcttttttttctgacaatttcttttaccttaaatttttccacaattttttataaccaaataacctctct

SEQ ID NO: 13261 - DNA, 620 bp, Emericella nidulans
tcttgattttcaagcaggatttatcatctgtctctgctttttcatgctgacatgatgtttaaatgctcggccgtgggattactacatacattagcagcgccgagaatgtccgctgcctttgcaattccagagtcgagttctactgaccttgatctgacgaaacccaaacaatcccagcagttcacgttcatcaatgtaacacgccgtagccgtgtcgacaatcgctttgttttgtctcgagtcattatcctccttactattaccagaatactcactgtatgttaagggaggccgcgtggagtatctgtaatagtggccgttcttatgatcagcccccttcacaacgtggccgtgtgacacttcaaatctcccacataccgtctgcacactgcattgcaccgtgccgatttgccataatggggccagacaccagcctctcactggtcgttagaccatcgttaaatatcgcatggaaccggtattctcagaccaagtcatgcacgtactagctacttatagactagtgcaaaccaacaatcggtttcgatcgcaattggcccgttcatctcaaatcagggatcatccttccgttccttaatcagaacggtgcatggtcggga

SEQ ID NO: 13262 - DNA, 675 bp, Emericella nidulans
tcgctgctttccgtgagcacgccggaagtcattgaggctgagtcgtcgggcgcgtcacttccctttttacgcctctttcttctcttcttcttctttgttttctcgccttcgttttcgtcataaatagctgcttcgggggtatcattaaaatcatcggtgccttcggtctcggttcgcttcagaggctcaggtccagcctcaggctccctctcttccggaatggaataggaaacttttgattgagaaacatttgccgttggcgaggtactgcgttgctcaatcttcgactcctcaggttcaaagccacccggcataaaccactcttcctcattgggagactcggactcttgtctgcgttcggcaaacgatccctcgtgagtttcgtgtgcctccgcaacgcttcgagaaacatccttggcaatatcgccagcacccgtctcagctttatcgacatgctcaactacaggctgatcgatagtggttgggcggtcagcctcccaggtccgttcaggttgattgtcaaaggagacggtctgtcgaagattacagtgctgggatcagagaagaactgtgattttggagctgagggctgtcgactccgccctcacgaaaccccgaattgttgggtagcaggaggttctgactcgccgttgccgaaccacatcgatgggagat

SEQ ID NO: 13263 - DNA, 1221 bp, Emericella nidulans
gagatccgacagcatggatcccagcgactgaaaagatcgtttatctccaatgatctagagcacatcagcagccatgatgacatttgcgggctccatctcttgcgacccgcacactatgcgcaacgccaggattgggagcacatgatgcttggtggaatgcgtggcgaacttgttccccttgcaattgcaccagagagtcatgcttatgagcttagacaaaagttccaaacatacggcctggaacttgaacggaccgatatgagtgacgatccagagtcgatactcgcagcacatttgagtaatgggacaatagcgctctacagtacaaccacaggagaggcagaggttcaaccattcggacgtcttcatgtcgatgccgggagtcctgcacgttacaagagctccaggtttctctcctcagaccgcttggctgtggcgacgggacgcccagaagatgcaatcgccgtctttacgatctcgcaaggacgattgacggttgagcactcattatcggccgattttctaggctcgccggccttaactggattcgctaaaagatcaaccgttactgcaatagcgccgctcactggacagaccggaaattccataggcaataccttccttgcagcctggggggatggcgcagtccggtaagtctttgcctcactggtggtctacgaagtgcagcactaatgacatacagacttcatgacctacgctctcacaagccatacgaagggctttacatagacatagcggaccagaaccccgtatactgcatccacccgtacgggcacgatcgattcgtcgtcggcgcagggggcgacgcagttgtcaagatattcgatattcgaatgccctctacctacgactacaaccctgcaagacgacaatcatcttctagccggcctaaaggtcgaactacactccccacatcttcggcgcacccaagcaaagacctctctattttcctttctctaaacccgcccacgacgcgcaatgacagcgtctctcggtacgctaggcaccgctaccgcggtccaatatatactatgtcttccccttctctcttatcgccaacaatatacacaggtatcgccggaggggttgtgcgactcgacttcgcgtctacagacgacttaacccgtacttataaacttgtaccgcgactcctagacccgacataaatgcacgaaattttaaaaactatccacatctctt

SEQ ID NO: 13264 - DNA, 582 bp, Emericella nidulans
gcgatgctgcgttctcaattgcacgatattcttcgactgacgtatgccaattgcgagacggaagtacggtctggcggaagatccttcctgtctagactcaggagtttcgaatctattcgaacaaatccatattcaatatcgcggatcatctagctaaaccaccaatccatcactcccggagccggatggagcgggtatcaaaacagaccccggccctacccatcattactcacatatgcagaaaccttccatatcaacgcccttgagcccgggctgcacgcaaaaacaaattctcgagcgggccgactggaaaccgggagaagcccgagcgacggatcaggcagatatttagacggcctacagaagctcaatttcacactgggcccatcttagtgggtcgggccgtaatttgacctcttgagcccgctcatgattaagttctgcagctttgatatatcgaatgactctgcaccatgccctgttgaagccgcacctgtcagcacaacaattgccgctgagagatcatgcccatgtgatgcgatcgcgatcggtcttcgggtcgtaactgctagatgatgccca

SEQ ID NO: 13265 - DNA, 743 bp, Emericella nidulans
tccccctccagccgcgtttccccgcagaatacccccaatgtatacaccttttccgccaatgcagatgccacctcgtccacacttcaatccatatgcaccggccttcatttcatcgtaccccccttcccagcccatgatggcaccggctcacatgccgccacaaccgcttcctttacaaccaagagcgtcgacgccatttcagaacccgatgtcaccgtctgttggcccggccccggcattcatcccgtcgcagacccagtctcctgtagtgatccccgtccactctacacccagcccggccatgtcttcgtcgcctgctcccgccccggttaacgccgtgccgccgcccaaagaacccttccgcgcaccggtaagatcttccgtaactcatatcagacctgatgctaatacctggcagctcccgtggctttctattcccgatagtcctttcccggccagggctccccgcagacaacgaaagactcgcaacttgcaagcttcctctctttctgtggagcttcctgccaaggatgggcaacgaattcagaatgaagaacctagcaaaccccagggcactcagacacagacaccttctgaaccgcaaactccaactttgtcggctgctcctctgttgcggattcacccagcccacgactccatcttctgctgtgccgagctcatctgctcgtcagtccaaaggatcaaaagcaacggtccctgttgtgccggtgggtccggttgtt

SEQ ID NO: 13266 - DNA, 733 bp, Emericella nidulans
ctgcgaaaggctcgaggccactttacaaagatccaaatgctgcaattgaagacagggtgtctgacttgctgggtcgtatgacccttgaggataaagtgggccagttgatgcagggttcgttgatctgtatttggaaatgcgtccacaataggtggtgtcgcgactgcgatcaaccaccatggtgatgataaattagttgcaatggctgaatattttccaggtgacattactaattggatgaacgcggacaccggagagttcaactataccgggctggaagagaatatgaagataaaagccggcatgttctatggtatgagtcgttgcccaaagccaggcagcaccatcactaatgacctggaatcctagttggctaccctgtcccgtgggactggatcgcgacaaatgttaagcgcgcccaagactaccttctagaaaatactacacttggaattcccgcttttgtgcaaactgaaggtgcgtagtgcggcgctggtaataggcaatcgttgacgcattgcttgatttgcagcaattcacggtttcctgattggcaatgccacgatctacaactcccctattgcatatggctgctctttcaacaggaaggtgaggtttactgacctgaccaatccgcccgtttgctccgcaccagtgcctgacaggaacagttgatccacgatatggcacggctcataagccaggaggctcgagctctaggagataaccaact

SEQ ID NO: 13267 - DNA, 1229 bp, Emericella nidulans
ctttgatcatctatacctattttcgcgtcctgaaccgcggggcgcacattcgccgagctggacgttctctttgagcgcaggatcagtgctcgtaagtttgaaagcacgcaggtcgatgtttttgatgagacatttgaaggcaaggtggttgaggactatcaaaaccagaaagggctcccggatgatccggagaaactacctactggcgtgttctgagctttgttaacccacataccgctttcttgcatcccataatatctaataatgagtgtacataatacgttatgaggcaacgaatgtgtctaatgatgcctttactgttatttcagacaggttcattgtcaagttcttacatgtgcgcataggctaacattctagcccaatttcttactcgtgcgaccactgaggcttcttcttttccgcaaacgcagtcattcctttctctccgtcagtgccattcttggagtaatggtaaagggacaaaaacctaccgatcttctgatcctgactcccgaacaacccatggaacagcctccgctcgtactcaacgccctccctcactcccaaatcctgactcttattcactacttccttcgccgcaacagtcgcaacccggctatatccggcaattgtctcggcagtcttcactgcctcctcaagagttcctccttcccaccatcgacaaccttcgccgcaactccccactcacccgcctctttgccgctgaagttcttgcccgttaagatgagttccatcgctttactcttgcccaccgcagcccggagacgttgcgacccgccggcgccggggataacgcccagcttgatctcaggctgtccgaacgtggcggacgcggtgcagtagatgatgtcacacattagagcaagttcacgcccaccgccaagggcgaagccagaaacggcggcaattacaggcttgcgaatagaattcgcgagatgcgaccaaggggctatgaagttgttgctatacgcggaagcgaaggttagaggggccatttctttgatgtccgcgccggctttatacaccaaaaatatctgttagaattgcgacttgaagagaaagagccttgacatggagtagacaagaacaccccggcaaaagccatctccccccctgtgatgatgatagcgccaatatccatgatttcatcgtatttggagagagcatcgttcacttctttgcagagagggctgtacagacagttaggg

SEQ ID NO: 13268 - DNA, 529 bp, Emericella nidulans
  unsure (1)..(529): unsure at all n locations
tccgagcatagttcttgganaggctcacggcatgctgcatggcgtcttatggacagggattcaaaatgggtgtatcacaaccacgcaccatgaactactgcaggaaccactgtggtggtcctgagggtcttcagctgtggaacagagacaccactccggtacaacatctgaactattaacatgcactgcatagctggaagcagctgaaaacagtcataggatcactcgctctatctgtaaataggcaaatcaacaggggatagagtaggaaaaacgctccttcacgagcttatacagagacgtgacagtaataatctgaacgcatgattgattactctgcagctcactaatgcataaccacctgcagttgtatacatacgaaaaggcggaatgcaacttgatcgaagacatgatggacaccatgaaacaacatgtctaagaactnnctcgactcaacggggctacggtcgggcatccaccaaacgcaagtgcagaactgaaacagactaaaagccgtagacgacctagg

SEQ ID NO: 13269 - DNA, 601 bp, Emericella nidulans
  unsure (1)..(601): unsure at all n locations
tctgtggagaaggtgaggaacattagccaagatcataaatacgaggaaacatatgtatactaacctgctncttgccactagttattggtcaagaacccagcagatttcattggcagcgtgatagggggttctgagcagaatacaaagggtattctagcttctaccctcgggaaggtccttgtaatcgacgaggcctatggtctttacggaggcggtactcgtgatcctgccagttcgaattcaaaccagttcaagacggctgtgatagacacaatcgttgcagaagtccaaggtgtccctggagatgatcgttgtgttcttctactcggatacgaagagcaaatgagggagatgttccaaaacgtcaatcccggattgtcaaggaggttttctccagataatgcctttgttttcgaggatttttcggatactgaactagaacagatcttcgagttgaaggtaaaggagcagggctctgtcacgtcggaaaagggaacgaaggtggccatggagatttgntcgcgtgctcgcaaccgtccaaactttggaaacgcatgagaaatcgatatcatgttgaatggcgccaaaggtccgcagcagc

SEQ ID NO: 13270 - DNA, 853 bp, Emericella nidulans
  unsure (1)..(853): unsure at all n locations
taggctcgagaagcttgtcgacgaattcagatgctgcatgaatgnaaaagctaccatcattgcgacattggagggaatataaaccaccaatcggcggtttattttttactccggtacactcattaatttcgctctcattctgcgagtaagaacgacagcgccaattgtacaaagaagtgtaattccttctgcaacgaagatattgattgtttctgcttggtaaagggccgagaaaaagtctacaaatgcgcggaatagtatagcgtatactaggaagatatatttgttctgttttactgcgtataaaacatgcattgtaaaggcaatttgaagcacgagcgccataattctttctaagctaccaaggcagtatcagtaggcaggttgatgcttcaacatgttctgtaaaatgctcagttcgcctttctgttccattcatgcgggcgcagcttccatatgttatgcgacctgcacaagataaatgccctgactgcaacacaccccgcccttataactgtattcaattccgcctgactcacattttctttggacggccctcctcctcttctagtctccttttcgcgagcagtctctggttcctcctcctttccttataataactccgtgctaatccccctacattcttaaataatggctttatcacatggtgactattgtctccccccatattgtgtgttctctattcacgtttttttctccctaatactcatcttcttctctattcccaatcactactctttccccatccttctcattctgtctaacatctccctctccctccctttccacttacacctatcctccccactttcccttcttcctttctcctctt

SEQ ID NO: 13271 - DNA, 1079 bp, Emericella nidulans
agatttcagtgaaggatgctgatgtgaggccgtttgatgcgcagtggggatattttgttgatgttgttagtggaaagggtgaggatggcgagcgaggagttggctgtggcgttgaagatggggtgagggcgctcagagttgttcaagctgttaggacgagtatggagggaggcaagcctgtggatgttcaaagtgtataaatggtaggcaatcagggagggaatgactagggctgtaagtagtgaccgtatgtagttgttctagtggtgtaccatattagacagacaactatcacgtaaatattcacaagaaacatcgtctttcggttcatattatatcctcataacatatatacatcacttgaaaccaagcttacttaagcctcctcgacatactccttcgtcacacctcccttcccactcgcacccatatccgcccggaacgcctcctcattctccctcagctccctgattagctgcgaatgggcgtgccaaaccggtttcttgtcaaatagagtctccatgctctccagcggcacgcccttcgtctcgggaatgaggaagaaaacaaacacgatcgagaggatcatcaacgatgcaaagaagaagtagactccgtatcccatggacgtgaacatctggggcgtaaagcgagagatcagaaagttccagagccagtttgaggcggcagcacaggcttgtgcaagggagcggacggtgggatcgaacatttcctgcggacactgttaatatgtgctttctttggaaggccacgaaggaggacttaccgagttgatgacccaaggcgtgccgttccaagatggtgtatagaaggccgtccacaggtagaagaagaatatagccgcaatgccaccgctatcaagctgcgttccctcggggttgttctctggcttcgcgatcttgatgtatccgcccacaatccaaaggcagactgaaccgcccgccgcaccaacaagcagcaagttccgtcgtccaaaatgatcgatcaaatacaacagccaaacaaaggtaatgaccgccttgacgacgccgaaaaggcccgttgcaagagtaggtatt

SEQ ID NO: 13272 - DNA, 770 bp, Emericella nidulans
aggaaagaacttggtcatatgctcgcgggaagaggttgaggaagaattcatatttgctcactcttttttctctcaatggagaacccaaccacaatgcactctttactaatctagtccggatgcataattattttggcaccacttgtttgagatacgacttctctacatgtctttgattttttggaaaaaatccaagtttatggtatgacattgactacgacatcgtcggtgactacatgctacaattataagacaaggcactttcatggcttcaagaagaggattttgatttcgtcaaacaatcgtaagagtacggaactcaagactgttccgctaagaggcatgcttgacctgccaaatgcatgctattaagtctgctcgcaaagcacacccaaggctgcaccgacggagtacacatcggcgatgccacactctgcccaaaacgtagcatcatgctccagtttaaaggtaaccacatgacgctcctttgaaacaaaaagggctgacccggcattaacagtttaattgtttatttgggagcctccttgacttccatgcacatctgctcgcccatggaggtgaggatgacgacgtctacaagcaagtcagttagtatcaactgggttttagaaacagccaagcgctacttactgcaatccttctcctcctccttgaacatcttgttgatacgctcaccaacctcaccctcaggaaccttgacatcgtccttggtgtcaccgctgtcgtccataagggaaaggaagtcgtct

SEQ ID NO: 13273 - DNA, 399 bp, Emericella nidulans
acctaatgtatgacatgactcggcacactgatccaattaagtaggcaacaatctcatctacagggtcgtttcgcaaggtgcttagaaagccaatgtgtggctcgctcattcctcaccttggacgaggcacagcacccatatttcgggacgtacctactccagactccctcatgcgcagggtcgtgccttctcaaaacgataagtatggtgcgatattgaccacccgactgaagttaatggagagaaagaacaatgcaaatggttagattccgttgctccgtacacaagcagacacctaggccaaaggtaggtaggcaggtggtgaatagggagggactctcgcgctcaatacgctcacgttaggctcaggtacacctctgtccgcacccactcaattca

SEQ ID NO: 13274 - DNA, 800 bp, Emericella nidulans
gggcccagggggcggataaaaaacaaagaaggctattcaatgattcagcacggcagggtctttttttttacataatagtttttggtccaacttaatgtttttcaggggactgcagacggccggcaaacattccttttccgggcagggttaatcagcaagcctttttgtggggcagctaagtataggcaccgtatatatatacgaaagtccaaagcataaccatagtaacattctcgaaatctacctccgcggccaccagaagtatgctgtctagccggtttctacctaaaaagagtcaagagttcaatatcagcaagggcccttgcaccggtctacctataacatatatcgcggcaacactagatccgaactatgaccagaacgagaaaaaggtcagaatgtcaaataacagaaatgctaagtcaaccatcgtctgcccgtatgcgggtcaatcttgtactgcagaagtctaaaccgcatgcagcacacccataaggcaaaccgctgcataatgattttgcagctggactcgcgtttgatggcgaggatggcaagagaagtcgaggttcttgattgaaagacggatgttgagattgtggagtggcgttgagcaggccgttgcacctactgaagaactgctggggtgagtgattgcgctggcctttcagtagccctagtttagcacgacatggccaggttatggctggtttcggctgccagttggaatgttgtttgaagtgacaatgggtggttagggttgggtaacaaaaacaccaaggtagctaggcttcagtgaatac

SEQ ID NO: 13275 - DNA, 656 bp, Emericella nidulans
ccaacatacatagacaattcgcggtcgcataatacgactcactatagggatcgactggacgaacgcagttactatacatccatacctgcaatgctgaagctttcacagcttcttgaggccaaacggcgcgagagcaacgacaatatgggcgatccctcgcctctttctcgccagcctccccagtctcctttaaccgcgtccacaccagtctcacccgcggtttctttgttttccgccaagggccacacacgtttctccagctccgcgtcatctctcgtctcgtctcccggtcatggcaactcaatggatatcagttgtcggaatcccttgacgggtgtgaaagaagaagagccctacgggtcgcaagcgagggatctcgaagaagaatatttccgtatgcagccctcgcccccggcctcgttttgttttgatttattgtcatggtgttttgaacttggaaagaaaaagaatatttcaactaacgctaaactcgcagagcatttcgatcaagggctatccggcgctgaagattcgtacctatccacagtcagtacttgcgacggttatagtttcactgataccggtatggatatggtgcactctcccaagaagagacgctccgacaatgcttccccaaacggtctttccagcattcc

SEQ ID NO: 13276 - DNA, 736 bp, Emericella nidulans
  unsure (1)..(736): unsure at all n locations
tgggctgattgacagttgcaggcctcgcgagcctgaccatttttttttccgcagagatgaaggggatccgtggcatcctgttttatcaagcgcctgagcgtcttggattgagtgggtggccaggctgatacagcggctctgttgcagagggggaggagaaaagtggcccgtggagaggggaaagacagggaaacgtggccgatcattctgcagagtgacagtttgtatccaaccagtgcgtgccaagaattgcccatcctgctgactgactccgactcgggaggattcacgttcggaccgtgttgaccagtctcgacgagaccatagaacagtacaacaaaaagattgaagactgaaaggttcacaaactaaagactgaaagactgactgaagactgccttcaagataaaccaaagacagtaagacgagcctataagactgaagaagatagaacgcagtggctgataaagttgcggtcttgcgaatgacagagttacagtcagaccatgccaggttgtacccggagcagccgtatctggagtcccgccggctggtgcagtagatttcctgattttccttagccgctttcttttgttattcgcgtggttttctttttcccctcaaccaggcttggggtggattcggctccgtggcggtcagcggccacgcgctnntgcagccttaggtaccaactgctgacagcgcactgcagacccccccaaaaaggaaaaaaatc

SEQ ID NO: 13277 - DNA, 864 bp, Emericella nidulans
ctcgcctaggctcgagaagcttgtcgacgaattcagatagcgatagtttttccgtaaccttatacccatactttaggtgcgaatgggattactttcgggtcaacagcgatcattttcatgttcggattcgcaggtagatcatgtcccattgcaggtaatacacgggcgacatatgtgccaccgttttcgctcgggtgagctgtatatgctgaagctacaactgttaacttcacgccaccagatggctcgctagtttcagcagctttcacagcaggcttcgcagctggctttggttgtgctacaggcgtttgagccttagctggtgcttcagctttagcaggagccgttggttcttgtttctcaattacaggtgctgcacctgttaagaaaggaacatgaacataagctgttttcccgttatattcaaattgtgaccactcattttgtagcttgttccgtgtttcgattacatagtctttcttgaacgtttcaagagcctatgaagttgtgttcgatttagcacgtacgtttgatacggttagttgtttcggtgtagatgctttttgagaacttttgacttaacataagcgtttttaccggctaaaggacttttggccatccgttttctgatttgggacattattttcttaccgctaggtaatgacccacacctttgatcccccgaggggatccccagccttttggacattggggtaaacaagtactgcatagcgtggtgttaaatcctagaccaaactggtgtgtgataaccattattttcagatccccttgcgctggtgtgcctttctcaacagatttgggtgtaaaccccctctccccttaagggttttcgataaaaaaaaa

SEQ ID NO: 13278 - DNA, 740 bp, Emericella nidulans
ggctcgagaagcttgtcgacgaattcagatcgatgacagaattccttaaacaaattgtacttgggcattatgcgagcgttgaaaagaaattaaatacgttatatggattaactgaaggtataggcaaggacatttcagatccatttggaggctcgctttctatttataaagaaacgttagatgagatggaaaaacttgtacaaactttactgaaaaaacattcagtaggttgatgtttcgcgtataatacgatattggagatcacttcttcctatatgaggtagcgagtgtgaaatgaagataattgatagaaactttggaggggtaaaaatgaaaggagtgatagcatctgatcacggcggcatgaatatccgtaaagaacttgtaagtttattagaagagttaaatattgaatatgttgatttaggttgcgaatgtgaagctggatctgttgattaccctgactttgggtttcccagcagctgaaatggcctcagaatggtgaagaagatcggggattttaagtttgagggacaagcatttgtatgtcaatcgcacaaaacaaagtaattgttttccttgggcgttggttcaaggtactttaactccaaaggaaaggagaccttaatgccctaacagcttacatggggaaccgtgaattgggaggtctacccggataaccgaaatttggtaaaactgttaaaagggaattagaaacccttttataattaacttccatc

SEQ ID NO: 13279 - DNA, 397 bp, Emericella nidulans
  unsure (1)..(397): unsure at all n locations
gcggngttatcctcaagacccacaggatcgatcgggaacataacatgagcaatatattccatggctgnggcctttccagcggctaggactgctgggggataacgacagagncccacgatcaatgcacgagacccgagttccctgcgtatcgagcaccgccacggttgctgattaggccaatcgagccctgaccatgctctggagcacatcccagccatctcggaccagtacaagcttcacaccggggctgccgctagccctatcctgagctccgcccgcgatgacgatccacccctcggctacctctacccccataaacctagcaaccgtcaccacgccccacctcagcaacatacccatgtccacgcgctctccttctaccaacctcacttacccc

SEQ ID NO: 13280 - DNA, 1478 bp, Emericella nidulans
  unsure (1)..(1478): unsure at all n locations
atggtttactatgctcagctattgatgcctcaatcgtcatgtcatatagctttctacctgtacaaacaataagacggcaatggggtgggcatatcgcgcctcattgtatggattctcttttgaaggtcgagtggtaaactgcgcccgcttggcatttggctttgggcaaatgatcttgccggtaggaagaagcgcagaaactgctccgagtacttggtcagcctcaatgcgccttatgcttagatcttctgcatctaaactgctttcggtgctatgtgccgccgcatggtacgtccatatacagggcaagaggcagtggtcaggagtctccagcatatagtagggttccaagtccaggatcaacagctggcaaatctttttttattttttttccctcgttttcttatttttctcgtttttacactgcgaggagagaaccgccctagtcgactctgcccagtatggaccctgaaacgggcatctacgagtacagggccagccatgtgctccctattgtctttgcctgtgtgctgagtctgtctctggccatgcacatctaccagaacttgtcagtatccctaccctgctgtacccagagatgctaaacttttacagccgctatcgtttctggagaatcaccttctggatgttctggggctctcttctttacacagtcggctggattctccgcgccatctcaagctatagcccagagcatgtagatctctacattgcagcaacagtcttcgtctacgctgcacccccggtcttctccgcgtcggcatacaacatcctcggccgcatcatgcactatatccccatgttcgcctggatcaaccctaaccgcaccgncttcttctttgtctatatcggcaccctcgtcgagggcctcacagccgtggcgggcgcccgtatcgctacgggcgccacggaactcgacaagtaccgcagcggcgcggaactgatcgccgtgtacgtcgntctccgagcgtcgtcgagattgggctcgtcttgatggtgggcatgctttaccggaaatgcccgcgtgccgtatgcttccccggaatctgcggtttcttttttccactcttacgggccctggagcttggcccagtccgggatttaccgggccgtgaaatttttccccttgaccaccggcgtggaatgaggttacctgaggcctcaacggaagatggtctttccccctgtagcccccacggccctttactttgacaacctttaatccggcgattgtcccacagaaagttttgtttacgggccccacccggtccgggtcgctcaccaaacgacttttgccctgttgggtggaaaaaaccccacatttgggcctgaacgcttgtcttcaacccgcatatttagggggggcggctccctcacactattattttttatttttatatcaccctttttttttttttttgtggtggggtcgttccctattttaccttttattaaac

SEQ ID NO: 13281 - DNA, 894 bp, Emericella nidulans
gcaatgctgctctagatcgtctctttcctcgtgcagggctctggagctggactgatggccatgggcgggtcgatgacgaacgtggcaaaaggtattgttatcgcggggctgatggtccagattgtgatatttgggttcttcatggtcacgtccgccgtgtttgaccagcgcatgaggcggtacccaaccagtcttagcatgagcaggaacggtggtgacgggataggctggaaagagcatctctatccgctgtacgcggtcagtatcctcattatgatccggtcgattttcagagtcatcgagtatgcaatggggcagaaggggtaccttctagcgcatgaatggccgatatatgttttcgacgcggtcttgatgcttggggtgatggtgatctgggggaaggtggcattccgggagcatcaggaccgaggggatgggagcgcagttatttagcatgaacagcgggcagagtaaagactaagtctacagttggtcaagagacggcacaacttataaataaagtcatctttcttttgtagcaaactggctttcttggcagtccttgatctttggtactgtattctctcatcccgggtagtaggaaccactagaagtagagaccacgagctggctggagcggttgattcagggacacaacgcagggcttctgagatcccgaggagacaagatggattccttatgggaacagcgggattggggccaagaacaactctatgggctggacggacctttcagagagttactccgctaaactaatggtacctgtcctaacggtatataaacattataaaaactagtttctgccggtttacgcatatgatgtgttttcttgttctgcattttactggtacaactcgagcaaaggggtcagag

SEQ ID NO: 13282 - DNA, 1246 bp, Emericella nidulans
  unsure (1)..(1246): unsure at all n locations
aaaaaaaaaaaaaaagaaaaaaaaaaaaacaaagcaaaaaaaaaaaggaaaaaaaaaaaaaaatcctcccnnannaagagacgtgaagtcnnnttatagggaaaacgagaaaaaagaaggaagaaaaaaaaaaaaaggttttttaaaaaaaaagaaaagaaaaggggggaaaaaagaagaaagagaggggaaaaaaaagaaaaaaaaagaaaacaaaagaaaaaaaaaagaaaaaaaaaaaaaaaaaaagaaaaagaaaaaaaaaaaaaaaagaaaagaaaaaaaaaaaaaaaaaagaaaaaaaaaaaaaaaaagaaaaaaaaaaaaaaaaaaaaaaaaaaaaaaaagagcgaagaagagaaaaaagaaaaaaaaaaaagagagaaaaaaaaaaaaagaaaagaaaaagaaaaaaaaaaaaagataagaaaaagagagaaaagagagaaaaaaaagagaaaagagaaaaaaaggaaaagaaaaagaaaagaagaaaaaggaagataaaaaagagaaagaaaagaaaaaaaagaaaagacgaaagagaaagaaaaagaaaagaaaaagagaagaagaagaaaaaaaacaagagaagaagagggagaaaaaaaagaaggaaaagaagcgaaaaaagaaagaaaaagaagaaagatgaaaagagaaagagaaaacagaaaagaaagagaggaaaaaagaaagtaagaaggaaagggaaaaaaaaagaaagaaaagaggagaaaaaggagaagaagaagaagaaaaagaagagagacgagagaaagaaagaagaaaaagaaaagagaagaaaacatgaaagaaaatataagaagaaacaaaaaagaggaagaagagaaaagagaaaaaaagagaaaagaagaagagaagaaaaaacgaaagagaaaatagaaaagaagaagaaggagaagagaagaaaagaagagaaagaaagaagaggaagaaaaagagaataagaaagagaaaagaaaaagaaaataaaaaaaaaaaagaaaaaaatagatgagcaaaaaaagtaagaagaaaaaaaaaacgaagagaaagagaaaagaagataaaggagaagaaaagaagaagaaaaagaaaagaaagagaaaaaacaaacaaggagaaggagaaagatgaagaaagaaagagaaagaaggaaaggagaagaagaaaagaaaaaagagagggaaaaaacagaaaacagagaaaagaagagaattagaaaacagaaacaagaagggaa

SEQ ID NO: 13283 - DNA, 557 bp, Emericella nidulans
tcgtccctgcagagctatccactttaaaaggcaattaaaaacggcttgatggttgcaccgaggaccaagacgacagagggggcttttaaagaaaaaaacccaatcaactatacacctatcatacaatcctcccacctccaccaatatataacactacacacccatatattaacccaccaaacccccacaacaaaatacaataacctaatcaacttcctatcacatactacccctcaacacaaccaactacccaaaaacaacaactacaattaaaacatacctcccccacaccaattaaaatccacacataaattaccactccccttacaatcactacaataaaactttacacacaccaaccaatcacacaaaactaccctacacaaaaaaaccatacaccataaacaccaacaccacaaactactaccaatacactaaaccactccccactctacacacactatcaccccttaaagccctaaacataaaacctccctccactactaccacaaccaaccacttcctcacacaatactttatacaccacttaccacaca

SEQ ID NO: 13284 - DNA, 490 bp, Emericella nidulans
ggcatccgtcttgcggcttcctcgctgggagcaggaatcgtgggcataccatggcgacgacggcatattattcttcggcgaaaaccaagggcaaggtcggcaatacggcccaacattcggagcaatgatactgtgggatgcggggtgaacttttccaccggatgtgctttcttcacaaaaaatggggtctttctaggtatgtcttagccccatcgggaacagcaacaacgttattcatggtatccaggcaatgcctttaaggaactgcgaaatctgaaagtctatccgtccgtgggagtgaagaagaaccccccggtacatatatccgccaatttcggccaacagccattcatgtttgatattgatgggatggtcaaggtgggtttcagattaatgctatcttttgtaccctttacgtgctaacctccctgatagctacctaaggattctatcccctgctgctatttgcacgaccagcttacccaccata

SEQ ID NO: 13285 - DNA, 821 bp, Emericella nidulans
ctacagagcttgtgtattggcgccgggcggggctacgtggttgactttagacagaatctgtggatgaattttttttatgggtgggggtgggcccttgatggggggccctaccatacaaacatgcctgccaccatatccatgtaccccacagagctgacagctgaagacgtccgcgcccaaaacctagactccagactagtcaggaccatggactcaccatattgatgaggtggacaggacggccgtttatgttataaccgaaacgtacttgtcgtgaccaccactatatcttcattgaaacgcacgaagaatgttaaatggcaggccccggcttccatgaaagtgccaacagccaatacgggatggtatctaatggccttttgtgagggaaacccacagatgaggcggtgattctgcccaacgtgaggattggtgctgctcggattgacgaagactaggatgggcggctcctgagatgctgtcatgagaagtgtggaccgaagcaacggttctagtgaggacagaggcggtatccagcacgaagattgttacggggtaggagacggcgggcgaaagacgctttgttcaagaagaggagggtactgagataacagacgagtttaacctttcgttgctaagcggggttagactcagcggcctcgccgacactttgagcaggatgtaatatccggggggtcatatttgtgaattaccgtcgctttttgtgcgcccttagttttgagagacaccacgcgaaggaacctaaaatggagctttttaaaaggtggtggcaccgggctctttagctcttttttccccgt

SEQ ID NO: 13286 - DNA, 594 bp, Emericella nidulans
catgatgataccgcgagcttacattcaccgacttgcttcataatgagatatacagaccaggcgacggtagtgcgcagcaacaagtgatctaaatcgcctattgacttgtctactcgcctctccacttctcttgggcaggtgctgcggcctcactgtaggtactgtttcgatcgattcctggatggcttgcctaacagctcttggaataggtctacaccctaacccgaatcttaagtcaaacacctttgcggtacgtcgaagccgatgaaacgactcctttagggcacctcttcatccttcatcccgccctgaacccctctacaacccctcgccgcttctccgtttccaaaccggcttgatctacgactacgtgtgcgaaaaagagttcgggcgcagtccgaccatgcccgtttcatcacattatcgcggtatatctattgaaacagacgtccgttccgcgcatctatacgtattccatcaacccaccgcggtaagtcacgatgaacagtggagtcggcgagggagagggtgaacctagccttgatgctacaaacgcccagcaggtgctcgggttactgcctttgcccaaggaag

SEQ ID NO: 13287 - DNA, 724 bp, Emericella nidulans
ctggtcgcagcggctagtagaggctataatctggactgaagtatccctggtcttgccaaaacaagccattacagatagttcttgctcttgtctctaccaagcagaacatttcagattagggactcacttggatagggccctgacagttcaatggtgtgcttattcacactataataagactgctagcacaaaatactatttctatacacctttcagtcctagagactttgctttgagcaggctagagagtgccagacccatgcgcgctcctagcctcggagttgatatctcgtaaatcaaattcagttccaccctaatttacaactccgtattcttccagctctttgggaaggtgggatagctccagatctcccctctctcaatcagacgcttatcaagaccctactggccggcactaacataaagcaccttggcgtagctttcaggcgttcaataccggaacgcagtggtttttggcacaaacgcgacatcgccagtctccagtctagctgcagggtacgcaccgatcttgatgaggaccgagcctttaaggacctcgaatgcgcaggcacccgttgggcttccacgtatttaccattttggaatggtgacggctcataacaaatgtgggagcgtgaagttgtggcctgcgatggtgcattctgaccagcggtggaccatctggtggtccccgggcgagagttaaaactttgggccccagttt

SEQ ID NO: 13288 - DNA, 610 bp, Emericella nidulans
catacgatttaggtgacactatagaatactaggatcttatagaggctggtcgaagagggtccaaaaggctaagagaaactttctccagtgacctctcgctcactgaacagaatggtgcaagcctaaagttcgtcaataaaaaacgcatatccccgagtccgggactagctgatggaacttcaagtgcccttgcaaatgggcttgtgaacgtgcgtcttcttcttaaggaactgccgctctttgctggccttccacccgacattcttcactttttgggtctcaatgcgcagctcgatcattcccgcccttcaccgacatcatcaaacaggactctcagggacgcgaggtctatttcatcgtccgcggcgaggtagaagtcttgagcgagaagaaagacccattgaacgggcgacgacccctacccagcaccattgagtatcccggcttcgaagtgaaggcgcgcttgaaacagggtcagtatttcggcgaggttgtgagcctatctctggcgcctcgctggactgcaaccgtacgctctatcaatgctgtcgagtgtctgatgattagcggtgaggttttatctgaattgtgggataaatgccccaagatg

SEQ ID NO: 13289 - DNA, 722 bp, Emericella nidulans
  unsure (1)..(722): unsure at all n locations
cccgtggtcgaccatgaccaaaggggtgtgtcttcggaatcgtnatcncgaggcgtacgacctgcatcggtggttgggtttcaagcaccgacgaactgaatacggtccaatgagacccatgtcttatctgatgtcctccagaaaccattttgttcaacaagctggcgcaaaaaggaaatcgctcgctgcgttccatatttgtcaggagccggcaggttgatttcatcgcagaagataaccagccaacgaccaatctgattaggagacataaccacgccgcttagtgtcttcttgtactcgcagtactgttcgaaggtcttgatgaggaggtcaggggttgtggcactggagaagttgagaccgacaacctccatattgggtaatttacgaagcgcggcaaacagtgtcatggttttaccagaaccgggaggaccacagaggaacagtggcttatgttctgcaagccacgagtagagaacatctttatgccttacaagtgtcacggtaggaataaccacatccgtttgcgtgatgagtgagtgttgacatcaatggttgccacctgaaactggcagcttgaccaaattcctttgggaggggcacattcaaatcatgattgacaagttcgtcttgattggaagtcctattgagtaagaccggcaaaaattttccaaagaattgcgtctccccaggacatcttcgtaaagacccaccgtgcaaaa

SEQ ID NO: 13290 - DNA, 1449 bp, Emericella nidulans
  unsure (1)..(1449): unsure at all n locations
aaagaaatgaaaaaaaaagaaaatgaaaaaaaagaaaattaaagaataaaaaatcaggaaaaaaaaaataaataaaaaaaaaatataaagaaataacaaaaaaacagaggggatcagctatgagacaggcngaaaaatanaatgaaaaaaaaaaagcntaaaaaaaaaaaaaaaaaaaataaaaaaaaaaataaaaaaaaaaaatattgttttaataaaataaaagaaaaaaaacaaaaaaaaaagaaaggggaaaaaaataaaaaaagaaagagaagagaggataaaaaaaaaaaatgaaaaaaataaaaataaaaaaaaaaaaaaaaaaaaaaaaagtagaataaagaaatgaaaaaaaaaaaataaaataaaaaataaaagaaataaaaaaaaaaaaaaaaaaataaaaatgaaaaatgtaaaaataagaaaaaaaaaaaaaaaagaaaaagaaaaaaaaaaaaaaaaaaagaaaataaaaataacaaaaaaaaaaaacaaaaaaagaatgagatataaagaaaaaataaaaaaagaaataagaaacaaaataaaaaagaaaaaaaaaaaggatagaagaaacatataaaataaacataaataaataaaaagaaaaaaataagataatatatgaaagaagagaatataaaaaaaagaatagaatagaaaagaaaaaaaaaagtataaaaaaaaaaaaaaatagaaagagaaaaataaaatagagaagaaggaaaatagaaaaaaaaaaaaaataaattaaaagaaaaaaaaataaacataataaataaaagagaaaggaaaaaaaatgaagagataaagaaaaatatataaaaaaaacagaaagaaggaaagaaaaagagagaaaatagaaaaagaaataataagagaaaaaaaaaataaaaaaagaaaacgaaaaaaaaaatatacataaaaaaaaaaatcaacagaaaaaagaagaaagaaaaatatagaagataaaaaataaaaaaaaaaagaaaaaaaaaagaaaaaaatgaaaaagcaaaaaaaattaaattaataaaaaattcaaaaaaactaataaaaaacaatggaaaaaatgaaaaataaaaacaaaaaaaaaaagtaataaaaaggaaaaaatacaaaaaatgaaagagaaattaaaaaaatgaaagaaaagaaaaaaagataataaaaaaaaaaaaaaaaaataaaagataaaagagaaagaaagaagaaagaaaaaaaaaaaaaaaaagtataaaagatgaaaagaagaaaaaaaaaaaataacaataagaataaataaaaaataagaaagaaataaaaaaaagaaagaaaaaaaataagtgatataataagaataaagaaagaataaaaaagataaaaggggaggaaaaaaataagaaaatagaaaaaaagcaagataaaaaaaataagaaaaaaaacaaactaactaaaaaa

SEQ ID NO: 13291 - DNA, 402 bp, Emericella nidulans
gcggttgttgtaggaccaacgcaccaagtcggcctcatcgataacgaggtgcgtaaggttcttcatggatagagccgaggtacccaggttggcgatgacacgagcaggcgttgatacgacaatgtcaggatagtccgcaagcatcgctttctgaaccgcatccgagaccttctgtgtaagattgaccgatcgaacatccttgccgcagaacgcagcgaatgtagtgataaccttctggacttgttccgcgagctctcgtgtagggactagaatcagaccagtggtcgctttcatggaagggtcgatctagaaaacattagcacagatccatgctactaaagaaatggaggggagcaacaaaccgcctttttctgaaggatcgtttgtaagataggaaggaca

SEQ ID NO: 13292 - DNA, 546 bp, Emericella nidulans
ggggtcagccttgtgcgctactgcagctacagcctctcacatcgggctgtgtcatgtttgccagccactgtgttgctggctcatgatgtctgaacggcacatacgaccactgtgcgtgaacgctcgggtatcccaccacgaacgctcggaactaaccattcctaacggaaggcctaaatggaacgagcaaactgacttatcatatgccgtgtgagccaacgcctctataaatatatcacagatcaccacatgttgaacacatggaaactgggggggtaacatggcttagctcatgctatggacgggaatttggtgatcgagatagcacatactcacccatacacatattgtaacaccgtaagccttatcaccaacagcacttggtatgcgtgactgatagcggtgacatacatgacacctatcagtgggataacctatgagctcagctgtctgagggaactcactgccagcaggaaaggctaggccttgtgatgcgcatttggctcatcagccgcacgagacatgatagacaagcagctatagact

SEQ ID NO: 13293 - DNA, 527 bp, Emericella nidulans
gaccgtgtcctcatccgtgacggcaccaacgtcgagaccggctctggctgctccatcactggtagctggacttctccgtacgatggggagacgtggacggccactagcgatgtcgatattgaccacgttgtgccactgtcgaacgcatggaatgtatgtacccatcaagcgaacaccaacggcaatagcgccctagaatgctaggaatgctagatgctagggagccaggaatgcaggcatttttcgctaacagtacgcatcgcagtctggagcaagtgaatggacgaccgacgagcgcgaggcctttgccaacgacttgagcattccgcagctgctcgccgtgacagacagtgtcaatcagcagaagagcgattctgggcccgaggagtggctgcctccactcggtacttgatccttgcaatccctgtctatcagtttttgacaagtaactgacatgttcatgcagagtcctacactgtacatacggcaagatgtggacgacgtcaacgtaccatatggactgagcg

SEQ ID NO: 13294 - DNA, 1131 bp, Emericella nidulans
acaacatgattttgttttaaaaaaaagagaagaaaaaaaaagaagaaaagatggaggggggaaaaaaaaaaaaggaaaagaaggggggaaaaaaaaaaaaaaagaaaaaaaaaaggagaaaaaaaaagaaaaaaaagaaagaagaaaataaaataaaaggagatgaagagaaaaaaaagaggaaagaaaaagagaaaaaaagcaaaaaatgaagaaggaaggaaaaaaaaaaaagaaaataaaagaaaaaggaaggaaagaaaaagagaaaaaaaaagaaaaaaatgaaagaagaaaaaaatagaagaagatgtaaatacaaaagataagaaacaaaaaaaaaagaaaaataaaaagaaaggaaggaaagaaagagaataaaagaagaacaaaaaaaaagaaaaaaaataaaaaaaaaaaagaatgaagaaaaagagaaagaaaatagaagaaggaaaaaagaaagagaagaaaaggaaaaaaaaagtgaaacaagaggaaagaaaaaaaaggaaaagaaaagaaaggaaataaaaaaagaaaaagaaaaagaaaaaagaaaataaaaaggataaaagagaatgagaagaaaaaaaaaagaaaggatagagaggagaaaagaaaagaaagcaagaaaaaagaaaagagagaaaagaaaggaaaaagggaggaaaaaaagaaaataagagaaaaaaggaaaaagagaaaaaaatagaagaaaaaaaaagagaaagaaaaagaaaaaagaagagaaaaagaaaaaaaaaaaagaaaataagaagaatgagaaaagaaagaaagaaagaagaagaaaaaaagaagataaaaagaaaaaagaaaatagtagaggagagaagagaaacaaaatgagagagaaataaagaaaagagagaaaaaaaagaaagaacagaagaagaggaaaaaaaagagaagaaaagagaaaaaagataaataggaaaaaaggaaaaaaaaagaaagaaggaaaaagagaaaaaaaaaaataaagaaaaaagaggaaaaaggaaaaagagataaaaaaagaaaaggaagaagaaaagaatataaaaaaatagaagaaagaaagaaaagaaaaagaaaaaaagaaagaagaaataaagaaagaaagaaaaa

SEQ ID NO: 13295 - DNA, 1167 bp, Emericella nidulans
aaaaaaaaagaaaagaaaaaaaaaaagaaaaaaaaataaaaaaaaaaaaaaaaaaaaaaaaaaaaataaaaaaaaaaaaaaaaaagagggaagctatagcaggcaaaattaataaaaaaacacccaaaataaacaaaaaaatgaaaaaaaaaaataaaaagatttttttaaagaagtaaaagaaaaaaaaatggagagaaaaaaagagaaagaaagagggataaaaaaaaaaaaaaaaaaaaaagaaaaaaaaaagaaaaaagaaaaaaaaaaagaaaaagaaaaaaaaaaagaaaaagaaatgaaaaaaagaacaaaaagagaaaaaataaaagaaaataaaagataaaaaaaaagaatagaaaaaaaaaaaaaaaaaaaaataaaaaagaaaaaaaaaaaaaaaaaaaaaaaaataaataaaaaataaaagaaaaagaaaaggaatagataaaagaatagagaaaaaaagaaaagaaagaaaagaaaaaaaaaaaaaaaaaagaagagaaaaaaaaaaaaaaagaaaaaaaaaaaaaaaaataaaaaaaaaagaaagaaaaaaaaaaaaaagaaaaaaaagagaaaaaaaaatagagaaaaagaaaaaagaaaaataataaatagaagaatacaaattaataaaaaaagaaaaaaaaaaaaaaaaaaaagaaaaaaagaaaataaaaaaaaaaaaaaaaaaaagagaaaaaaaaaaaaataagaaaaaaaaaaaaaaaaaaaaaaaaataaaacaaaaaaaaaaaaaaaaacaaaaagaaaaagaaaaaataaaaaaaatataaaaaaaaaaagaaaaacaaagaaaaaaaaaaaaaaaaaaagaaaaaaaagaaaattaataagagatgaaagaaaaaaaaaaggaaagataaagaaaaaaacaaaaataatgaagaaaaaaaaaaaagaaaaagaagaagaaagaaaataaaaaaagaaaagaaaaaaaaagaaaaaaagataaaaaaaaaaaaaataaaaacaaaaaaataaaaataaaaaataagaaaaaaaaagaagaaagatagaaaaaaagaaaaaaaaaaaaaaaaaagttaaagaaaaaattaaaaaaaaaaaaaaaaaaaaaaaaaaaagagaaaaaaaaaaaagagaaaaaaaaaaaaatagaaaaaaaaaaaa

SEQ ID NO: 13296 - DNA, 683 bp, Emericella nidulans
gctgaaggttatgcgaccaatgttgggcagcgtggctttctcctttcaggtggccagaaacagcgcattgcaattttccgtgccgttgttagtgacccaaaaatcctgctcctggatgaagctacttcgggcttggacacaaaatccgaaggcgtggttcaagcagctttggagagggcagctgaaggccgaactactattgtgatcgctcatcgcctttccacgatcaaaacggcgcacaacattgtggttctggtcaatggcaaaattgctgaacaaggaactcacgatgaattggttgaccgcggaggcgcttatcgcaaacttgtggaggctcaacgtatcaatgaacagaaggaagctgacgccttggaggacgccgacgctgaggatctcacgaatgcagatattgccaaaatcaaaactgcgtcaagcgcatcatccgatctcgacggaaaacccacaaccattgaccgcacgggcacccacaagtcttgtaccagcgcgattctttttagaagacccctcaaacaacttcgaaatactcattatggaccctgctcaaatttgtggttccttcaaccgcctgaaatctctacatgctcatcgtcttggcttttcaggttagctggggaggccaccccgcagctgtgctttgctaagcctcagccaatttgcttcag

SEQ ID NO: 13297 - DNA, 1174 bp, Emericella nidulans
  unsure (1)..(1174): unsure at all n locations
ttataaaaactacataaagataaaatgaaaaaaaattaatataaaaaaaaaaaagaagagggaactgtgagtagncanaaattaatggaaaaaacaccagaaaagaaaaaaaaaaatgaaaaaaaaaaattaaaaaaattttttttaataaaagaaaaaaaaaaaaaaaggggggggataaaaaaaaaagaaaaagaggggtaaaaaaaaaaataaaataaaataaaaaaaaaaatcataaaaaataaaaaaaaataataaaaaaaaaaaaaaaaaataaaaacaacaaaaaaaaaaaaaagtaaaaaaacaaaaatagataaatatgaaataaaaaaaaaaaaaaaaataaataaagataaaagaaaaaaaaaaaaaataaagaaaaataggacaaaaaaaaatacataaataaaaaaaaataaaaagaataaaaaaaaaaatataaaaaaaaaattataaagaaaaaaaaacataaaaaaaaaataaaaaaaaaaaaaagaaataaaaaataaaaaaaaaaaaagaaaaaataatatgaaatattaagaaaaaataaaaaatatataaataaaaataatgaaaaaaatacgaaataaaataataataaataaagaaagtataaatacaagaatacaaataaaaaaatataataataaaaataaaaaatatatggaaaataagaaatatagaaagaaacaaaaattaaagaaaaatatgagaaaataaaaagaggaaaaaaaaagaaaaaaaatataaaaacaaaaatagaataaataaaaagtaaaaaaaaacataaataataaaagataataaaagaaaaggataaaagaaaaaaaaaaaagaaggaaaaaaagatgagaagaaaaataaaatatagattataatgaaaataaaataagagaagaaatagaaaaataataataaaaaaaaaaaaataaaataatagaaaaaaaaagatagaaataaaacaataaaataaagaaaatatataaatcaaataataaacaataaataaatagaataaatataaaaaaaaaaataaaatatgaaatgaagataataatagataaagaagaaattgataataatatgaattataaataaactaaagataaataacaaaaaattataaaagatagaatcaaaaattaaagatatagaaaggaaaaag

SEQ ID NO: 13298 - DNA, 594 bp, Emericella nidulans
gacggtgtcgagagggtaagaagcaataccagcaccagtggtaacaccccagccgagcaagaaagagacgaggaaagagccctcaagagcaccagtaaggacaacaggcttgagagagtcgtacattccgaagtacagaccacggtagacaacgataccaagaacggagggaccgaaaccacggtagagaccgacgataccatcggaggcgagggtcttcttgtagacatcaatgagaccgttgaactggcgctcaccaccgcccttggtggacttggcgtcgttggcaagacgggtacgggcgtagtcgagagagtagacgaagagaagggaagtggcaccagccatctaagagaagttagcggctgcatcaaaggtaaaataagctaatacatacaccaccggaggcaaggttaccagccatccacttggcgtatccatcacggtccttcttgtaggcgaacatggacttgtaggtgtcacggaaggcgaagttcagggcctgagtagggaagtaacggatgacgttggcagtgttacctctccagagagagacaacaccctcggcctgagtggtgcggcggaagcagtcca

SEQ ID NO: 13299 - DNA, 925 bp, Emericella nidulans
  unsure (1)..(925): unsure at all n locations
aaactcattgttccttctgaggtcttgacagcgcattcaagtgtttatgaatctctcctcttgcttttcgttttacagcctctcaaaaccgtcagtgaagtcagccgagtcaactaaagccacccgttaaccaccatgggcagcaacagatcctactctcatttctgggacctcactctacgtaaattcttccccaaacgcgaatctctttctggaacgacaacaggctctcgctctcagtcgagctggggtggccctggatcctcccctactgacgaacacactgatggattttataagtactcacaagaggttctcgaacaagagaagcacgatgggtttcggttgcggtcatcggacagtacagcaggctcatacgcgtctgcagtaagttgagcggagtancagttgggctaataccgcaatggctaacaagttagcccatgggcccgagtgatcgtcctccgcttccctacacagtgagcgcgccagattggaatatcttctccccgtacgtcaaatatctggatgaactcgagaatgacagcgtttgcgactggcttggtagcgtcctatctgtatggactggtgtatacgcagtctcaaaggtcgtcgtgatggctttcatgcattatggggttgaggtaggcaaccagctcaatacgctcccttcagatgctgacgaaggggtccggtttattagttggaagacacccccgacggcatcttggctcacacgaaacgcgccgaagaactggtagtctctaattcaatcatagacctgatcgataacacagaaagcttatactatgctgtatatgcaagactcatcatggagattgccgccgccgacctatgtgcttcatttactttagaagttcgtcgactggccaccaacagcactttcatccttcccgaacccaga

SEQ ID NO: 13300 - DNA, 680 bp, Emericella nidulans
  unsure (1)..(680): unsure at all n locations
aagccttgcgcctgggaaacccggacattgtatgggctctcagcagcgctgcgcagggtttctgtggcaaatcgccggacgctttggcgaagcatcctgtcaatatcaatgctgctcctgaaacagaaaaagacaagacgaagttccccggattgtatctcgaatgaggggaccgatttccggcgttagtaagaggtcacgtgaaagatggcgtgctagctagtatgcaaggcatttcggctcaggcaaaatacccagtcaacaatttgttgcctggaggtggaaatacgagacccttgattgcgagcagtgtgtgattaggatagctgaggcattgtattcatgtatcaggaacctgatcgtcaaagcgttgcaggctgctgggctgggcacgtgctgccctaacccttatctatctactggtttggggnggatagattatgctccgtcccgtgactcttagcaacggttataacgagtagtggcagcagccaacgaacttctttgctgccgacctcacgccaaacaaaagcctttacttgaaacaggctgatcagcatatcangatatactaggatgagttgatattatcactcgccgcagatactgacccgacaccctactgngtcaatacccttgatcaagatgccgagtgagtttacgccggtcacatccaccgc

SEQ ID NO: 13301 - DNA, 1064 bp, Emericella nidulans
caccgggtgaagaccgtgagttgcttgataaggaagaggtctttgtttagtccactgggaaggcgatgcagactgcgttgaaggtggtaaggtggtttgtcgaggcactttctccttgcttccaatttccttctcattctcttcttctctattctcttttttttccttttctttcatctttctcccctcctctttctctctcttttatattttcacccctttgtttttctcttttctcatattccttcccttcttccaatcctccctttttttcctattcctctatttctccttttttctcctctttttttttacttctctttcttttattttttttcttctctttctcttcctttttctctttcctctttttttctttctttccttttctccttctctttacttttttccttcttcccttctctttccttatttttcttctcttccctttctattttcttttttcctacctctctctcattttttttttttctcttcttctctcttcttccttttcttttactcttttacctttttcctttttaccttactaatcttctattcctctttctttctattttcctcttttctctttttttttctttctttctctttacctcctttcttcttttcctctttcttatctttctccttcccttctcattcttctctttatcttttttcctctctctctcattctccttttatcttccttttctttttttactttttcttcttttcctctctctcacctttttccatctcacttccttctccttatcttttctcttcatcctccctttcttcctttttattctctctctctctcttcttcttttcctcccttctcacttctttttctctcttcttttctctctcttctcttttttactctctcatttacttcttcttcttttcttttcatttttctctttcctctctcttttattttctcttcttcatcctcccttccttttcaccttctcttctcttctctcatctacttctttcttcccttttcttttcctcttcttttctctcctttttccccctttctctctctt

SEQ ID NO: 13302 - DNA, 1208 bp, Emericella nidulans
  unsure (1)..(1208): unsure at all n locations
aaaaagaagagaagaaaaaaagaagaaagaaaaatgaaaaaaaaaagaaaagaaagagaaagaagaaggaagaaaaaaaaaaaaaggggggaggtgtgaaaaacanaaatggatgaagaagagaaggggagagaagaaaggaaagaaaaaagagaaaggaaggaggaaattaagaatgaaataaggagaaaaaaataggggggagaagaaaaaaaaagggggaaaagaaaaaagagaagagaaaaaaaagaagaaaaataaggaaaaggagaatgaaagggaaaagaggggggaaaaagagaaaaggaaaagaaaggagagaaggaggaaggaaaaaggaagaaaaaaaagaaaagaaaaagaaaggaagaaagaagaaaaaaaaaaaatgggggaggggggaaaaaaaaaaaggagaataagagggaaaaagaaggagagaaaaaaaaggagaaaaaagaaggaaaaaagaaagagaggggggggagaagaaaaaaaagtaaaaggagaaaaaaagggaataaaaaaagaaatggtaaggggaaagaaaaaaataaaaggagaaaaaaaagaggaaaaaaagggggggaaagaaaaaaaaaaaaaaaagggaaaaaaaagaaaggaaaaacgaaaaagagaaagggagaaaaagaaaataaaaaaaggaaaaaagaagagaataaaaaaaaggagggaaaaaaaaaaaaagaagagaagagggaaaaaaaagaaagaaaagaaaaatagaggaaaaaagaaaaaaagggaaaaaaaaaaaaagagaaaggaaaaaaagaggaggaaaaagaaagaaaaaaaaggagaaaggaaaaaaaaataaaaggagaagagaaataaaagaaaaaagaaaaaaaaaaaagaaaagaagggaagaaaaaaaaaaaagttgggaaaaggaaaaaaaatggggaaggaggaatgagagaaaaaaagagagaaaaaagggagggagcgatggaaaaagaaagaaaaaagaataaggaaaagggggaggggaaaagggaaaaaaaaaaaaagaaagaaagggaagagtgaaaataaaagaaaaaaaaaaaaaaaggagaaggtaaaacagaaagataataaggaggaggaaagaacctcttttaataaaatntaaaaaaaaaaaaaaaagaaaaggagaggggtgatagaggggtgggtaagaggaaagaaagagaaaa

SEQ ID NO: 13303 - DNA, 887 bp, Emericella nidulans
  unsure (1)..(887): unsure at all n locations
aaaaaacgaaataaaaaaagaacaaccaatcaataaaaaaaaaacaccaaaagtggaaaaaaaggaaaacccccctaaaaacaaaaaagaaagacaaacaagcaaaaaaacaaacaagaccagcaacccaaaaaagaaaccaaacaaaaaaaaaaagaacagacacacaaaaaaaacacacaaaaaaaaaaacagagagaacaaagcaaaaaacaaaaggcgaaaaaaaaagaaaaaacacaaaagagaaaaaaacaacaaaaaaaaaaaaaaaagaaaaaacaaacagaaaaaaaaaacaagaaaaaaacaacacaaaacaaaaaaaccaacaaacaaaaaaaaaaacacaaaaaaaacaagaaaagacaaaaaaaaaaaaaaacaacaaaaaaaaaccaaaaaacgacaaagatacaacaaaaaagaagggcaaaaaaaaaaaagaaaacgcaaacaaaaaaaacaaccaacaaaaaaaaagaaaaaaaaaacgaagaccaacaaaaaaaaaaaaaagaaaaagacaaaaaataacaaaacaagaaaaaacacaaaagaaaaacaaacaaagaaaaaaaaaaaaaaaaaaaaaaaaacaaaaaaaaacaaaaaaaaaaaaaaaccacaaaaaaaaaaaaaaaaagccacaaaaaacaaaaaacaaaaaaaaaaaaaaaaacaaacaaaaaaaaaaaaaaaaaaaataaaaacaaaacaaaaaaaaaaagaactaaaccaaaaaaaaaacaacaaaaaaaaaacacaacaaaacaccaaacacaaaaaaacaaaaaaaacaaaaaaaacagaaaacaaaaaaaaacaaaaaaaaaaaaacaaaaaacacccacaacaaacaggggnnnacaaaacaaaacaacaca

SEQ ID NO: 13304 - DNA, 818 bp, Emericella nidulans
gttgttggagggggagaagaggagagaggcgtttgcgcggtttgcgtcttcttcttgttcttcctcagaaacaacggcagaaggaatcccttacccggattctttcgccgaattggaccaccccgcgatgaaattcgtattgtgctacagtgggtttcggtcgcctggggatcgatacagggctttttatgaggctccgccgattcagacgcctatcctgcatgtgctgggctctctggatgcggttgttgatgaggggaggagtcggtcgcttgtggaagcttgcgctggggatccggagagcgagggcaaggttgtttggcatcctgggggtcactttctgccgagccagcggccttatctagatgctgcggtaaaatttattagagagtgtttggaaggtgggcaacaagggggcaaggataaggcggaggaagaggatgttaatgacatggacttgcccttttagagtcggcagtttatttcgtagatcttttgggctttcggcttatacctctagattgtttatgttacttagatagatagacagcatcctacgcgtgctttatgcgcatcaatagtgagcattggtcatgcggattagcaatcctactatgtaaaggatgtactttacacccgtttacgcatctccctccgtcgtgttggtgttctttcgaagttaatcaacgagccttcgccttttcccgggtgggcaaaatacgggccatcatctcttctttggtaataaggtggtcgatgcgctccagtaggcccaaaaggtcctcatgtcgctgctccactcatttagcacatcgtca

SEQ ID NO: 13305 - DNA, 1193 bp, Emericella nidulans
  unsure (1)..(1193): unsure at all n locations
aaaaaaaaaaaaaaaagaaaaaaagaaaaaaaagaaaaaaaanaaaaaaaaaaaaaaaaaaaaaaaaaaaaaaaaaaacaaaaaaaaaaaaagaggagatagaaacaaaaaaatnaaaggaaaacgggagggagaggaaaaaagaacagaaaagaaaagaagaaagttttaaaaaacaagaaagaggaggaaaggggggaaagaaaaaaaagaaaaaaggggaaaaacaacaaaaaaaagaaaaaaaaaaaaaaaaaaaaaaaaaaaaaaaaaaaaagaaaaaaaaaaaaaaaaaaagagaaaaaaaaaaaaaaaaaagaaaaggaaagcaaagaaacaaaaaaaaaaaaaaaaaaaaaaaaaaaaaataaaaacaaaaaagaaaaaaaaaaaagaaaaaagaaaaaaagaaaaaaaagaaaaaaaacaaaaaaaagaaaaaaaaaaaaaagaaaaaaaacaaaaagagaaagaaaataaaaaaaaaaaaaaaagagaaaagaaaaagaaggaaaaaaaaaaaaaaaagtaaaaaaaaaggaaacgagaaaaaaaaaaaaaagaaaatagaaccaaacaaaagaagataaaagaaaaaaaaaaacaaaaaaaaaagaaaaaaacaagaaagagagaagaaacaaaaaaaaaaaaaagaaaagagaaaaagaagaaaaaaaaaaaaaaaaaaaataaaaaaggagaaaacatagaaaaagaaaaaaacaaaaaagaaaaagaaacaaaaaaaaactactaaaaggaaaaaagaagaaaaaaagaaatagaaaaaaaagataaaaaagaaaaagaaaaagaaagaaagacacaggaaagaaaaaaaaagaaaaaaaaaaaggaaaaaaaaaaaaaaaaaaaaagagggaataaaaaaaagaaaaagacaaaaaataaaacgaaaaaaaaaatgaaaaagaaaaaagaaaaagagacaagaaatggaagaaaaaatgaggaaaaggaaaaaaaaaaaaattaaaaaaaataaaaaaaaacaagcgaagaagaagaagaaaaaaaaaaaaaaaaagaaaaaaaaaaagaaaacaaagagaaaaagtaaaaaaagaacaaacaaaacaaagtaaataaaaagaaaaaacaaaacagaagaaaataaaaaaagaaaaataaaaagaaaatgaaaaaaaagaaagcaaaagaaaaaagaa

SEQ ID NO: 13306 - DNA, 857 bp, Emericella nidulans
  unsure (1)..(857): unsure at all n locations
caaacagngaaagaaagaaaaggggggggtttaataagaagacgggggagaccccccaaaaacaaaaagntaaggaaaaaagcaaagggagaaagaacactccgggctaataaaacgccgaaagaagaaaaacaagcgaagaaaaaagagccaataacaaggaatagaaaacccaccaacccaacaggaaagaaatagtcagaaaaaggagaacaaacaaatattaaggcaaatgttaaaaaaaaaagatccacaagtatgaggacaggaacgaaacaccaaaaaagagaaacctaagatggacagagttgaccagttaaaaaaagaggatatacaaccccaggaaacacaaagggaaagaataaaaatcaacccaacgcttaagagcgaaacaaaaaaaacaagaagaacgagggaaagaaataatcgtaaaggaaaaacacgagagaaaaaatcaagtaaaacaaaaaaagcaaagaaaacgaaaaaaaactaaaaagtggtaaaaaaggagaaaaaaggaaaaaaaaaaccaagcctttaaaaaaggaagggaacaataaggaggagaaaaatagcaatatcaaaaaaaagaaattaacaaggacggaaataaaccaaaagaaaaggggaaaaaactaaaactaaaaaaaccaaacacataagaaaaacagtaatttaagcaaacaaccaaacttgaaaaaaaataaaaaaataaaaataaaaaaaaaaataaagacaaaactactaagaagaacataaaaaaaaaaataaaaaaaaatgacgaaaaaaaaaantaaaaaaataaaagcaatataaacaataacaataaaacactaaaaaaaaaaaaaacatca

SEQ ID NO: 13307 - DNA, 710 bp, Emericella nidulans
aactgaagctagatgtgacctgctgaccgtgcagaatatgaccctcacttttcaagcacaacgctacgagatgcgcatcatccaggacccccaatagtgcggcccactgcactacctaaggaggaagcaggatgtcggagctggattcactatgtatattacggttcagaatctgcatgaatctgacaatcctccgtcctgcagacttgcagctccggagagagctattggatggcggacgagcttggagaccttgcagagttcgactggggtgtgcgatcaccgcgtcaaggaggcaggccgggtgtgatgaggtgcatctgcataaccttggtgaatccttcacactgctgccagatttctcagcccggcggttgttgtcttttgaggatcgtcaccggctgcacgaaatcttgctctttccagtgcctactgagccattatatagcacgagaaccgctttttcagaaacacaagcaatcataaacaatcgagatcccatcaacctccactggtggtacgtaagcacgcgagttaactcgagtctcgactgaacaacagcctcccgcctgggacagtacgtattctcagtttagcgccgacattcccaaaccacatcaaaaccccacacatcctccacagccgcatccaatcgacgcaaccacacgagataaagagggggagacatcatggatccatcagggtattag

SEQ ID NO: 13308 - DNA, 1070 bp, Emericella nidulans
  unsure (1)..(1070): unsure at all n locations
aaaaaaaaaaaatgaaattaaaattttaaaaccaaaaaactcataccccggggggggaannnanaaaattggttggttttaaaaaaaaaaacgggaaaaaaccccccaaacaaaaaaataataaaaaaaaaaaattaacaaaaaaaaaacaaaaaaaaaaaaaaatacaacaaaataacaaaaataaaaaataaagaaatcaaaaaaaaaaaaaacaagaaaaaacaaaaaacaaaataaaacaaaaaacaaaaccaaaaaatataaaaataaaaaatataaaacaatcaacggaaaaaaaaaagaaaaaacaaacataacataaataaaacaaaaaacatataaaaaaaaaacaaaaaaaacaaaacaaaaaaaaataattagataaataaaaaaagacataaaacaaaaaaaaaaaaagaaaaacaaaaaaactaaaaaagaaggcatacaaaaaaagaaaaacatcaaaaaataaaaaaatagaaaaaaaaaactaaagagaaaaaaaaacaccaaaaaacaaacacgacaaaaaaatccctaatgacaaaaatgtacaatataaggaaagaaagaaaaccttttaaaaaatacataataaaaacacacaaaaaaaaaaaaacaaaaagccaaagagaacaatgaaaaaaaaaacaaaacataaaacaaataacaatagaaaataataaaacaaaacaatttaaatacaaaaaaatgaaaaaataaaaaaaaaaaaatgaatacaaaagacaaataaaaataaatacaacaaaaactaacaaaaagatatacagagaaattcaaaacaaagaatactcaagaagatcagaaaataatacaaaataaatcacaacaacaataaaaagaaacatcaatgacaatataaagagaataaattagaaaaaacaaaataaccaataataaacacaagaggaaaagaacaacaaacataaaaaaaaaaaaagaaataaagctttatataataacaataaataataatgaaaaaataaaacaaaaaataaaactaaaacaccaataaacaaaacagaaaggagaagagaaaaata

SEQ ID NO: 13309 - DNA, 1069 bp, Emericella nidulans
aaaaaaagaaaggaaaaaaagtggtggggataaaaaagaaaaaagggggaagaaacccaacaaaaaaacaaaaagaaaaaggaaaagaagaacaggaaagggaaaggaaaggaaaaaacaaaaggggaaaagaaacgaaaaaaaagaggaaaggagcaaaggaaaaagaagagaaagaaaaagaaaaaagaagagaaagaagaaaaaaacaaaaaagaaaggagagaaaaaaaaaaaaagaaaaagaaaaaaaaaaaaaaaaaagaggcgaaggaaaaagagaaagaagagagaggggaaaacaaagaaagaaaaaaaaatgaaggcaaggaacaaagagaagaagaagacaaaaaatgagaaaggggggaggaaaaaccgaaagaaaaaagagaagagggaaaaaaaaaaaaaaagagggagggaaagaaaaaaataaaaaaaaaagaagaaataaggaaaacaaaaaggaaaactagaaaaaaaaaaaaaaaaaaagaaggaaaaaaaaaaaaaaaaaagtcaagaaaagaaaaaaaagaagaaaaaaggcgagaaagaaaaaaaggggaggaggcaaaaaaaaaaaataatcaaaaaaaaaagggggaaaacgagaaagaagggaaaaaagaaaaaaaaaggaaaaacggagaagggagaaagaaaaacgaaaaaagaaaggaaaggaaagaaaaaaaaaaagaaaaaaagaagagaaaaacaagagaagaagaaaagaggagataaagggaaaaaaaaggaaagagaaaaaaaaagaaaaagagaaagagaagaacgaagaaaagaaaaaaaaaaaggggaggcggaaagaaagaaagaaacagaaaaaaaaaaaggaaaaaaaaaaagaaagagaggaaaaaaaaagaagaaaggataaaaaatgtaaaaaaaaaaaggagagaagacccaaaaaaaaacaaaacgaaaaaaaaaacaacggaaaaagaaaaaaaacaaagagagagagaaggaggaaaaaaaaaaagaaaggagggaggggtataacgaaaaagagcgcgaaaaagggaaaagagaaaaaaaa

SEQ ID NO: 13310 - DNA, 467 bp, Emericella nidulans
tcacgcggctacgtcttggcaggcacccgcggggctagcttgcgaatgaccttctctactaacaaagcatttttttataatcctacctactggccacataaggggtatacatgtaggaggggggtttatgcctattgaggtgatctatatataacaagggtgctaggtatgtatattttgcctacatgggatctggcaccgcacaccaactgacggactgagggacccgcggatcagctataacaacggtgagctctgatctctaaaggctcacgcaggtgctaaagcacgagcctacattaccgacgcgagacaccagttcagaggaccgggcccgagatacacaagaggctctgtcaggtcagcatacactgagacagacactggttattgaggatgcatctgggattgggaacacttgcttgacacactatctacgctagggtaactgagctatggggcttggc

SEQ ID NO: 13311 - DNA, 1221 bp, Emericella nidulans
  unsure (1)..(1221): unsure at all n locations
agggtctcctatgtaccaagaaaacagaaaattaagggtctcacaaaatagggaatagcaataccccatatttccaaacgggcaacatttaaattgacataaggctcttaaagaaatgtcggcaaaaggcaaggtttgaatggtggtgggtttagaatagaaaccgtgtatagccaggtggcgggaaaaacgaaagcaagggttcctagatatttgtgccgcccccaatcaaccagctctcattctcttttggcgaggaacatgctatcaagctgagataccgactgttgtaacacctaagaggtgccgtcaacgtcgccaagggaaaacaggagccctctttgaagctaatggtggcgaatatcggagaggtatagtggtagttgaccagggcaaacgctagaaagcaaaatattagaaactttcttcctgttgacgaacgatgctggtgtcgtaacccgagctcctggttgaggcgcaccggctggaaggtccagaccggctttaacgacgatccttcgtcgcaaccgatgacggcaagatgaatggtgacttggaggacgttgttgtcaagctgccatgcataaacttggttgatggcgattgctttgacttcgagcaggagcttgcctgggtctggggagaaggttagacgggtcggatgagtgctgctccttgcgtaaggagaattgctgctagatggttgtccactgaatgcaataatacgagcaacaggagagatcttttgtctttcgatggcaggaagaaccctgatgaggaagtgaaaaatgaatgccatttatctcagtttgagggtgttttatccaggacaagcgggctttagctacagagtccgggtgggtttgaatgcaacgggcttaacaagtctcgcgggcttcattccaggtgtcagtccaggcgtccagcatatatggctagtgggtagtggtcaggactaatcctgttgaccatgcgacggttagcctccccttctgcccatacgcctgtccaggggcgccttgggcttcgaaactccacagagggcattcgtggtatgcctacagttgcatctaatcactgagaccccgaagtgacttttttagttgatctgtacatagttagcagaacttcagtttgggacaagggggcgcaagggccaangtccgaggttagccctacttttccgtacagggagtaaatgaagagaacccggtttgtctg

SEQ ID NO: 13312 - DNA, 412 bp, Emericella nidulans
  unsure (1)..(412): unsure at all n locations
tcctgtttcctgctgtacacggcttatgcgggctctagcatgttcggattgtctagcttctactctgaattgatgaagggtgttggggcagccagtcgactttttgagctacaagaccgccagccgacgatatctcctaccaagggcacgaaggtcgtgagtgctcgtggccctatccggttcgagaacgttacattcagttatccgaccagacccgccgtccctatcttcaaaaaccttaattttgagattccgcaaggcacaaatgttgcgattgttggcccctccggtggaggaaaatccacaattgcttcgttactactgcgcttctatagtcctagcgggngacgtgttctgatcaatggcagagacatcaaggagatgaaccgcaaatcactgcgtaggaaaattg

SEQ ID NO: 13313 - DNA, 1132 bp, Emericella nidulans
  unsure (1)..(1132): unsure at all n locations
ggagaagcatccaagatgccaacccccttgaccgtgcggtctacaacaagtcagcaattgttcgatctccagaatgagctccaggcagcaagcgaacaatgggagaacatacaagcaagttgtgtaggagcagccatttcaagtcctcaaatatctcaatcgtaaacccagatgtctaacggtagccaaatgcgcgtgtggctccgaatccagaagtcgagctctgctgagctaaagctgaagtcaggctccccgccaatgataaacagaagcgaaaacgcgatcgatccgataccaggtaccgggaacggaacggaatgggtagacgagacgacgtgaactcttatcgaagagatagagggccgactcgaaggctgtagctatgcgtggcgagcagttgtttctctgtctcgcggcgacacgactcgcacaaagaaccttggaacgaggtcaaagacggcggcacttgaacttggcaggttgaaactcttgtcgagtctccagtccggattgtttcagatagatcaatgctagacaagtcaatgccagcaggaacagaacaggacaggacgactgtaggaggggggggtggtgaatgnnnaggnnnngngngnggtggnngtgtgtntgtctgtttgcggtgtgtgttnttggtaaaaaaaanttctaattnggcaattttgtgaaaaggcaggagcccatcctacgtgatatttcatactgcagcagtattaagaagcacgccacttgattttcttcatcattcaaatgtccttcctgtaatttgcccgaacgaaaatttgatttctattctacttcgatcggttgagatcgttcttgatgctggccatcttgtggatggctgatctttgccttcaattgtaaatttgtttttcttgcaaatttgtccataataacatcacgttttcctcaggaatgtccgttgctatgtatttttccttgacgaagagacttgcttcatatatttatattgcctgggtggttttcattcaggccttcatccatgctttttctattgtttgttttcggcaatattttttttgagcttatacgttttacttttttccgtggtctctattttgtcttttccttttttttttcgtatctttca

SEQ ID NO: 13314 - DNA, 580 bp, Emericella nidulans
ttcttatcttcgaaagacgtcgagatcatctccagttcctcacgttccatgattctgaggagttgcatacgtacattgtcggcggactgcagagatcgcaaggaaaggaaatggtcgtggcaccactgcttggggttctcctgcgcctcagggctcttgaacgcgtgataggcgttaagcaatgtcagatgatcgccatcgggatgggcaaacagattcttcatttcatcagcgcgcttccgctgggatgccggtctgacgaaaatttggggcactgagagcaatgctgtgatggacaagatctcatttgagcaatagaactccggtgagctgataagcatgaccgcaagtgcagggtctagcgggaactctgaggcaaggcggcccagcggggtgaggttaccgtcatcatcaaggcacgcaaggtagttcagttcctcgagagccctcataagtgtctctggcgctggaggatcatcaagtcgaaatgcaccaagtcatcgattcccaacttcttaagctcaagcacggtggatgacaagtttgagcgtagaatttcgggatacgtttgatcgataag

SEQ ID NO: 13315 - DNA, 525 bp, Emericella nidulans
gaccgctaggacattagggacgaccatatggtgacgcccggtagtggatactatggggacgtggtgctatgggaatacagacaattgcgggtcctgacgggtgttgtgagatgctacgcgcaaaaatcggttgggcactggtccgcgagacctgtcatggcttcaaccgcgagagccaggtaatggccaggcggctgtcctctgagcgagaccactcactgtatcctcagccagacttgtaacgagaacttccggagctagtccttcgcttatgcctatcggaggccctgctgcccagctagttgccgaccccaatatctgagtgaagccagaaccgagacgatttgggacgtaccaggtgcttaaggcgacgccattgaaccagaccggatatgccctgtcaaacacgaccgcgacagggcagaccatgcgaacgccaacagcgacagacaccggcgtggcgtatcggatatgtacggaacggcctttttggcatacacgccattgggtcgaaacggtggaatg

SEQ ID NO: 13316 - DNA, 896 bp, Emericella nidulans
tccaactggtaccgccagcgttgccagcattgtcatcagacgctatttcgttccctgaaccaacactataaccgtgcctaaaagcattaattcattggctggaataataatgctcatgctcgcaagtcgcaatcaaagcagcggtccaagattcatacaaatagcgttgctgattcggcggcttggcggaggctgtgcaagaccacaatccccaccgcacctttcttcaattcgggcacatgaaaaatgaagcttcactattagcttcactattatttttgttctgcttgtccattggtgcttatctgcagtgctgttcaaagtcaaggctctgagatcctctactttgcgctggttaagatgtccttttcctgatttgggtggagttgcagtatcacaaaatcaatgggcatgcggcaacgcgcactcaaatctagacggtctggagattcttgttttcggggtgtgaccactgacgatcatactatcgcctcggtacagcactcgagccttggaagctgccgactgcggttgagttgttgccactgcaggatgcatgtatatctgcctattagtcaagatgaggtcttttactccaactctcgaaaagcgaggaccttagtctttgtctatacggattcgtatagttatgttaattacaaaggctacgagtccaacgccagcatgacgtgtttccgcctcttcagggctcaatgccgactccttaacccgtgataggcgagttcgccaaatcccgtacgacgggagtcctccgattaggtatctctccggtggccggaaaatcgctgatcaacgtgaaacgactatgagattatgttataattaacctctgcagatgactttaagccctcaacacatacatctttaactcgact

SEQ ID NO: 13317 - DNA, 626 bp, Emericella nidulans
gttcctccttcctggccctctcgtcgtcggtgtcgtcagagctctgtatgacgcaaggtcagatccttcacacattgtgagtataaatggccaacatacctcatcgtcggtataaggattagcatcagatccgctgctgtagtcgtaattcttctccctcttttggagggctttgcgaacttttttgccaagaatgcggcgagcttccttctccctcttctcccttaactcctcttcctcataatccttctcgtttttcaggtcaaatatgtttgccttgagttgatcttgctttattcgtttctctgccgccttcgcatcttcgttctcaccgaatagatcgtcgtgctcttcatcatcggcgaaccggtcctcttcaaaatccatatcgtcagcttctaggccctccgccgctggagtaccctgcttcccagcgtagacttttctttggtttgcaaatctctccagctcctgtcgctgggcttgctcctgttgcttctccatgaaccacctaggatctttaatcttcttggccatgaacttctctgcttcttcgatagtcaatgttttaaactgatttttggcgttaaatctaatccactttcactggtttatcaaaattttcc

SEQ ID NO: 13318 - DNA, 536 bp, Emericella nidulans
  unsure (1)..(536): unsure at all n locations
aatcgcggccgcataatacgactcactatagggatcacgcagttcctgaacctcctggttggaattctcgagcatctcccgcagctccacgattcccatttgcagatttgcattatcctgtagaatgtccttcacaaagcgcgataccacgcttgatccgccggcccgagtgaggttctgagcagccgccgctcccttcagtcgaccagctgccccatcaagctcgcgctcgaccatacgccgcctttccatgcgctgaaccacctcagcatgccgttcgcgctcctcacttgcttccttttccatcctatcaacctgatcgttcaggtctcgaatcatacactccgctttcttccatcggtccatcgccgacttcgagtcttcctgagctgtcaacaggctgtcctgcaacttcgactgctcggcttccaagatagccagctgtgcctcgacatcagcagcacgcgcacgcgaagcggccaatgtgcgtagcntccgcttcgtttctctcgagtttcaaagccaacgttttggcg

SEQ ID NO: 13319 - DNA, 1033 bp, Emericella nidulans
aatattcaacaagagtattaacagaaagccgcaggagagtagtgcacgactagatgtgacatgattattagcggctatctcttttctcggctctcactgcctctagaccagccctaacctcaaggtacacagaccttagctttgcaagacagacgtgacctagcaccggccagaactgatgtttcatatctatatcagccccggcattcctagattgcaatacgaaccgtctccatcgttacctgaacggcaatacgaaccgtctccatcgttacctgaacggctcgtccgcaggagaaatacaccgggagtatcgagttagagacagtctcgttcccatggcagctgcccagctcgtggtacgcgatattcgcatagtgagcccttgtttcactccagttggcggtacagacatgcgatagcttactgctgcttgatacgacttcaaagaatgcgtcttccacgaaaacaaggttcacacgccatcaattagtcaagaagttccaccccgcctgtagtttatgtgtttaatctatgctcggacaacatacgaatagtatccggaatcttctaaactaagtcaccctctgatccgggaatacacggacacctgaactctggggctggactttcaatgggaagttttgaaggtctaccctccatttttattttttggggggaaaggaaaaccaccgttgggattttttggaccaaataggggcatggaaatggctccaccttaagggcactgggtgataaaattttccgcccttcccttgggtttccaaccctttagcccttcctaaaggttcggccgaacggcccaggaaccatggcgagttcttcttattaaacaggaaatctgctccctttaaaaggcttccgggattgtttttggctaattcccctccgcacatactttactacaattacacactcctatctctctaagtctttttataattttctcacttctcaccttctttaccctttctttttttatactatactttctctcctgcttgtaccatcc

SEQ ID NO: 13320 - DNA, 1004 bp, Emericella nidulans
aaaaaaagaaaaaacaaaggggaggggaaaaaaaaaaaaaccgggagggaccccacaaacaaaaaaaggaaaaaaaaaaaaaaagaaacaaaaaccaaaaaaaacaaagaaaccaaaaaaaaaaaccaaaaaaaccaagaacaaaacaggagaaaaaaccacaagaagcaaaaaagaaaaaacccagaaaaaccaagggaaaccaaaaaaaaaaaaaaaagaaggacaaaaaaccaaaaacgagaaacgaaacaaaaaaagagaaacaaaacaaggaaaaccaaaaaacccaaggaaaagggccccaaagaaaaacaaaaggaaaaaaacacaaaaaaaagaaaaagagaaaaaaaaaacagaagcagcgacaaccaaaaaaaaaaagaaaacacaaccaaaaaaaaaaaaacccaaaaagaaacacaaacaaaaaaagcaaggcgaaaccaaaaaaaaaaagaacaaaaagaccccaaggacacgaaaagacagaggaaaagaaacggacaacacgtgaacaaaaaagggaccaccccaaaagaagaccaagaaaaaaaaaaaaaaaacgaagaacaaaacaaaagacaaagccaaaacagaagcaaaaaaaaaaccccagaaaaagaccaaaaaaggagagaacccacaaaaaaaaccaaagacaatacaaaaagaaacgagagagaaaacaaaagaacaaacacagaaaacggaaagcccaaaaaaaaaaaagaaaaaaaaaaaaaggagacaaaaaagaaacccacacaacaaaaaaaacaaaggggaaaaaaaaaaagaggcgaacaaaaaaaaaccaaaaaaagaggaaaaaacaaacaaaaaaaaacaaagacgcgaaaaaaaaaaaaaacaaagaaaacaggaaagaaaggaaaaaaacacagaaaaaaaaaaggaaaaaaagaaaaacccacaaaagcgagaaaagaaacaaaaacaaaaaacaaaaaaaagaaaaaagaaaaaaaaaaaaaaaa

SEQ ID NO: 13321 - DNA, 720 bp, Emericella nidulans
tacgatctcatctatatgggagacccatatgcttatggatccgctgcagagtcgatccctccacgactggcgttgggctaatggcgtcagtaggctaccgtaccagactcttggttttgatacagaggggctcttgcaggctgtacagatgactgaaatcgttactgacgtaagttccacccatgagactcctgactgtaccaaaattactcgtcttgtcggcccattgtagtctgagccgctagcatatccgagatttccccggtatcaacaaaagtacggactgcagatgtaaccgttccagcagactgctgctcacataccacgcgcatcgtggtggttagtggtgcttgtactgaagggtttgaattcgggtgttggtgttgccggcgggtccaagcaaagagttgacttcggatctgcaacgaccaggtacaaattttggccccggtgagttgcatcttgctaggaatctctgcttggctattccggagaattatcgcatgtggagtctgtggtaaagcttggttcccactattcatgggactcttgtttcaggttcaggcctggcttggtacattgaggctttgagttgagtcggtaggcaaccagtaaccacaggccagaagcttcactgacgtatttctatttgacgatgcagtcaggcggtttttctagaaatagttcctccttgcttgtgataagtgcatggttttgccg

SEQ ID NO: 13322 - DNA, 622 bp, Emericella nidulans
gagattagtgtatgaaccaattccatggagccgatacatgcaaatgacagccaggatcctgctttaattcctgataatcctgcatatagcaggcggggctcctttatgagtcatcgtagtgctataggcacgccgcttgaccctgcaagccatcactgtggacagtcatgtgatcttgagtcatgggcaatgtacgaggataagcacacctgacgatcagggatctcaacactgtatggctacattgctttagccatagcatttacttacagcgttctactacaaaccacgataagcactggaacaatctgatattctacatatcccaagagaattggtgccacaaaacaggccgagtggtccaggctgccgacctaattcttccaccctaccaaaccattaataaatggccgtttaacttaatctccaggtaggcctttgtcatccgaaactttccctgcttcggatcccacaacaacttcacgaaccaattacatctaatactcttgggatacaggccctcgaccactgttgccgtgtatcgctcatagagcttgattccatcagcgcaaagaagagaactgctgagccggagcaaatagatttgaatatttggattggc

SEQ ID NO: 13323 - DNA, 782 bp, Emericella nidulans
ccgcaagatcagggtaagtctttttaccatttcaacgtgcaactctgctaacgtacccaaatatgggatcttcgaatgggctcgatctacaacgcctttggctatgataaaccagtcaccagcatgatgttcgacacgaagcggaattgttgctgcagctggagagaacgtcgtcaaagtgtacgacaaagcagatggccaccactgggactgtggtgctggggtcggagccgacgaaacaggacctgaccctgcgatcgttgagcgtgtccgactcaaggacggattccttattgaaggccgcagggacggcattgttgcggcctggacttgttaaccgcgcaggacaaactcacgtacagataccatctcgtacatgttactactatacgcaccggcattgtttactcgcatctgtatattacatctattcttggagtcgatagagggaatgggatggctgtccggtcggtcatctgagagcttgaaaccgacaaaggtcgcagttatggttacaataaagcaaatgtctgcggaacctgtctaagtaaaaatagaagagatcttactatagtactattcatggatattggaaatattctgaacgttttgcaccaggttgatcttgaagacaatcactctagaatgtcagtcacgcttttccgctttgggtgcacgtgttcccattcaatccagactctgttttttctgtctacacatctcaactaaaaacatacattcgacactttacactagattcaaacgcgtcttagtttttgggc

SEQ ID NO: 13324 - DNA, 567 bp, Emericella nidulans
aagtgacgatttttgatatcccccagaaatactaattgtattctaaaatagcagtgaaatctgaaaactgccttgaagggattgaagttaggtccatactctgcctggaggtcacgtgagactgattggggagtgaaagaggatcctggattctttccaagtctgcatactgcataccatcacgacatccaaggtagtttctggagtctccaatgatttcgcggtgttgtgaattctccccacattcgctatcgaagctaccttctttatcagagctccaacggcctagctatgtcagctattccggatccagcgtttccccgcatccatggctgcatcctctcagcgtcgcatcggccgttgataagctgtatccaaccagccaatgtaacctattgagtcttgtcgctcttgactctgccaggacgaggtggggttggttgggtgacgatgacgctggagatagaagtcttggtatgggggtgattcgataagctatcttgcttatatcgagatatccaaaaatacatcgccatgacgaacagttatctatcccttgcttcatca

SEQ ID NO: 13325 - DNA, 1056 bp, Emericella nidulans
agatctccccaacaagcacttccccgcttccccgcaccgtcacagcgcgccatgtcgactaccatccaagagaaattagatatcctgcagaactactctgcgtgtgatgtatgctcactcacgcatcaagctatgggccggactacgagctgatatcccgtccttgtgattaggtctccgacgttctcctcaagattcagaagccagcggatggatctcccccacgagctggatatctcgctgatctgagtacgttctggccttgtcctcccttcatcagcaactatccagggaaatatctaatgaccgcagccccattctccccaatactcgggcgcaacacgacaacccccaagatcatcgcccccgcttcgacaatccaattcattcccaagtcctcctcgcccgcttccctcttttctgactccgcctccaccccaaatccagaccagactttccctcaaggaacccactgggttgacaacaccgagcccaacacgatcgtgctaatttcccaaccccccgggcaacactgcgccgttgttggcggtatcatggccgtgcggatgaaaagtctcggcattaaggccgttgtggctgacggccgaattcgggaacttaacgagatcctgggcgcgagcttaccgttctgggccaaggggacatttaccgctggaacaggcgcggaggcaagatcctggttcactgggcgggtgtggctgtgagtcgcctgtaacgtcttatctcgttgtaacaagtcatggcgtaaattttctgcccgagttgggcctttccttctcagtctttgcctctcattttgttcgctccccttgtaccctggtcggccgtttcgggcttcctctaaccttatatgtcgttttactcacttacacagccctttcactccccttcggttcttacctgcccttggctcccttgccttctacgactccttcctcctcggatcccgctttgcttcccaatatttgctcgcactctccttcaaccgctccactgtctacctgtatttcttctgctcctcctgccgggttagat

SEQ ID NO: 13326 - DNA, 1215 bp, Emericella nidulans
atgatcttgatgggcgtcttgggcaagtgggcatgatcatgttgctggtcgacattggtattgaaaaactctagaatagtctccgtgaggatatggcgcgttggttcagctcaaaacaccccttgcttggcttggctgggggactctgtgttgggtccggccaaccgccttgggtatgctgatctcctgaattgcggcatctcgaggtcccccgtcgattactcgattcgcaaatgatgagagtatacggggaattcgagcaagatttattcgggcagcctgaggtctgggaggccggttccatagatagagtgaggaacatcactgttgctcgagtagcggtccgtttgtgtctagcaacgcaacgtcagcttcactacggcgtctgaatgagttagcttggttagcttaactgcatcgcacttgagctcacgagtatatcttcaaatgctgcatgtagtcattgtagctgttgtggaccaaccctagttcatgttgatgaggatgtagtgggggatgattccacaaccattgtcgaaatatataatgaagcatggtggggaaccgtgatatatagtaagggtgagcaacccacgaccacctgctgaacatagctcaactgctgaggttggcatcattttgatgcaatatacgtccagaggtatacagattagtggcgttggatgttcgtaaggttggagatttggagccgatcgctgtgaattcaacaacagtactccgtagggtctgctctttgatcagttttgcatcatatttaaagacaagaagcctttcaacaataaatccttgatggtctacggtcatgattttcccttggaacctaaccagaaccaggccgggagaccctggtttactccataccggggattcttttggttacttttttttttctataaacccttcctttaaatcttccgaatgctttttatgccaatttcacctccagtaacaatttccataatcgctgattaacctttttgccctccaaacttatttccctttcattttaacctgttgttatcctcaccccgacgttctttccgtggttattctaaattctccccgctttcttttccaccctttttctcctcatctttctatttcacattactttttcccttctttaatccatccatctaccattcattcattctttttctccctctttctctctaccctttcctttccattatt

SEQ ID NO: 13327 - DNA, 706 bp, Emericella nidulans
  unsure (1)..(706): unsure at all n locations
aaaanaaaaaaaaaaaaaaaaaaaaaaaaaaaannannaaaaaaaaaaaaaaaaaanaaaaaaaaaaaaaaaaataaaaaaaaaaaaaaaaaananaaaaaaaaaaaaaannaaaaanaaaaaanaaaaaaaaaaaaaaaanaaaaaaaaaaaaaaaaaaaataaannaaanaaaaataataaaataaaaaaaataaaaaaacaaaaaaaaaaaaaaaaaaaaaaaaaaaaacaaaaacaaaaaataacaatcaaaataaaaataaaaaaacaaaaaaaaaaactaaaacaactaaaaaacaataaaaaaaataaaacaaacaaaacaaccaaaaaaaaataaaaaacactaaaataaacaaaaaacaaaaaaattaaaaaaccaaaaatacatataaaaaaaaatataaaacaacaaaaacaaaaatatactaaaattaaaaaacaaaaaacaacaaccaaaaactttaaaaaaaattaaacaataacaaaacataacactaaaaacaaaaaaaatcaaaaaaaaaatacacaaaataaaacaaatacacaacaaaaaaacctacaataaaacaaaaaataacttaaacaaaaaaaaaaaacaatacaataaataatacaaaaaaaaaataaaacaaaaaacacactaaaataacaacaaatcaaacaaaacaaacataaaaaattacaaaatatcacaaaaaaa

SEQ ID NO: 13328 - DNA, 1301 bp, Emericella nidulans
  unsure (1)..(1301): unsure at all n locations
tatcaataatacgactcactatagggagacccaagcttaggatcaaacacattcgcagatccacctctcgccgcgaaagccatcccggcccttccggtacccaatgcctttgatgacgatgccaccgcccccctggcaccatctaggctacgcaaatacccaacaaaagcggccatttgcttcctaaacactgcatacaaccgcttgaccatggcttcactctcgtgcctcacgccatgtgtcccatccttgcgcgacagaggcgcaaacctcagaatcgtgtcaaatatcccttctagcagcctcgcaacttcagcctgccgtttagtcagaaagagcgcgaagagcatctggtctagggtgttctcgtggtacgctcgcagtgtaggaatggaatgggctgcttcgatggttgcgtcgatatcgccgcggtctaggcatgcctcgatttgagagagggtatcccggaagcgctgccatgtggaaccgacggcgagatggaagaagtagtcgctgagggcgaggatgaagtgctggctgtctatacggaatttctggagtaaatattgggtgtcccctgagagggaatttctggctgttgaatcacggatgaggcccttaacgaccgaaaccatgcggaggaagataagaaagttgtttgaagaaggtgggccgtaccttcctaggggagcggtgggtggattgaaacctccaaggaccgtatgatgcttagtatttggaggtaaaaggaacaaccatatgttaattagggttgggggttctagcacctgggcaacttctgcctctgttaattccccccttgaaaaatcttaggcctcccggactgccggttcttttccaaaatagggttcccggggcctccccattatcccaccaaacatttgttaaggttcccagagaaaaagttgcataatgctctgtggcaacatgtatgctaaaaaacgcccggacctggggacaccctttttcaaaccgctttctctccctttcaatccgggcctttattgtaaacccttccaactccgggataccgtaaaagaaaaagcccgcgccctaaatggnccttaaccnggccaaaaacatatccctcttaaggaaaccctcaactttcccccctcttggtattaacacccattcatctccccgggggacttcctccttccctcctccccctctaaatctcaccgaaagnnttcnctcttccccccactccatactctctctaaactaaattcaattaaatatacaaactcttctaaaacaacctccccactctctcc

SEQ ID NO: 13329 - DNA, 791 bp, Emericella nidulans
  unsure (1)..(791): unsure at all n locations
gttaatggtactttggtcacaaataaattatgtggtctttttttctatttcccgttgtacagattgtccacttactattgcatggatgcatctagatcaactgaacgggggtcatggcgacaacatttccattataattgtgagaaaaagcaccagggtacttggaagagattttaaccgtatttagtgatccagtctacttatttttaatcttttttattttttttaatttatatactctccgttttccaagtttgttacccgtgaaagataacaatgttgtttaaaaaattttttttatcattatagtttttttcttatattattaattttttggtgacaatataatgctgaaacaacattgtttttttatttatatcatttttttatcctatagctttttataattaaactagtacagtggttttnttttaatttttatatagtttttttttccttttattctattataagtttgtgcattaaatattctttttgttttttattttgatatttttttttttaagtatttttctaactttttttagatttttttttatttttttattgtatttattttatttactttataacatatttttatatttttttttttttttttttttttttttaattatatatattttttattatattttttatctttcatatattatttttttctctatttgttaaaaaatttgttttatttttatttttttttatttatcttattgtatatttttttattttataatttaatttatttttttaattatatattatattta

SEQ ID NO: 13330 - DNA, 131 bp, Emericella nidulans
gtcctccgtgtaatcagccccgggccttgatcctgcatgcggtaatcggcggaatacatccgatttgcagccaatgagtgcgtgaggtggttgatccgctggatactgtagattcgcagcatcaacggtgc

SEQ ID NO: 13331 - DNA, 931 bp, Emericella nidulans
  unsure (1)..(931): unsure at all n locations
gcttcctgcgatcgcttttacggaactatccgcagggtgccatcttcaacgtcgatgagaacggcagtatctcctctagtgaaggcagcgatagctcttcagggaccagtgtctcgcgggagattgtctaccgccgccacgaagcgcccaaagtccagcggcggtggaagcagcagaaacgccaccggctcagcctgaaggaagagaacaaatggttgctgaagatcttcccgtctgcgcgctgcatcaccctgttcccactctgggattcccgccgcaaccgctggttctcgggcctgtttctctggaccaagtcgccgcgcagcttcagcctcggaggagagctagcgtacctctatgccttttcgaacagcatcatggccgagatccaccggttggacatcgagctagccaatcgggcgcatgcgacgcttgttggcagtatctcgcacgaactgcgcagccctctgatgggatcctgggtagcaccgagctgctgggcgactcggacctgacccctgcgcaaacggcgctcgtcaacacggtcgagcactgcggtcgctcactgctggatattatcaacaacatgctggactttgcaagatcaccagttcgcgcgcaagtcgcggccgcacggttcaagtcgcgcnacccgacggcgcagcaccgattctcatgcctgctaggggaaacngatgtgatctatattcgactcagtttgaccgtgcttgagaatgcccgcagtgtcctgcacttgtagttaagacgacctgccctgcttgccacttaaaaggagaaagtgtgcagcacgaggcctttggtacaacctacgattaggcccattcagtgtgacacagaggggcgctgacttgagcaaaccctgtcccccccccccttttttttttttataaccccccccaaaaattttttt

SEQ ID NO: 13332 - DNA, 399 bp, Emericella nidulans
tccaaaggttggctcacaaacactttcatcggagtaatgaccacctcgtccaagttccacacgcccagtttcgcatgcggatcatcccgaaccatatcccagacctcctcctccgtcgcggccttgcacagatggatgcttcctatgatcttcttgaaactgtcttcgaggtccttcggctgtgaagagtagatgggcccgccaaatgcgatttttcccgactcgaaatgcggcttgttatggcttaggtggagagggcggttctcgatgcgggttgcgagcacattggggtgatcggggaggcggaccagccagtcattttgttcagacatgatggattgtttgaggtttcagataaggagggttgtagtggttaagtatagaagttacatggcggtc

SEQ ID NO: 13333 - DNA, 1032 bp, Emericella nidulans
  unsure (1)..(1032): unsure at all n locations
aaaagaatataaaaagagaaaaaaaaacacaacttaaagaaaaaaagaaaaaaaaaaaaaaaaaataaaaaataatataaggagatagaacgtacaaaaataatnaggaaaaacccgggggggagaaaaagaaggcagaaaagaaaagaagagagaaggttttaaaaaaagaaaaggagaggaaaagaaaggggggaaaaaaaaaaaggcaaggggggaaaaaaaaaaaaaaaaggaagaaaaaaaaagaagaaatagaaaagaaaaaaaataaagaagagagaatgaaaaaaagaagaaaaaaaagaaaaaaaaaaaaagaaaaagaaaaaagaaaagaaaaaagggagagaaaaaaagaagagaaaaaaaagaacaaaaaggaggaaaaagaaaaaaggaagaaaaaaatgggggaaaagaagagaagaaaaacgaaaaaataagagaaaagcaacggatgggaagagaaaaaaggacaacaaagggaaagcaggaaaaatgaaaaagaaagaagaaataatagaaaaaagaggaaaagagaaaaagaaaaaagaaggagagggaaaataggagggaaaaaaataaggaaaaagaaggaggaagaacgacgataaaagaagaagagacaataaaagataaaagagataaaagaaaaaaaagaaagaggaaaagaaagaaaaataaggaaagaagagtaaggagaaaaaaagagagaatacgaaaaagaaacaagataaaaagaacaaaaaaaagataaatagaaaaaagaaaaggaacaaatataacaaagagaaaagagaaaaaatgaaaaaggagaaatgaacaaacgaagctataatataaaaagaagaagaaaagaagtaataagcggacgaaaaaacaatgaagagtgaaaagtgaagaagaaaaagagaagaagtaagtaacaaagtgaagagaaacaaaagaagagaaggtaaaaaggagagagaaaagaaaaaaaaggaaaaagaataaaaaagtaggaataaactagagagaacgaaagag

SEQ ID NO: 13334 - DNA, 704 bp, Emericella nidulans
gaataaccctactaaagggatcagttctacgaagaagcgcgccgatgcctcgaggaggaggaaacagaaggcactgtcagtatcccgacaattcaaggcctactgactctgtgggtgaggttagacgcctaagccgcccgccaccggcgcagtcagggctaattggagcaggctagttatgatgggaaaagaccgccttggctggatgtatctcgatctggcctgtcgcgcagcagaggaatatgctgcactaaacccagcgcgatctcctgaggatgaaagtattcgccttgaggaaagagtcgtgaatatggcactgtggggtagctttagcatggcagcgtatgttccccggggttagtttcgtttggaagctaacgacctgggcagcacctctgcagcgtccttaatgaagcatatccacactagcccgcctgcacgaccccgtctaccgatgaatcacaaggatccaagtgatgtctggtacccgtacccggagggaaccgacccgtttccaggtcactacatgtgtgtttttgatcgatggtgcgacctgaattgcatcgcattcagcatcagcagggctttttattcagctgaagataaagtgccagcttcagaacaggcctcttggtcaatgatgtgtaccggcaatttaaaagctggtatgctatttacccccatgccttgaagcgaaacggcat

SEQ ID NO: 13335 - DNA, 1157 bp, Emericella nidulans
acctcagcatgtcgcggccgcataatacgactcactatagggatccagattccattctcaggcattgctcctttggtcaatgcgagcacgcactgtcacctgtgccatccttgtaccacacccttagtaacggattcgtaagcgagtctactgcctactcagaacagtgcgcgatattcagagaccaggcagccagcaaatgctcgcccggtgtgtaactgctaatgccggccattcggccattgatagccagtgggcattttgatggccggtaagataactaatcaaaataaacggcgggaagtcggcgagtcagccctacagaggatctgcttaacaactccgcccatccagcgtagaaacggctttatctccgccctataccgttggcattaagactcctcgcagcttctggtcttgaaccgaatgcaagcgttagactgacatccctgcacccatgtgtctcacggatgataacgtcttatggcctcactgtcatctcttattattggcggcatatatcactgatttcagttaccactgatcagtaatcacgcactgcggcgttctgttgtgcctacggacaagaaaccctgtggctagaccttctggggagaaatagtcacgagtcttaaccttaacggacgaagccgtccacgctctagcattttatttgccggcggctgctatatttggatccagtagggtatggacgactaatgattaagcctttgacaggagacacacgcactagtcgatggcagcgaagatcaacacgcgtttcagtttactgtcgaatgatgtgcaaaatgcgaaccaacaggacaaaatagctgccaacagtctggggtttctcacaatctggttggaccgcgatcatcatgcgacggctttgactgtttcgataacgctacgctgacagtagacataacggtttgagtacagttgcttcagttttcgcctcttgtgaatctgcagtcctgctgagttctaaggatgtagattcagtaccgacccatgtattcgtaccaaccaaacccaacccaacatccgcaacatgccactgggtaataatccgagtcatgataccatttcaagacctgagtgcatattcatcatctcatgacgatcatgtcttctgatttggcttagacgac

SEQ ID NO: 13336 - DNA, 597 bp, Emericella nidulans
gctaacgcctcggatgtttggccctcacttccatgtgtcaagcccggccggtgcactgactaggcgatccacggttctctgggtgcgctcatcctgagatcgtcccgactaacaggccggctgccgctaacgatttcattccgtcagcagaccctcatgacagtggatacacctacggatctcgctaagacttcgctctgggcaggggaaggacgctactgggtgtgcaggtggggttacacagtatgctcgtaacacggatgacgggaacaagacgtctggttgaggggctttcttgaccggtctggatgacccgtgtagtctgtattgaccattctcgcatcttcctacactagaactgcaaatcttgagggggtgagccatctggcgaacggatagccctgtccagacaggatggcagcaccgctgtgtggatcttcgtggagctcacctctggtgatgctccaactgggacaagggcttggtccgatggtatgaaacctcgggtcggtgtaccctctgagggctaccggctcgaagggaacacagttcacaggctcgtaccaggtttgcatagatggggctctgacaacccaa

SEQ ID NO: 13337 - DNA, 596 bp, Emericella nidulans
  unsure (1)..(596): unsure at all n locations
gtttggcgagcccgcgcttcgtatatcacccgcccaggaccgtgtacacggccggttttatatgtacccccgtgagcccaacgagaaagcggctggcatagagttggtacggggtcttgacggcagcggtggaaaaggttaatataacccagagacattcccaggggaggcaccagatgaagaggcggactagatggattatcactagctgaaccaaagagtcaaaaggaggtgtgatgcagcgccgtaccgcgggtacagatcatttgcgacggaatttgagagattacgtagccactggatacgtttgtcagagtcctggtcggatttatactgtcgacagggaagacgtacattgtccacatggtagtgaaactctggtactggtttcccgtgacgttgagctcttctttcatcctcgcgaagtatgcgttccctagacggtccgtcagttcaccggtacgaggagcccggacttgagtacctnccgtacatggtctatcacctacgcttcgcacangaggactcngaagcgaggaatctccagctaaggcacacagatattatgcataaaatttctttccataacccatcgc

SEQ ID NO: 13338 - DNA, 1321 bp, Emericella nidulans
  unsure (1)..(1321): unsure at all n locations
acaaaaacaactaacaaaacataaaaaaaaacaaaacacacaaacaaaactaaacaaatataaaacaaaacaaaacacaaaacaaaaatccaaacaaacaaaacaatnaatcaacacccaannaagaaacaacatatnaancaaaccncnnaaattanattannaaaaaaaaaccaaaagaacagaaataaacaaaacacaaaacaaaaacaccccaaaaccaagaacacacacaatacattgcacaatcccacaacaattgaaaactaaaccaacaaaaaggaaanccaaaaacaaaaaaaaaaactcaagcaccaaccaacaccacaaaaacccaaaaacactcaaaccaaaaagccaccaaaaacccacaacacaacaaaaacacaacacccacacaaacaataccaagaacaaaaaacaaaataaaaccaatcataacaaaacaagacacacaaaaacaaaacacacaaaaaacaaccacaaaaaccaccacaaaaaacaacccccaccacaagaaagaccaaaaaaaaatcacaaaaaaaccaaaaaaaaaccaaaaccaaaaaacccccaaaaaccacacaccaccaatacaaaaaacaccacaaaaaccccttaccaacaaaaaaaaaaccaccaaaacaaaaaaaataacccaaaaagaaacccccaacaaaacaaataacgacacacgcccaaaaacacacctgtaaaaacaaccaaacaaccctaaaaaaaaacccccaaaaacaaaaacacaggcctaaaccccccaggaaaaaacaccccaccaaaacaggggcgcaacgacaaaaaaatgcacaaattgaaaaacaaccaaacaaaaaacaccccagcgcaaaataaacccaaaacacaaaaaaaaaccccccaccaaaaaaaaatccaaaccccccaaaaaaaaaaacaaacacaccaaaaaaaaaaaaaaaaacaccaaaaaaaaaagttcaaccacaaaaaaaccaaaacgcccaacgcaaaacattaccaaaagagaaagaaattccggaaaaaagacctcgcacaacaaaagaaaaaaaaccccccaaaccccaatcaaaaaaaaaaaaacccaaacccccaaaaaaaaaaaaaccaaaaaaaaaatccttaaaaaaaacaaaaaaatctaatcagacaacaagaaccaccaaaaagaaaaaaaaaacctactaaataacaaaaaaacaaacaactggacaacaaaaaaaccaaaccaataaacacaaaaataaaaaacaaaacacacaaaaccaaaaactccaaaaaaaaaaaaaacaacctaaaacaaaaa

SEQ ID NO: 13339 - DNA, 505 bp, Emericella nidulans
actaaatgggatgcctgactttttgctactatcaagcaatgaacatgctcgaatccaacgtcgttcccggcaaaaccaagactatcatcgagtacagttccggctcgactgtgatttcgatgtcgatgatcgcccgggtcatgcacggtatcggcgatacgcgcgcctacctcagcaacaagaccagcgacgctaaactcaagctgatgcagttcttcgggctgaatatcagcctcttcggcgggccgtcccagccggaaccctacgacgagcgcggcgggatccagagcgcacgacgaatggctacagagtccgacgagatcctgaatcctaaccagtacgaaaacgacaagaactggcagagcatatccgctggaccgggccgcagatcttcaagcagctgcccgagatcactgttctctgtgctggcatggggacatcagggaccatgaccgggctggggacgtacttcaaacaggtcaagccgactgtgctgcggctggga

SEQ ID NO: 13340 - DNA, 854 bp, Emericella nidulans
gaccacggtttctgctgcttccccggggggcatcattccaactctcccgctcccctagcgataccttatatctgcttacaaaccgcgccagtcctgggatctttaacagcgattgcggggcgagaatcctggaaaggtaatgggtgaatccaggacaccctcatacagttattgagctcttgaccatgacacttaatactacatgtgccccgttacacccaacatggagcataattcagaatgaagaactgaacgctctgtcttgattcattcccaacaccggttatacagggcaagagcagaccatgaaaccagcgcacacttgccgtcgagacctcaaaggaacgccaggctgcacatgcacagccacggagttaaacaaaccgatgccagacctaccccctgtttcccccgttattcctgtgcatgccattctcttgctagatgtttcgcactcccctccccgagggcctagacgagtcatgaaacccatccgcctaatgttatcaagcgccaatcgtttggggcaatgtcgaaacagaagactcacccgtgacacatgcccatttttttcccccctccgcaagacaactcaacccacaacttttctgacctgaacacaaaccagccaaaacatggcgaccatacattctactaacatgaaccacttctatctcccccggcaaataacacttgttactctcaattcaacgatgaccttcacaccttttccttcattcacagctcctcatcaccgtccccatccaattcccccctctacttaaccgtctgtcatctttttatatttacaccacttgatacgtccactcactccttttccccgactatcacac

SEQ ID NO: 13341 - DNA, 1259 bp, Emericella nidulans
  unsure (1)..(1259): unsure at all n locations
acaagaaaaaacaaaaagagaaaagaaaaaaacaacaaaaaaagaaaaggcaagagaaaaaaccaacaaattaggggacnaccgcgaggggagtaacaaaaaaaaaaaaaaaagaccgaaaaatttataaacaccaaaaaacaacacacaacaaaggggggaaaaaaaacaaaaaacaaaaggggggacaacaaaaaaaaaaaaaaaaaaaaaacagaaaaaaaagagaccaaaagaagaaaaaacaaaaacaaaatacgaaaaagagggaaaaaaacaaagaagaaagagaaacaacaagaacacaaagaaaaaaaacaaaaacaaaaagaaataagcagaacaaacacagacaaaaacacaaaagccagaaacagaaagaagggagaaaagacacacaacaacaaaaaggcaaaaaaaaagaagagaaacaaaaagcaaagaaagaaaataaaaaaagaaaacaataaatacacacaaaagaagacacaaacacaaaataaaaaaaaaaaaaaaaagacaaaagaagaaagaggaaaaaaaaaataaaaaaaaaaaaaaaaaaagagacaaaacaaaagaaaagacggaatcaaaaaaaaagaaaaaagagagaaagaaaaaaaagagaaaaacaaaccaaaaagaaacaaaacaaacaaaaaaaaaacaaaaaaaaaaaaaaaagagaaaaaaaaaaaaacaacaaaaaaaaaaaaaaaaaaaaaaaaaaaaaagacaacggaacaaaacaacaaaagaaaggaacacataaagaaagagacacaatagaaaacaaaggacacgaagagaagcacaaagaaccagaaaagaaacaagaaacaccaacaaagaaagaaagaaaaaacaaaaacagactaaagaagaaaaaaacaaacaaacaaaaaaagaaaaacacaaaagaaacacataaaaaaaacaaaacacaagaaaagaagaacaaaaaaaaaacgagaaagaccaaaagacaagagcaaaaaaagagaccacaaaaagaagaaacaacaaaaaaaagaaaagaacaaaaaaaaaaaaaaacacaagaaaaaaaacaaaaaacaaaaagaaaaaaaagaaaaaaagaaaacaacaaaaaaaaaaacaagagaaaaggaggaacaaaaaaaaaaaaaaaaaaacaagaaacaaaaaaaaaacaaaaaaaaaatcaaaaaccaccgaaacaagaaacaaagcaaagaaaaaaagaaaaaggaaacaaaaaaaaggaagaaaaa

SEQ ID NO: 13342 - DNA, 671 bp, Emericella nidulans
gcggatccccatccgaaatttttttaacgacgacaccaagttccatctcatagtccagcgcgcgggacggcccatacaccaccttcctagcgaccggattgctgcggtcgtagaagtgcccgcagggtcgggttattggtgtccctgagacgacaaccgtcgacgcacgccctgtgtatccaattgggaaatggaagaagcctggtgggggagaagggtcgcttagaattgcgcgtccggcattctggacatggttgagcgaattggagaaatctggcctatgttagtacttgtagctgttatgtgaatttatgaggtttttggcgggtatatgcgtacccgtaaaccccaatatctccacaggaagatgcaatttgaccgtcgtaatatcagccttggagttctctggaaggccattcaggccggattcgcccaaaacagactgcagcgttgcgcggaccgctgtgtggacggacttcggaagggccgcatacccattcagggtggaattcatgaagattccattcggcagagaaatatcgccaaagaagccggaattctggagatcgccgaggaagatgacggtgttgtggagccgggttgcgcattgttgaccgtgtgttggcgaggaggctacttcgaagggagattcttgtggaaaatggcgagca

SEQ ID NO: 13343 - DNA, 176 bp, Emericella nidulans
aacgaactcgacctggaacaaaccgacaacaccgggaaatgaaaatacacaatctcatacgaacattaaaccgccacgggcaagtacaaacgcaagtatgtaataacgaagtagccaaacaggaagtccgtcgtacccaccagcagctgcgagtatctacgtcggtggctcgacgg

SEQ ID NO: 13344 - DNA, 2820 bp, Emericella nidulans
cgcatcctttgcttgtgggaatttcctcgcaacgattcgcctgctgaaatagtcctcgctgtgataatgctcctctcacttttcgctgcgttgggttgggcttcattcaaggtcatcagcctagcgaaacggtcgatcgcactgcacaagaaccccgcctatatcctttactccgacccgacttgcttgaacaagtggggcttcctctatgtgcaatatcgagcaaccgcttactactttgttattcccgtgctgggctatctcctcgtcaagggcatgttcatcggcctcagtcagccggctcctgtggtgcaaaccgtcgcctatgtgatcattgaagcggctatgttgattgcagttagcgttctgcggccgtggatggacaagaagactaatatctacaatatttccattgcggcggtccaatttttgaacgccatcttccttctcttcttttccaatgtcttcaatcaaccaggactggtgaccggagttatgggtgtcgtcttctttgttattaatgcagttgctgcgttggttctgttgattttggtgctcattggatctatctatgcttttgcttccaagaaccccgacacccgctatcagcccatgagggatgaccgtggctccttcatcaaatcacagacccagctaacaactgaactggatgcattgggtgccaccgctcgcggcgacatgaagacaaccccatacaaggccaatccttttgatgatgaaaatggatcattttccagcggtaatggcgccagcgttagccgtcagaatcttgagccgaaccccactgggttgcctaaccaggcccctcattctcctgttgatccgtcgctaccattattccctagtgacaactccagcgcgcgaggacctggtagtagcgctgataccattcaacggtcacaatcgccgattcctcgaagctttacctcgtcgccttatcgaacacagaacaaccaaagcccgtggcaaagaggggcaggttatgaccattaaaagagtttcgcgcgttttttcttcttttcccgctttcaaacgattgcttatattagctttgcttaaagagatgaagttatggccgagtacgggaagggattgaccgctcgacccgtgctttattcatttttccgttcatcggtgctcccacagcgcccgtcttttttctattttgaatttgcccacttacctatactgtgatatactggactctcctttcctttcctctcactacctctctcccgccctcctttggctcaccaggatttcctttacaattttctcacttttttatcctccgttctacgtatactcggcgttctaaagcattggatctggagataggacttgggtttgcggtcattgtgcgctttttttttttttggcagggttcacccgatgcgcccgtttttgctcttgttcgaattactgttatggaagacataagtaaccataatgctattaagctgcgtcgattcgacgttagctaacaaaattagacctcccctaattgtagagccctgaggtgccgttgtgaattgtatatcatagtgcaggtcgttgagtgtctctggattgacataaatcgcctcgaagttatggtaattggcgttcatggttagaagctttctatagcatatatgctattctgccctgtctgaccgccttgtgatagcatcgcatcgaatatcttcatcgaatctccacatgcgacccaacgccatcgccggtccgcaaacaggatcagaaacatctgagtcaacactggtgattctagttgaggtgcttggcgagttattttgctacaacccagcctgagctcgattgctacaaatcacgagtgcagctccggcgctcaaagcttcagaatgccgaaatataggtgaccctttttcccctagcatctttcttcaactaacctttgaggcactcttttgtaggttatcctgcgctctcttccctatgtcactcacaacacaatatctaccggattcgacatgaaacccgccgcaagttccttgactaacaccatacctgatatacaggcgattactgcgatgtctacctgacgcacgactcaatgagcgtgcgcaaggcgcacaactccggacgaaaccacctaaggaacgttgtggaatattatcaacgtatgtcgcctgacatgccaatactaatctgtggtggcctgcaaactcaagctcacaactgcattgcagaaatcggacaggaaaaggcacaatcagtcatcgattccattacgtcctcatacgccgctgaagggcaggctgtgccaaacccagctatggttcccccgggtgcttacccgccttcgtttgggttcccaggtgcgtagtctctttgaccgcgaaaacatgagaactaatactgatacccttcattaggccaatttccttcttccccaattggaaattcttcttctgggccaaggggtgccgtcatgccaacacttacgttttgggctctttggttttaaaccaaaacactaaccttataagccccggagccgaaaccttcctttccttcaccgtttccacgtcgttcggtccatggggaaaccttcagagcaggccggtggttttaaattctgttaaaggttccaaattgttttttcccggttttggctctaccggggattttttaatatccgtaatttatttaacttttttttcaaggggttttttattttggcttttaaaacttctgtaatacccctctttccgcttttaatcttggggtttcaaaaccaccgttttcccccccttgtccttgttttaaacccctttt

SEQ ID NO: 13345 - DNA, 1179 bp, Emericella nidulans
gagttgcgtgactctcgtccaagatctctcgagtacgtagtcggactgattaacagtgaaattagtagtctccctccctctccacctccacaccacagcacatcgcctatggacgaccgctgttcctgacccatgttacctggctttggttcaaaacatttattggcgcacccattcttgattttggtccacgactgcattactactgcgagggctaacaatcctgtcagcgctcgcagagaggctaatttgagataccctccctaagcgatgcccggatgatcgacttccgacctttgacctctgacctcttcctcccagaagctgatgcaagatgcaaggggaatttctcacacccgccgcagccatctgttgcacgtatagaatttcggcaaggcctgaagacatccatatgctggccatgagattttagcgtccttttacccctggcccagtgcgttcggcggcggccggtcaggcttggtttaatacttccgcatccggccatgcttgccacagccaacctccaaagttcggtcggcggagccacactggcctcttgcttcatttcgctcgctgcagaacgtggataccttccaggatgtatggtgtgactgctgctcgtcttcttagtagtggctgttagcccgcttgtcggtttagctcccgagtcccctggaagcgagagcagctcgacgagggcaaagcttcgacctcacgggccatttgtttcgatcatcgtctgtgcatttgagtttcgctgatgcctatctcggttcccggcatttcgcagctcgctgcagtggcaatctctgtcagcctccatttctcgtgtcatatcttaaagtcccattcctcccgggtcaccgaggcatgcttggctcgcatggacaagaatcacaaggccagttgagcatgagtggacggatttggggtggaagactcctgcactgctattggtgcgatgcggctcattgaaggggcccaccgttcctttgataagaactgacctacttcgaccttagccgccgttgacggcggttctggctaaccgattgggacttcagggctccaaaagccgttcaagtattctcaaggtgcaaaaaccacaataatgagcctgaaaaccatgatatgaaagagagatgtgatttctcatgagataatactcggaatcgg

SEQ ID NO: 13346 - DNA, 582 bp, Emericella nidulans
gggcagcctactacacgcgggcggcgatgacttgcacattctactggatcacgacgacgccaatttccgggcaccgagaagtggtgcgcaggcatgaacacagaatgctgacgtcgactacccgcatacgaaattatacatagagggaaaagcgctcctagagacacaagggaatatgtacatggaagcacaccgaggccatataccaaaccgcttgctggcgcacgataacagtcgagccttgcactcagcggtctcattctgttccaccttctatggcatacattgcataaagtatgctattgctccgatgacagccatggtctaggaagaagagaatatgtgacggtctaccgtgatcgggtaactggaacgtgccgcaagagaacgtcaaaaaatcctgcgatagaactggatttaggcgtcttggacagagtgcgaagaacactgaggagaggcgtgcggcgttatgcggatcatagaggtgatcaaggaacaatatgtgacaagaggtgattggctgtgcaagtagacttttagtacgttgcttacggagtaaccgatgatgatgtaccgctgcca

SEQ ID NO: 13347 - DNA, 1036 bp, Emericella nidulans
cgatttaggtgacactatagaatactaggatcctacgcatatgtcgaatagcaactaatggtctgcaatgactcagcacgatgattatgcctcctccaaaggcgctgtgtcttgtaacgcagggaccaaagctaacccagctcgaggtctaaagacagcaatgatcgaaagccaagacaaagacaatggcgcgctgtcttgcctttccgatcctgatcgacgacggtacagcgacgaatggcctgacggaaggagggaagggtcgtctcgctgaaagctaatgtgtggcggtcactgtgtacaaagcaagggccacagaccgaacaaaacactgactcgacgattcaacacagcagcgactgaaaggaacgatcgaggcgacgacaatgggtcggccaatgcggggagagggaggactggaaggagacgtgcaagcaagtaaaagggagaaagaatgaagcaagttggaggagacgggatgaggcgataatatggaggagcctggaggaggaggggaaagggactcgtccagaagaacgctgaacggcgcgccgacttagatcgctctgttgccggcccactctgttgctctgtctctggagtcgctccgtcctaagatctttcctttcttagtctacagctctttagccaaaataatatcgcaatttatgatattaatcctaccaggcagctaaatgttagcgccgccccaaactgttgatgatctgccatcacacaaacccgaccaccttgacctgattcgcagtcgggaaatacggagtaatcctgccagtcttcatattattcaggctcgcttcttatttttattttattttattttattttttcttgccgtgatcatctgaagacatggcaaatagcactactgtaaggccgcacaccgtgcagagttggaggacaagcagagctgcacttgcagcaggttggcaacaggggttcgagtcagtgatagtctagagcattaatgcgcggtcttattactatccagctaattagtgcttcttagtgctatgga

SEQ ID NO: 13348 - DNA, 783 bp, Emericella nidulans
gcggccgtagtgcttttccgtcccacttcccttacgggcatctcctgaaaagagtaagaagtcagctttaaagacgtagaagcgactcgatcgcatatacttagacgcaagagaggagcacgaggccaataatgaatggcttggctatatggtctggagcaggaattgtccccgctcgatcgatctcctcatgtgagaaagcagcagatctgagatggtacaagtacacgtgataaacgagtactggaattcttctccttcccgcgcgatcgagaacccagaatccagaatcgtggactgtttatgcccctgggcggttgaaattaaataaggatgcggattcttctaattgcgcccgcagatcattattcgttgataacggcctggtcagtttccagcccacgctctgtccatttttatacattgacccaactgacatcagctgcagtatggatacgtcacgcacatgttccagtttctgaaaccctggcagtttcgtggaaattgatgcagcgcgcagctgatttgtgaggtgtcgctcaaaaggtcgaccaatatttggccgcagatggctgttgaagttgtcccaagatcatgggaacgcgatctgccgtgactgccagctgcataattggctccttgagccctcgaagttctaggcttgtcgcggccgggcagaaaggctgctgggactagctgctcgctaggctcaacgcagtaaaggcactgaattagtttgtgatagttcattcccaaggccaagtgaaatgatgttcccagtgc

SEQ ID NO: 13349 - DNA, 1517 bp, Emericella nidulans
  unsure (1)..(1517): unsure at all n locations
aaaaaataaaaaagaaaagaacaaaaataaacaataatataaaaacaaaaaaaataataaaaaaaaaataaaaaaaaaaagaaaaaacaaaataaaataatataaaaaaaaaaaaaaggggcgaatgatggaacacacanaanntatattanaaaagaaaaaccnacaagaaaaagaanaaagaaaaaaaaaaaaacaaaaacaaaaaaactacaaaaaaaaaaacttttatttataaaaaagaaaagaaaaaaaatacaaataaaaaaaagaggaagaaaaaaaaaaaataaaaaaaagaataaaaaaaaaaaaaaaaaaaaaaagaaaacaagaaaaaaaaaaaaaaaaagatgaaaaaaaaaaaataataaaaataaacaaaaaaagaaaaaaaaataaaataataacataaataaaaaaataaaagaaaaaaaaaaaaaaaaaaattataaataaaaataaaaataacaaaataaaagataaagaaaaaataataaaagagaaaaagtaaattaaaaaaaagaaataaaaaaaaaagtaaaaaaaaaagaaaaaaaattaaataaagaaagaataaaaaaaaaaaagaaaaaagaaaataataataaaaaaagtaaaagaaaaaataaagaataaactaaaaaataaaaaataaatataaagacaagataaataaataaaaaaaaaaataaaaaataataaaaaaaaaggaaaaaaaaaagaaaaataaaagtgaaaaataaaaaataaaaaaagagaaaagaaaaaagaaaaaaaaaaaaataaaagattaaaaaaaaagaatcgaaaaaaaaaaaaagagaagaaaaaaaattaaaaaagaaaaaaaagataaaataaaaagaaaaaacaaataataaaaaaaacaaaaaataaaaatatagaaaaaaaaaataaacaaataataaaaaatataaaaaataaaacaaaacaaagaagagaaaaaaaataaaaaataaaacaaaatgaaacaaaaatagaacaataaaatataaaaggaaaagaaatcaaaacaaaaaaataaaaaaaaaaatgtacaataaaaaagaaaaaaaaatgatacaaagacaaaagaataattaaataaacagaaaagaaaaaataaaaaataagaaaaaaaaaaaaaggatcacaaaaaaaagaaaaaaagaaataaaaaaaaataaaaaaaaaaggtagataagaaaaaataagaaaatcaataaaataaagatccagagaaaaaatataacaataaaaatgataacaaaaaaaaaaaaaataaatagaataaaaaaaataatgagaaaataaaataaataaaaaaaaaaaatagaaaaaaaaaaaagataaacaaaatgaaaaagaaataaaaaaaaaataaaaagagaaagaaaataataaaaaaagtaaaaaacaaaaaacaaatataaaaagaaaataagagataataaaaacataaaataaaaaaagaataaaataaaaaaaaatacaataagagataataaaaaaaa

SEQ ID NO: 13350 - DNA, 554 bp, Emericella nidulans
ctactcgggctgtcgctggagtcggtggccgttgcctcggtgttgctcgagtcgccggtcgcggtgctagtctcagaagtcactgcggttgaggtggtagtagtggtcgaagtggtggtggaagcagaagcattgaggcttccacagctgttcaaaccctccttgcacacctcgtcgccatcctgggtagtcgattgctggatgcactgcgcgtactcttcctggcagacaaagaaaggaatcgtgccctgatagagtcctacattggcgtcggtgccgttggagcaagtgcaggtgaaatcaagggtgtcctacagagtaaaatttagcgagtggataactttaccgaggattttagattcggacctgatcacagcggttgtcagtggcaacaccaccgcatatcttgggacagttgttgcgcttcgcgagacaccaagttgctacagaaattagcaggtttccttgacagccgacgaagaattatgctataccctctggtggttgagtcgaccctgttcagatcaaagcccgcggggagggttcaattggat

SEQ ID NO: 13351 - DNA, 118 bp, Emericella nidulans
acgaacgttcttgagcttgccgaactgtttaagcaatccggcgagaggagcgcagaggaatggaagaaggaggatgtctcgcggagtaaggcgcagacgaggagcatcaagagcaatc

SEQ ID NO: 13352 - DNA, 898 bp, Emericella nidulans
tcagggtcgtccaagcaccgctacaatatatagcacatgctggcctggtaggctgcaactgtggataactctgtaaaattctctgcaggaaggtggtaagacagcatataacttggctggcctgccagactggtttccgtgcctcagggatagagcaccacctgtcccactgcggtaagacagcttcggctcatgcaggcccttggcggcccacaagtacctctattgctcgcatggcttcaaatggtgcatcgaacgcagctcggctgtcaggttgctgcccagatggtgtggtagggtatttgccccatttatatgaatttacatggagccttctaaggggtttggaaggcccccttttcagcttccttctttttggcccgttggaaacttttgccaattggcttcaagaaattgccggtcattgcctcctgggaccttggtggattttaatctttggctgctttgcagatcccctgatggtttgttccaattaacggggaccccttgggaattctttccgttgtggctttaattacctgggttggtcaaggagccaaggatttttgggcaccgtacaaccttgtccccacaatttacaatttgccgggttttgaagtggctttcccaaaggtgggtttcgccaaaatattgccttccagaacaattttcccggttggaatatttggccgcatttttccccctggatgtgaaagggtttgttctctaacccctccagtttttgttttcacatactatatgtccggccctagttaatttccttatttcaggttaaaggccccggggccctaatagttttttctcaattttttccgaaaccccctcgttatttcagcgggggacccccttggattgatgggccctttaggtcttctgg

SEQ ID NO: 13353 - DNA, 1407 bp, Emericella nidulans
  unsure (1)..(1407): unsure at all n locations
aagaataaaatagaaagcaaaatataaagtaaaaagaaaaaagaaaaataaaaagaaaaacgctacaaaaaaaaaaaaaaaaaagaaaaaggaaaaaaactacacataagcagaggggaaacaaatttgtacnacaaanaaanaatttaaaggaaaaaaataccaaagaaaaagaataaaaagaaaaatacaaaaggaaaaaattaaaaaaaaaaataattatataaaaaaaaaggacaaaaaagaaaggaaaaaaagcaagaggggaaaaataagagagaaaaaaacaaaaaaagaggaacataaacaaaaaaaacaaataaagacaaataaaaaaaaaaaaaatagaaggaaagaaaaaaaaaaaaaagagaaacaagaaagaaaaaaagaagaaagaaaaaaagataaaaagagaagaaaacaaaaaaaaaagaaggaaaagacaaaaagaaagagaaaaaacaaaaaggaaaaaaaaagaaaaaaaagaagagaaaaaagaaaatgaaaaataacaacgaacaaaacaaaataagaaagaaaaaaaagagagaaagaaagaaaaagaagagaatggaaaaaaagaaaaagaaaaaagatagaaaaaaaggaaagaaaaaaaacaaaagaaagaaaagaagagaaaagaataaaacagaaaatagaacgaaaaaaagaaaagaaaaaagaaacagaagtagataaagataagaaaaaaaaataaaatgaataaaaaaacaaaaagaacacacaagtgaaacaaaagatcaaagagaaggagaagaaaaagaaaaaaaatagaggatagaaaaaaaaaaaagaacaaaaaagaaaacaagaaaagaaaacaaagaagaaaaaaaaaacacacaagaaagaataaacaaagaagaaaaggaagaagaacgaaaaaaaacaaagaaaaggaaaaaaaaaaaacgagaagaaagcaaaaaagaaatgaaaaaaaaaaaaaggaaaaacaaagaaaaaaaaaagaaaacaaaaaaacaaaaagaaaatagagaataaaaaaaaaataaaccaagaagaggaaaaaaaaaaacaaaaaacaaagagcaacagaaaaaaacaaaacgagaggaaagaaaaactacaaagaaagagaaaagaaaaaaaaaaaggagaaaaaaagagaaagaaaaacgataaaataaaaaaaaagaataaataaaaactaaaagtacatgaaataaaaaaataaaaaaaaaaacaaagagacgaaaggagagaggaaaacataaaaaacaaagaaaagaagaaagaaaaagaaaagaaaaaaaaataaaaaaaaaagaaaaaagataaaaaaaaaagagaaaaaagaaagaaagagagaacagagaaaaagaaaataataacaagtgaaacaaaaataagaaa

SEQ ID NO: 13354 - DNA, 692 bp, Emericella nidulans
agcagcgagtgccttatcttgctcgtcccgagattcatatacacacgaataatagaggaaatgaaagtgaatcgggcccatgctacttgcaatatcacttacaaaaacctcaaagaatgagacgcgacaggacgaacatctcaccatgcagtgcaagagataaaccgctgttcgtagagtacattttggaaatggcagttcggctcataactgaggcaatgggtatcgaacagctatttcgttatgctgccagcaagctgaccatgcgcagagcctgccgtatacgtcttcctggaaggagcagatccaagcaccatggattatgataggaaagcatctgcatggcaactttctctaaactctaggtggcatcgagtggtggagttgattttgagtagctggaggactctggttcttagattgggaactgaccttgctctcaagcagtttgaggtagatacataattgggtgatctgatcggcactaccttatcgtaagctttacttgctacttatctggtttactttagaaacgccattccaaaagcaagccgaacgcgaaccctacccacaaatttcgataggacaaaaacaacctgcagaagcgacgggcatccgctaagcctatctaccgaattacttgctcttcatagattatataacgatccctatagtgagtcgtattatcggcg

SEQ ID NO: 13355 - DNA, 554 bp, Emericella nidulans
  unsure (1)..(554): unsure at all n locations
ctattttttttgtttannntcttcttttttttttttttttttttctttttcttncaactttcttttttttttttctgtatctttttttttttttaatctcttttatccttttctttttttattttgtttttttaactcattcttcctnttttttttttctttttcnntatctttttttctttttctttttncttttcanctttttctttncttttttattttctttttcnnctgttttcattttttcccnnnttgttttttatttttnnntttttttttttttgtattcttttttgttttttncttttattcttttttattgttttttttttttttttttttttttcttttttttttttnnattttttattatcttctgtttttttcatcttttttttcnctttttttttttttctttttttttttttcnttttttnattcttctttttttttanatttttttcttttntttctttttttttcttttttntctttctttttttcnatttttttttttttttttttcttttttttttnctttttttcaatttttt

SEQ ID NO: 13356 - DNA, 111 bp, Emericella nidulans
aaaaaggcagcaaataaacacaaaagcaaaaaaaagcaaaaaaaaaaaaaaaaaaaaaacgataaaaaaaaaaaaaacacaaaaaaggtaaaagacaaaaaaaacgaaaaa

SEQ ID NO: 13357 - DNA, 644 bp, Emericella nidulans
tctcaggacaatcttaggttggctaagcagtctgctgcagacttgccccgactgcggacagccaacagcagcactggttgaaccggagggttctccgagcttagcatgtgatgtcagatgccggccacggtccagcaatcacattcagcaccacactactgttaggctgtcaggctgtctcatcaatgatgtttgctttagtgacagggatggcctgactgctgatcaatcaattgactgcattaggtggctttgggcatttttccgagcggtcctagaatcctgggcatcctgggctgatgtactccgtagaggaatagttatacagagaaccgggcttgatgattaacgaccgtcaggccggggtacttttgaaagaggtttctgttatacaaagtagagtcaacccagctcggactggactttcctttacatcagatactattctcgtctttgcttctcatgtgctaatctccttggctgtcccttggcccgggttcccgtacggatagaaaattcacgggaaagctctcgagtggtatcagcgactccatctttgcctaaccataatccggccaccaggcttcgttacagcgacctccatgtaattctccattgacgacccttcagtttcatcattacat

SEQ ID NO: 13358 - DNA, 1074 bp, Emericella nidulans
gctatcgaataaacactactatagggagacccaagcttaggatctgcggaaacgccgtttcctctggtattacgattcatacgtgcagctcatccagagcgaatcagcgaaagagaccatcacacccaagctcccgttccaccgaatgccctttgaaagccatggcaataccatggacggtcattttgactacccagagctccagcaacgactaatgtaccttaaaggcaagatcatggacgaaaccaagaactggcaggcacaggggctagaagccaaaaagaacgaactaggcatcgcagtcaacctccagaggcagtacgagcaaatcgttgaaaccctgaaaaaccacaaaaactactcgattgatttgactcttgtcaacggtaacccctttctctggaagctcacgtactttggccgcccaaccacacccctggagggcggcattatcaagatccgtatccacctgagtccccgatttcccgaagaacagccccgtattttcgtcgagacgcgcctcttccacgtccgggtgtcaaaggagggcgtcctatgctattttccccgaagaatcgaggagatgcgtcaacacgttgaagcgatcgttgccgtgttagaggagcaagagcccccttatgatccgcgcacaacggtcaatattgaagcagcgaaactgttctggggttcaccagaggaccgtaagaagtacaaaaggacgctgcggagggatgtggagaggtctgttgagtaagtcacctacctagcctattagcggatatatatgagttatcatattgatgttggttgcatcgcacagggatgcttttgagtaaataccaacctttatgccttggtatggagattcaaatcggtcaggccggcgtaagattgggtgcctgtccataaaacaatggaagaagaacaccaagaagaacaaggatgcctgcaaggatgacgctactgcgctctttcacttaaaccctctatcactgtttttccgcgcaacacggctcttatgtcattgctgattccttgacgactgggatactgtgaagtgtgccggggcgtacc

SEQ ID NO: 13359 - DNA, 1154 bp, Emericella nidulans
atccgcggccgcaattaaccctcactaaagggatcggaaaagggttgcaacgaaaggagagaatggtataatagaagaagtcatgatacagggcgattctttacttttaccagttacgtacaatactcaatgcaccagtttcatctccagccagctcccaactgaagagataaatgcagaccagttattgtggttagggcagacgcatagccaggcgctggccttgccaagcgtcttgcgtcctgattctatgtctacggcccgacaaaagatgataacgcggccacgactagaagcgttttaggatcttgaaacgcaacggtatagcttcagcatctggctgagttctattgactctaatgaggatgtggccatagtcgaaataagaacctcgttaaccgtttcccgcattcttctacatcattccaagaaaagaaaatagtcaaaaaagtggaaactttggaaacatgtaggtttatcatgcttctgagaagagggtaggcgtctctttcatagatggtgactgcatgcttcctaaaaggagttccttgaatccaacaaatccaaatgctccagctgcacccgattgtatctattctggcgagacacaccattgcgccgttgtagcaatatgagaaaattcaccggctctgagaaggaaaggacgacagtgttctaagctggtgtgggcgctcgattgacaaccgccatggagccagggtggcctggaggtcacactataatggggcagggggggcacaagatttgagggaccgggtagcgggtattatgggtagagctggggactcctcaaagtcccgtttttataggtttttcctcccaccgggagggcacttggacagggacccctactgggaaggcaattaaggggggggggtttttaaaaccccacccaccgctggttggtgcttcagatctttcccccccccctcccaaaaaaacacgaaaaaatcccttggaaataattggcggcctcacacccgtggggggctccacactcttggtaggggtggggaaataaacggagggggggggaggggtgaataaaaacaataccactatttttccttgtttttaagagccctccccttgtttttctgcctgccataaggggggggggccccctccccccc

SEQ ID NO: 13360 - DNA, 505 bp, Emericella nidulans
gaaacagcttccttatttgcactagatgttgcacactgtaggatgaagagctcgtgcagagattattgctaccagatagttatcgctatctggattcacactatgtgtaaacaactatgtacaattttgcgctgtccactttcctagatacagaatggcggggcgagcatcgccagtgccatccccaggcggaccggacagagcccaccggcagagccccggccccgacatatggcgaccgtggcgaatatccttgcggggctggggttcttcttttcatgagtaatggatctttccatcaatattccatgggatgacattcggggagtccatgcccgctccagctggccattggtgacgtgcaagctagcagcttgtcccggagataaccggtctttaaatcacgagtttcccggatacttgcatacatgcatacaccgtgtttgctctcccttcctactgatttgccctcctcatcttattcctcatgttgtctgctatcttc

SEQ ID NO: 13361 - DNA, 552 bp, Emericella nidulans
cgttcttgatgtcgacgatcacggtcgacggctgcacgcggtccactcgctcgcggtcccggtcacgatcacgatctcgctctcggtgccgctcgcggtcgcggcgggcacccgtcgaggcggaccgtttgatgtgcacgtcttcgtagagagtgccgtgcgggcttaaataggcgttgctgtgactaggcccatagcgactgcgggaaatggatcgtctcctaacatgcctacgggctccctccatcatagagtagtctgactctgagaagtcgtcttccgagtcggtgagctgggtgcggtgggcgtatcggggcattttgctctgaagagtaaccactgggtatttaaagactccgacgacaaatgataaatataagttttgtggcagatggaacacgagagctaatgcaaggtaagaacagtcagagagcagatacaagagcgatcgaggggccaaaatggcagacgagggacagtgcggctgaactgccaggcaccagtgaccagtcaaatagatgaatgtcacaggagatgaaacaggcgatgaga

SEQ ID NO: 13362 - DNA, 850 bp, Emericella nidulans
tggcctagtgtgctgtttgagcatacccattaagggttggccttgacgaagtcaatacccttctggatgttcttcttcaggtcaacgaggcaggcctcaaggagcttctgctcgaattcgttaacctcgccaacggggttgatcttctcagcaccgttggggccaagctcaaccttggaagcgaagaagttgacgccctggtccttgtagagagggctctcgacgaaagtgggctcaacgacacccttctcgccctgggcagcgcggaggagagactcggcgaagcgagcaccggccatggccatggagagagtggcggagccagcaccgtccttagccttgacaacctcgtcaccaccaaactggatgcggtggacaagctcatcgcgggtcttgccatcaatgttggggtggttggactgggaaagcaggggaacgatggtcacgccagagtgtccaccgacaacgggaacggcctccttagaggggtcggtaccctggacctgagagatgaagcgggaagcacggacgacatcaagggtggtgacaccaaagaggcgcttggggttgtagacgccagcggccttgaagacctcagagacgatggggacggtggagttgacctggaagaatcagcacgagttccatgtctccgagttccgatgacgcatacagggttagaaatgacgaggatgttagcctcgggggaagccttggcagcggccttagcaaggtcgcgaacgatggaagcgttggtgttgaagaggtctgtcatcaaaagatcagtgcctattcgtagattttcacagtcatcctccttaccgtcacgggtcatgccgggcttacgggg

SEQ ID NO: 13363 - DNA, 1036 bp, Emericella nidulans
ttactaggagattagacaggctatctgatatattaaaacttatattttccccgggtaaccacctagtttacagttttgatccgtttgggcattcacttggaatcgttaagtacataggccaccacagggtttaaacaccaacctctaatctttgatgcaacctgctcacaatttctatattgcctgttttatatctttgctgatactattccatgtcttactaggaaattaattacagtgacggtgcttattcagctttgacttctacttcacgtaaagcacgcattaacctactttaccgtccactgatagatccccttaacttcgtcattcctcaggaactggcatatgtttttggatcatgactatgcttatacacgtactctacctttggctgcattggtctactcttatagcgttcactgagtcatctttacatgatagtaccaactcttactctcacaacacaagtccctcctcactaaaatcttgtttcaaatatcgtctttttgtcggttttcgctccaccctatacctaggctttttccagaaactcggacttcttccccccgcatgcaagttttctcgagatctgttcacgttactctgatatgcgatttgacctcttatataatactggtctccatcctggtcctattctcgtgtactacaaaattctattacaaatctcatggattacactaatccttcttttctatttatcacatttaatatcgtcttctgccttctctaattctcaatcttctctcttacttttattaacctcttactattatacataattagaatctttttgcgcttccttcagatatcatcctattttactaactactcgtgttttatactctgtcgcttatatctctcccgcctctcctatgaaaatttaacttgctttttgtaactcgttatatcttcactatttactcttccaaatcctatattcaatcttatctgtctctctatattcgctcattccttatcatattgttcgtctccaattactcatctacctatt

SEQ ID NO: 13364 - DNA, 1050 bp, Emericella nidulans
  unsure (1)..(1050): unsure at all n locations
aaaaaaaaaaaatgaaattaaactaaaaaacaaagcccttcccccaaannaaaaagaaannnnnnatttgggagtttaaaaaaaaaaaaccgcccgttccccaccaacagaacaaaaaaaaaaaaaaaagcacaaaaaagaaaaaaaacaaaagagagagaagcaaacaaagcaaaagacgcaggaaaagaaaaaaaaaaagcaaaaaaacaaaagaaacaaacataaaacaaaacaacaaaaaaaaaaaaaggaaaaacaaaacgaaaaaaaacaaaacaaacaaaacaacagaaaacacacaaaaaaaaggaaaaaaaaacaaaaaaaaaaacagcaaaaaaagaagcaaaagaaaaagaaggtagaaaaaaaaaacaaccacagaagtaccaagaacaaaaacacacaaaaaaaaagaacaaaaaaaaaaaccacaacaaaaaaaaaaaataaaagcgaaaaaaaaaaaacaaactcaaaaaaacaaccaacgaaaaaaaagacccacaaaaaaacacgaaaaaaacaaaaaaagaaaacacaaaaaaaagccaagacaaaaaaaaaaaacaacaagactaaaaacaaaaaagagcgagaaaaaaacaaaacaaaaaaaaaaaaaaaaaaggaaaaaaaaaacaaacaacaaagagcaaaaaaaacaaaaaacccaacaactaacgcacaaaaaccaaaaaaaaaagaaaagaaaacaagcaaaacaaaaaaaacaaaaaaaaaaaaacagacaacacaaaaaaaaaaaaaagcaaaaaccaaaagaaaccaaaaacaagagaaacagacaaaaaaaaaacaaagaaacaaaacaccaaaaaaaacaaaaaacaacacgaaaaagaccaataaaaaaagaaaaaacaaaacaagaaaaccaaaaataagaacaagacaaacgaaaaaaacaaacgaaagacacacaaaaaaaaaaaaaccgggaaaggaacagaaaaaaacaaaagccccacatgaagaagagaaaacaaacacgaacaaacaaccgacaaagaaaagaaaaaaaaa

SEQ ID NO: 13365 - DNA, 782 bp, Emericella nidulans
gaaaagtgccaaatttacgctgcatggaatgtgccttgattgcaacataagattccacaagaatccaaatagaggacataaattgccggcagtctgcctgcatataatcaaattatcgtatggcaatgagaacagaactgtgtctcgtagactcagctgcaagagccattccgtcaagagcgcaccatccctcacagcagtcaccgtacccaaccgcgttgacagtgctggtacgattcctggcagcatgtcaataagcacttcgtaatcataaaggttgggatatgacagatcaaataataagagtagacatggagattggcgtaagctgttgtaattgttactcgaacatttaaggcagtttgacagattacctggtctcaatagctgtacgcctaaccaatgcattgcccgcttactcatagttcataatccacagctttgccagatcgtggttaggttcctcgtgccatcgttatcattcatcacccacaagagaaaaatccagtcggtaaagatgctaggctaggccagcccatcccgcaaaagccgccctagccctaggtaactcggcccttcaaaatatgtttcgctgctattacgtctattgccagtccttgctgactgtcgggaccagatgcaaatggtcagtcggcagttgcaaaagacagatggccgaataggaaacgttcatggcttccagattgggccctgattctggtatgctgcccgaataactgcctgattctatggcatgaagctggataaacaggtcttgtagt

SEQ ID NO: 13366 - DNA, 506 bp, Emericella nidulans
caagttcgcaaggtgctgggatcatctcgggcccttactctggcggagaagattctgtactctcatcttgacaatgcggaggagtcacttttgactggtacgaacaatggacgcgacatccgcggcaaggcggatctgaagctgaagcctgaccgcgttgcgatgcaggatgcgtctgcacaaatggccttgttgcagttcatgtcttgcggcttgccgtcgaccgcagttccggccagtattcactgtgaccatatgattgtgggtgagcgcggtgccgacaccgatctgccagcgtcgatccaaggaaacaaggaggtgttcgatttcttggagagcgcttcaaagagatacggaattgagttctggcctcccggtgctggtatcatccaccagagcgtcttggagaactattccgcccctggtcttatgatgctgggaacggatagtcatacacctaacgccggtgcgctgggtgccattgccatcggtgtcggtggcgctga

SEQ ID NO: 13367 - DNA, 659 bp, Emericella nidulans
agatttgtatagtccactgatatagtgcactgaaaagcagttccttcccctgctccactcggctgtcgatttttgtaccatgcttacccgctgatgtaggagatgggccaggcgggaactggtgttcccgagcatgacctttctagcgcacaaccactacagctaccacatatccacctccatattctgagtgcattacacgctgaacccgaaagccgtgtacatgcagcacataaatgagcgagagccggcgaccaaatgcgcgggcgcggacatgcctgctcccccgaatcatgacggtgctactggcgtgtgccctatgtatcgaacgatcctgtgccttacccgtccgaaaggtggagctttgctaccaatctataagttttttggggacagggttatccccggggcgtttatacccgccccggggtcccgacctcctgtcttatgccattaagcctgcaagacggactggcagagcaatatcgagcccaatgacgctgcttggtgaacttttcgttcagggaccgctggattttccccgacttggcatagcaaccccgtggatctgggtgcatacttctgtgacctgggaacgcgcttttagagtcagtttttcaatcgggcaacctttcagaagagttaaaaacctctagccc

SEQ ID NO: 13368 - DNA, 522 bp, Emericella nidulans
tacctccaacgagagaagttcccagagcaagagccagcgccatcatcagttgagatccaatacccaagtgtccttaaattgacatttatcctcataggtctgaacctgtctgtgttccttgtcggtcttgataacaccattctctccagcgctattcccaaaatcaccgaccgattccacgctctaggcgatgtcggctggtacgccagtgcttaccttctcacaaactgcgcctttcagcttttctggggcaagctatacacattctacaccgtgaaatgggtctaccttgtggctttgtttctgttcgagcttggctcgttggtttgtgccgttgcgccttcttcaacggccttgattggtggaggcgggcagtggctggtgttggcgctgggggcgtgacgaacggctcgttcctgctcattgccactcagtagagcgcgaagacgccaacgtttggtggactgctgggtctatgatgggcttgccgcgttgcggaccactatgggggggctttacgat

SEQ ID NO: 13369 - DNA, 829 bp, Emericella nidulans
acctccttcctaagatgtcaatgcgatcagactataaaaacttagggtgacaatgttcattaaaaaatagtgcaaaatagtaatagtgcttctgatcctaccgttctacgacgtcaagtcgcctcaccaatagctgtcttagattcggtgcgggagagcaaggcagattatctcatttttagtgcttgggtttaatctcaatctttcaaccagaattaggatgattattatgtctcgtacacaacgtgtccaacttcaacaataagactaacctaattgtaagtattacctgcatatcgccgtgctggttttctgcctcgccctcgaacctcgctggtgggaatcgcgacttgcttacattatctgactctcgagatccgcgcccccagccgactcccacatcatcccccgatcgccctctgctaccctttttagcgtcggctcgtcgctctctcacgccttcttgctccgcaatctgtatcctgtcacccctcaccccattcgaccggccctggcgagacgtagctcttccacagctggacttcgctcgcagctcttctccgtcctctccctagtctcatcacctgcgccgcaacccgtcacccccgtctcggcagcctgcagtcgctgctcagaccttcgtccgatccctaatcctccccgtattcctgtccctgagactctaccatcggttccgataccccccgcaggcatcatcagttcttacgacgctgccgttgcttcatctgcgtcggtcattgcccctcatcgcgtgtatacctcccagcgatcatctcgggctgtgaaagtagccggtttcccgacgaac

SEQ ID NO: 13370 - DNA, 827 bp, Emericella nidulans
tctatgctatgagatgacgagcgtttcgtccctggtcttagcggtcgatgctgagagacaccccagcatcagattcgcaagcaaccggaaaggaaggggccatcacagtttcaataactggttcgatcgcagcaaccgttcccattgacaaggtggcgtccgattgggatgaaaccccgaaggattgaaggctgaaccgcgttctccgtctctctttgtaccctgcaaagcgaaaaccagcaaaaagagagccaaaaaaaaaaaaaaaaaaaaaaaaaaaaaaaaaaaaaaaaaaaaaaaagacggcataaatataatgagagagaaagaaaagagaaagcaaagaaaagaaacccaggctggaccacgagtctgcggctccggtcgattgaggggtcaatgacagccccttcagggaaatttccacacagattggatccgttctcaggagcaggaactgtttcactcacccaacgaacgcctcatgggcccggctattttcgtaatgtgatggcggtccagcttcaacacgagctatgggcagagtgggccggtctgtgacgatccagatctatgaatatataagaatcggcgaacaccattggttaattctgtctatagtggactggatgtcccgtttctttttccgagtcggatttccagacactcaataaggccattgcgtaaagcccattctggtatagagaacggggttagtgggtgtgactgccagtccgggttctgtgctgcacctgccctctgccctatgccaccatggctcttgctcatttcatacagcgcaatgtttacctgcgcatccagtattc

SEQ ID NO: 13371 - DNA, 458 bp, Emericella nidulans
gtctacgatcgacttttggaccgtgcccggcgggagcaggacatcaaggtagtcatgaacgcggtgctggttctttgctatacgctctggttacgacatcagggggtcttttgcatgcgagccgcacgacaagcccagctggggttcagtatcaaaaaaatgcatgcgacactcaccttacacatgcagctcaccactagggcccgtgatcaatcaccagtcacggtactcccgcaaggcacatgattaccaacgctcttagctgtatactgacgtgcgttaccctctgttgcaagcgacgcataagcgctcgcccgcgaggagttatcgacagtgctagcccgacctgcaactgtggggcctccacaaccatgagcgggccgatttgtcggccatgggtgggcagggcatgagtgttgagggcgcacttctggtgaattggacgaccatgcatgtgc

SEQ ID NO: 13372 - DNA, 716 bp, Emericella nidulans
ggcgttacgatatttgtcgttgcctattttcgggactagaggcgttattgacaattcaaaatcaaatttttaggaatctttcagtacatccattacgtagaatctagttgcttagcccttgacatttaacctcatccacatcccaacatgttcaattccctcctcaacccacctccccagactttcatccgtaacgaagcccagtcgctcgtaaaacttctccacatcaacttgcgcatggaccagagtcaaacccttccacagcggagcttttgaaggatcccccccttcccgcttatagatctccaaaaacgactcattaatgtccccagcattctcctctgcccacgccattgccgtctccatcaaccgcctcgcaagcccacacccccgatacgacgccaaaaccgcaacccgcccgaacttgatatagggctcgtgctctaagtcatacccatccgctgttatatcgcgcccggtatctgacgtccccggcgcatagaccgcgacaaaactctcatgcgatgcatgaggcggcgggacaagccggagtgtaccaacagggagcttaatggtttttggctctatttctgctccctgtgcccccggatttgcggcttcagtatcatatataacccaatgccagctgcgggagtcatcctcatcgatctcgaattctggcggacatttttgctcatcgacaaagacttcaagcc

SEQ ID NO: 13373 - DNA, 1084 bp, Emericella nidulans
  unsure (1)..(1084): unsure at all n locations
attaaaaaaacaccccatccaaacaaaccgaagaaaaaagaaaaaaaaaaannnggggagaaaaaaaagaaaaaaaaaaacggcccgaaaaaccccccaaaaaacacacaaaaaaangaaaaagacgaaaaaaaacaaaacaaaaaaaaaaccaacaagaanncagaggaaaagaagcaaagaaaaaagagcaaaaaaaagagaaaaccaaaaaaaaaaaaagaaaagaaaaaaaaaaaaacaaaaacaaaaaagaaagaaaaagagaagaaaaaaaaacaaagaaaataaaaaaaaacgaaaaaaaaaaagaaaaacaaaaaaaaaagacaaaggaaaaacaaaaaaaaacaaaaaaaaaaaaaaaaaacaaaaaaaaaaaaaaaaaaagacaaagaaaaaaaaaacacaaaaagacggcacaagccaaaaaagaaaaagaaaaatcagcaaaacacaaaagaccaaacaaacgaaaaaaaaaaaaaaagntctcaggagaaaaaaaagaaaacgagaacacaagaaaaaacaaacaaagaaaaacaagacgaaaaaaaacacaaaaaacaaacacacagaaaaaagacaaacgaacaagaacaacagaaaaacgaaaaagagaaaaaagaaacacacaaacaagaaagaaaaacaaaaaaagacacaaagaacaaaaaaaaacaacaaaaaagaacaagaaaaacaacacacaaacagagaaaaaacaaaaaaagaaagaaaaacaaaaacaaaaacgaaaaagagaaacaaaaaaacaaaagaaagaaacagaaaaaaaaaaaaaagaaagacgatggagaagcaaacaaaaaaaaagaataaaaaaacgaagaaaaaagaaagaaaaacagagaaaaagcaaaaaaaagaaacaaaaacaaccaaaacagaaaccaacaggacacaagaaaaacaaccgaaacaaaaagaacaaggacaaaagagacacgaacaaagaaaaagagaaacagaaaaacaaaaacaaacaaaaacaacaaaaagacaaaacaaagagagaaaaaaagaaaaaaaacacgaacgaaaaacgaaaaaaaaaaac

SEQ ID NO: 13374 - DNA, 936 bp, Emericella nidulans
  unsure (1)..(936): unsure at all n locations
cccggaaaacagaaaggaacaaaattaaaaaaacctcccttccaaacaaaaaaaaaaaagagagggggtaaaaaaaaaaaacccgacgaaccccacccacacaaaaaagcaacacaagaaaccaaaacaagacaaaacacagacaaaaaaacaacacaaaaaaacaacaacaaacaaacaaaaaaccaaacaccaaacaaagacgaccaaaaacaaaaaacacaaacaagcaaaaaacaagaaaaaaaaccagacaaaacaacaaaccacaaaaaaaagacaggcacacaacaaaaaaccaaacaagcaacaaaaaaaaacaccacgaaaccaacaaaaaaaaagaccacaaaaaaaaaaaaacaaaacgcaaaacaaacaaacaaacagacaacaaaaacacaaaaaaagcacacaaaaaccaaaacaacaacaaaaccaaaaaaaacaacaaaacaacaaacaaacacacaaaacacccacaaaaaaaaacaaaaacacacacaacagacaaaaacaaaccaaccaaaaccacccacacacacaaaagaacaacaacaaaaaaaaacaaaacaaaaaaaaccaaagaccaaaaaacgcaaacacccacaaaacaaaaaacacacacaacaaaaaaaaaaaaagaccaccaaccacccaacacaaccaaaacaaaccaaacaacaaaaaaaaacaaaaaaacaaccacaaaccacaaacaaaaaaaaaaaacaaaacgacacacaaaacaaacgcaaaaaaacaccaaaaacaaacaaaccaaaaaacaaaaaacaaaacaaaacacacaacaaccaacgaaaaacaaaaaanaaaacaacacacaaaaacaaaaacaccaaaagaacaaaaacaaaaaccacacaaaaaacagcaaaaacaaaacaaagaccaaaccaaagagaaaacagaaaa

SEQ ID NO: 13375 - DNA, 701 bp, Emericella nidulans
gcattctaattgacgattccttcgaagccagttcaggtccttttagtggaccttgggtggtccttgatatattcctcgctcacctcgcggccaatcatggaccccttaaggtcgaatgtggaatgaatatcgcgatgtggtgggaaaagattgttcatcacaacgaagtggatcttgcggccgtaggccatcttaactcggtggaggccgtaaaattgagagattaaagtgttcggattttgctccacgtgtttgtagtattcggggaggatctttcgcagcagtttgtgttcagcgtgatggatcgtcttgatgatatatttatagtcccttgagaagtagaagaagctgccactttttcctggagagcccagctccgagagaatgtacttgctagtgagtgacatcaagtagtcggctggatccaatcggaattttgcccgtagatgacggaaaacccagggcgcatagtccttaaacttgaagtcatactgggcggatggtgtcagttcattcccagttctgcagcaagacaaatgttagtagtgatcaatgattctggtgtccgtaaaaggccgaagcatacatatcgaaggagaacttatgtttggccttgaaatcagcaggagtcagttccctatccatttttgcatttatcctagacacggtgaaccggatcccagtgagcatgttgtaggagg

SEQ ID NO: 13376 - DNA, 1008 bp, Emericella nidulans
  unsure (1)..(1008): unsure at all n locations
acacaagaagccacaacacacaagccaaaacacaggacaagacgacaaagaaaaaaggacacaataaagaaccccaatcagataaagggggggactctgagaagacacggcncacctggagagccacacccgggcggcccggagcaaaacggccaggcaccacgaccccgattatacaagggacccgacaaggcaccccaggaggcagaaccaaccatgggcgcggaacaaaaggacgccaacgaccaaggcgaggaagaccgcaacatgcaggcccaagaggacaaccagacccagccagagaacgacccagcacaccacacagatcaccggaaggaacccggacgccacaagaacgagaaagccgccaacaccgggacagaagaggacacccgaacacaggccaacaaagcgccggaagcagaaccgcccagtaccgcaagctgaagaaccagggcaagcgaccaggagagcagcaagcccgaaccgcagacccagaacggcaccgagcacggaggagcaacccccaaaggccacaacaacacccccgcacgggacccgacaggcccccacgaaaagcaagcacaaagaacgcccccaagccaggggggagcacccacacaaaaaacgagggccaaaaagacaacaaagccaaacagacaaccgacgacccgaaccatgtccaaggaaggaaggcgagggccccccggaaccaaaagacccgaagaaggaaaaagcccaggagcgcaaacaccccaacgcgagcaacaaaagccagcacccccaagaaaaagaccaagcaacctacacccgaaggagggcacccacaagccaaggcaaagatcacaaacccgagaatacaaaccaggggagaggaccccaacaaggaaggcacaccaacaagaccgggccaaacaaaaaacggcccaagaaaaagaatagaccacgacacaaaaaaaaagggaggcaagaacaaccaacgacgaggaaccaaaaaagaaaaaaaac

SEQ ID NO: 13377 - DNA, 760 bp, Emericella nidulans
cattaaccgcgaagcgggagaatcgcatttgagaggatcggcgtaaccatcactaactttccttgttcatcatagaccctgtcggggcgggggtacatgagccctccctttacaaccgtcgggttgagatatttgtccgcgtacgccagtagacgattcttcgtatcctcgtctcccatctctgcagcccaggctgcaatccagccaaagaggcccccggatccgataagtcgccgattgagcgggctatactcaataccccccgtcacaacggaaaatgtcccgtcctcttgcgcaacgacagaaccgctgatccgttcgttgtagactctctgcacgagctcgtggttccatgcgttcatcatcagtccgcaccatgcgtcgccactgggtccggggacgacgaccgagcgcttgatgtcgctgcggtagaaggtgttaaaaccaccttctggcgttatgatgcctccaccagcatcttcccaggctttgacgtatcccttggtgacttcagaggcgacatcggtttccccggacagcgcatcattcagtcggaaccccaggataggaacctggttgcagatctggtagatacaccagggctcacacgcgaccccaatgtacccctcctgcaccatattccagtacacctggtcgttgatagatttctggtcccactcaaacttatacccatcggctggcccaaaaaggaaagcatcgtacaccatcgtcagcgcgccgggcttcgtgtaccgatcat

SEQ ID NO: 13378 - DNA, 730 bp, Emericella nidulans
cttttgtcttcccactcacgtctccgcggaagctcatcatttcgtgttccctggtttatgggaagactgctcggatgtgctgcgggattgcgtaaagcgcaaatacagcttgacgccatatctccttgctgaagcgttgaacggacatagatccggaacaccgctaatgaggcccatgttcatggaattcccggaagatctgaacacgtacccgcttgacacgcagtatatgtttggctcgaatttactggttgcgccagtgttttcggacgagggaatcgttacgttttatgttccaagaacgccggaggaggaaggaagaaagcagtggatctcctggttcgaccacggcaagaaatacgaaggtggacggtggtatacagagacacacggtttcgataccctgccaatcctcattcgtcctggctctgtgacgcccattaactacaagcttgagaagccggagggaaatccgttggatgggctggagatcttggtgaatggatctatcgataaggaggtggaaattgagattgtggatcccgagacaacgcataaggttttgaaggttatgactgtttcggagagagagacagagaacggagttgaagtgattgcaagacttgatggggttgatggtaatgagaacagcgtgaaagccaattgggttgggcatggagtaactaagagaacagggtagataggtcgaatgagtcaaagctcttccaag

SEQ ID NO: 13379 - DNA, 567 bp, Emericella nidulans
tggcaagtgggcgcctatcctgtctgatcgtgtctgactcctcatatctcggcgtgtgtttggttgggaaattggacacgaagtgttgaggaggttcgtacctgctggcctaagctctacatggatccatttctgatgtgctgtgccaagccggtgagcggcacggggcctaccacgcggctgggcggcgcttcgcactggggacccatctggtgatagatttcttgtctaacgtgtttatcgatcgtgcgttgtggaggcttgatgtgactaacttgatgggcaggatcatagatattaacttttattgcggtggcgttgctaatttttctgtcatgccaactcactgtcgaggctgatctggctgcgctgcgaagatacatgtttgacggaatgattgaagtttgccctatcctaatgcacattgttccgtccttcatttccctagttgttgcacggttgcaaataacttgggcgcataaatttgggaacaacccccttactagttatgtattgccttagctcatttggaggggttcgctgataacaaaacttgtacctttggat

SEQ ID NO: 13380 - DNA, 594 bp, Emericella nidulans
gcagtctcggctacaaggagtttctcgaccggcacgggctcagaccgagagatcggggacaaggcgacacgcaattgccctaatgtgagacccagggcactatgaatctttcctttatccagtgacacgtcgaagcgggcttgagcctcatgggcctctatcttaaagacgtgattgtcaaagaaggtgctcgggaacaccccaatgtgaattgtatggatggtcacaaccactccagtttggagagaaataggtgtcagctcggtttctccttcggcttgctttgtcgccttttgagatgattcgagtcgatcagagaaaatcgagccctttcggcgaatgtatctttcaatttctctcagtgacgactcgtaagctgcttgcttgtcttgcataagcctttgccaagcctggattagggcaagggattgcgaggcagttaaagtcgtgcagaacacttgtacttcaccaccatctaggatactaaataatcgctcattcgcttcgtcggatgaacctccaacattgtacatcaagaagtcgaaggacgctatatgtgcgatcaagaagggctggtagtcaaaggagactttt

SEQ ID NO: 13381 - DNA, 886 bp, Emericella nidulans
  unsure (1)..(886): unsure at all n locations
accagtactgctcctttgcacaaccccagaagattaaaaatgcttcaatatctgcagcgnagccaagggaaanacaaatgttcccttttgaaaagggggcaccataggcccccagaagaaaaaagagacaagcaagaagggaaacacacccaacacaataaggaaaaccataaattagaaaaagggataaccaaaccaaacaaacaaaacaagtaaacaaaatattgtaggaaaaacagcaagaaaaggcaactaagaaacagacaaaaaaaaaaaaagaagaaaaattaaaaaaaaataaccaaaaaaaaaataaaaaaaaaacaaataaaaaaaaacaaataaaacaaaaaaaaacaaaaaaaaaacaaaaactaacaacaaaaaaaacaataaaaaaaaaaaaacccaaacgacacacaaaaacaaaaaaaaaggtaaagaccaaaccataaacaaatacaaaaaaataaaaaaaataaatactaaaaaaaaaaaaaaaaaaaaaataataaataaaataaaaaataaaaaaaaaaaataaaaatcattagaaaaaaaaataaaaataaaaaattaaaaaaaaacaaaaaaacaaataaaataaaaaaaaaaacactaaaaaaaaaacaataaaaataaaaacacaacaacaaaaaaaaaaacatacaaaatacaaaaaacaaaaaaaactaaaaaaatacaaaaataaaaacccaataaaaacaaaaaaaaaaagagaaaaaaataaaacaagaaaaaaaaagaattaacaaaaaaaaaaataacacataaaacataaagaggaaaaaaaatataaaaaaaaaaaaaaatattcaaaactaaaaaaaacataaactataaaaaaacaaaaaaaaaaaaaaaa

SEQ ID NO: 13382 - DNA, 618 bp, Emericella nidulans
  unsure (1)..(618): unsure at all n locations
tctccgctgagattctcatcctacgcctcatgcacagaacatctacatacatcctgggctacagcacttacttttttctaaccggaggtcattatgaacctggccattgacagaactagtacgctagcccgcacatgcatggatgaccgttgacgccaatggaccataagccctactggtgcggaatgagctgattacaaatggtgaacccaggatgaggaatctattaaggattgaggggagttaggcgacaagatctattgtaagatgaggaatggctggcttgacaaccttgctcaaggtaaagcggaggattcttatactaatgaggctctctattgagccattatcgctgtggattcccgacggcgtgctgttactgagcatnacatgcaccttaatctagattttgccgaggtagaacttggacctacaatgtaaagagcgttttgagaatgcactgcttaataacttcagagatggagtacctcgtacaggctttatgatgcaggattacgctagacttgaacagattcgagcgccagttgacatgttgactgctgcacgttaggtaagatatattggagctgcagccgacgagtgctatttatcaaatgc

SEQ ID NO: 13383 - DNA, 1232 bp, Emericella nidulans
aactgaatgttggtttcagcggacggtcttcgctagtgctctggaaaatagccggaggccgcgcagtaccaggtcttataccctgagtttgtactaatgcagtcgctgccaagcctgtgcttgaagcaactcacggcgtatttgtgacttgcgctccgacggcgagcagagttgaagaatcaaatcaaaatacgccagagaggagaattgaagacgaagagagggcggctgtcctttaataataataacagattagttctaatgaactgcattgtacctaattaaaagggagtcaagcacagattgcgccatcgcaagcaatggaacgggcgtatgatatcatgggcaggagcggggcaccaaccgaatttctccccgccaacgtctatatcacctcgtcgcagcccacgagagaccacgtaattttttttgtccctagaatctcacgctattcagcaagataacaagccatgtcgaacaaattcaagatcaccgacctgctgcctcttccaaactcgtcggtgcaagattccgcggcttggattcggagtctatcgctcgccagcaacacaaaccaagcagtcagtcctcaaggcccttgaaacaggataccgtcatatcgacactgcgcagttctacgcgaacgagatggaggttggagacgcgattcatgaatccggtcttcctcgcagcgagatcttcgtcaccaccaagactctcgccccggcaggctcgcctgaagcagcctacgaaaaaattattgaaagtgtgaataagattggcggtaaagatggacaccgcggaccctgttcctcatacacagctcaagctcttggatcttcaggccggaaggggctattggcagcgcctggaaagtgctagagggagggagaccctgagtttcgggtcaggattttcggggaaacattccgaggggcgaagagcgcaaggcttgccgcccagtgaccccttgagcagcgccggaacttgggccaagcttctagtttctccactgagcgttgccccaagggtacggagtctgcggaggggactttcccccttccccctctggtttgggccaccccccttgttgccatatttcttcaaagtttgccctattttagttttcctccgctctttaccgggcccttcttttctcctttttctttctttccctccttcccggaggcccccccttttctacttctccctttatcctcctgagtgggtcc

SEQ ID NO: 13384 - DNA, 1038 bp, Emericella nidulans
tcggcgaggccccatttaaggatagctgtgaggtgatgttttgatcggactgccaaagaaaaccaaaacaacccaaggggcaaattttaaaaccaatttcccccacaatatcccccaccaaccataaaacaaaaaccaaaaaaataacaaaaaaaccttaaacacaaaaataccaaacccctaaccataaacaacaaccggaccccacaaaaaaacaacccatcaaaaaaatccaaaagaaaagcacccaaaatcaaaaccatacaccatcacagacaaaaagccacaactaaaaaacaaaccaacaaataacaaaaccaacaaaacaaacctatcaaaacaccccacacaaaaacactcaaactaaaaaaccctactacaaacaacaaccaaacaatacaacctcaccaaacaaacccaaacaaacctcaacaccacatcaacacctaaataaacctcaaccacccccctaaagaatagtacaaaagcgaggccccaaaaacggaaaaagaccgacataaacaacccagacaccataacccccaaaataacatcaccaaaacgaaaacgacccacaaatactacaaacaaagctaacacctggaaaaaaaaacccacaaaaaaccaaccaaccgaacaaaaaaataaaaaaaggacctaaaaaataaatcgaaacaataccaaacaattgtaattaaaacaaaaaaaaaaatatcaaacaacacaaacacaaataccataaaataccacaaaaatatacaacacccaccaatacccaataacaacccctccaacatatctaaaacaccacattccaaaaagtacatataaaatataaaccacaacatcacaatacataaatatccaaaacattcaaaccaaaactccccaaacacccaaatccacagaccccaattatcccaaacaacacactaatcaaaccacacaccaaacacacaaacaaactaccttaaaaacccaaccaaaacaccacaaccacttaacactcaactaaactataacacccaaaaccacctc

SEQ ID NO: 13385 - DNA, 845 bp, Emericella nidulans
  unsure (1)..(845): unsure at all n locations
gccgacgtctatggcgacctttcggcttgctgcctggaccccgataagctggcgagcccgcatgatatgaatcatgttgatcagcattaggcgaagaacttggctggatgggagaagaagccgtcgagatagtcggtgtctgcagcctgcctcgtacaggctcggagtcgctataactgactgattttccgctgaggcgagggaaaaccccagcgcacggtgggggccccgcccttatttcctggggtcccgaaccctataatttggcccccttggcccggggtccaaatggggggcccccttaatttggggccccccccccccgggtgggggggccccccaaaaaaaattttttttttttgggggggggggcccaaaaaaaaaaaaacccccgggggtcttttttgggggggggggggggcccccctcgggagaaggccccctcttgtttggggggggccctttttttaaacaccctacaaaaaaaaagaggcgttttttttttttctccaaaaaccccccccaataaaggggcgcttcaaaaaaaaaaccccccgttttgtgggggggtggtttaaccccccccctctttttttctcctctcttggagggcgaaaatacctccgcggaaaaaaatcaagggggctttttattccctccccccctttctcttcttttttcgcgcgcgcctccccaagacgaccccctacaccccccccccttggtattcttattttatttttcttcntctntctgtcgttcctcccttctccatataaataccacgtcccctccctacatctctcattattttattttatcatctcttcatagatacatacctt

SEQ ID NO: 13386 - DNA, 661 bp, Emericella nidulans
  unsure (1)..(661): unsure at all n locations
aaaaaaaaaaaaaaaaaagaaagacaaaaatcaagaaacaaaaaaacaaaaaaaaaaaaaaaataaaacaaatataaaaaaaaaaaagcaaggcgaaattgagaaacacngnnnnttaacaaaaaggaccggaacaaaagaacaaaagcggaaagactagcagaaggaagatttttttcgaacagaaaacaaaaagagaaaaggaggaaggcggaggaaagggataacaaagaagaagaacatgccgacactgagataaaaaagaagcgcctatacagagaaaaggctgacagggacaagagtaaacgacccaataccactagaaaagcagggggcatgaaccataaaagtgcaacaacgagggaaaagaaaactaacaacaagaaaaaggggaaaaagaaagaacgcgccaaacaggaaaaggagccaaaatgaacaaagcacaaattagaacacgatgagaagaacgggaaagaaaaacgaaggcagaactgggagtaaaaacaagaataacaacacagggactaacaaaagagggggacaggaaggggagcaagaacgaaagagacgggaaaaagggaaaaaaaaaaagaccgtcccaaaaaaaaacccaaaggaaaagtacaaaaactattaagcaacaaaacacacaaggaaaaca

SEQ ID NO: 13387 - DNA, 761 bp, Emericella nidulans
aacgagtgctcctgctgtcccgagtacctgaacaagatggccgacaaagctgctgactgaataagtccccgtgggaactaaaagggggtgtcttagtagatgctaggtgtcttttaatatattatatttttatgattaatattatgaataaattatataaaattgtacatataaataatatgttattataatttttataaaagaaaatacataattgcaatattatcattatttaattaaataaattttgataaatatataatttttagaaaatgtaaataatatgtctaagtaaattatttttaaacactaatattattattaaaatatatttaaattacaataaaaatcgattaacttattcattaacataaatttatcgattaattacatttaaatttaattaattaagtattaaatgttctatattatgagtataattatattacaataatcttaattttgtatttcaatgtatttaatacttaaagatattttacgtcaattattacatctattaatatattattaccctatttgaacaattaatgtaaataaatttaaacatattataattaaatgattattcgtttattaataaaataatattatctagacacatagatagtttattttaattatagactaattataattaaattacaatgtaaaaattgatatatgtagttaagtattatgtaaacataatattaattaattcaaaagattaatcaatatatcacaatttgatagtaatacaa

SEQ ID NO: 13388 - DNA, 508 bp, Emericella nidulans
actcctcgcgcactgaaccggtattgataccccgaacctgttaatacttggtaggcgaaccggatgctgcgtggatggacgagacaacggggactctcctgcagaaggagcatgcaccgagacaaggcatcactgcgcctgcctacgaagttgcgaatattgttctgcgcccccagaacgcaggactgttgcaaccactactcctgatcaaaggctatcccatacggctccagcaacgctcatgagacaagagagagatggcagatccgatgacctctacgagcgcgcagctgcactgacaacagcaaaccagaggtacctctaatgctgcgcccgacagaacgctcaacatgaacagagcacagcaccgtcctatggaccgacaccgacgcgcagggatacacgcgcagtgaccatcacgcctaggtaagaacacataagaatgctgcatacaggaccagagaggacactctgacccaccatcgctaaacgagcccgactcgagcgc

SEQ ID NO: 13389 - DNA, 140 bp, Emericella nidulans
aaaaaaaaaaaaaaaaaaagaaaaaaaaaaacaggaaaaaataaagataaaaaaaataaacataaaaaaaaaaaaagaataatcaaagcaactataaaaaaattagcgaaccacgaggaaccacaaagtaggtaccacca

SEQ ID NO: 13390 - DNA, 1070 bp, Emericella nidulans
tataggctcatcccatgccagctcgcgtcccaaaacctccctcgaccgtcccagggacggtggagacgaagagacaacacgcccaccgaacttgcgcacgctcatccttcaattcgaagttgaggacactggccccggaattccgcagcacctgcaaaaccgcgtctttgaaccgtttgtgcaaggtgacctccgtctaaatcgcaaatatggtggcacgggcttgggtttgagtatctgctcgcaactggccaggctcatgagaggtcagatacagctaaatagtgagcagggacggggcacgctatttttagtccggatcccgttgggttttgtcaaggaatctcccccaagcaccgccagctcgatgacgagtctagccgggtcgcggacgtcgagcgttttctcgttggatgacctggcgagtgtcactaaggcgccgtctaatcatagcgtcgcatctcaacatgaatcaacgaagagcaatgctgaaatacaggactcacagcctcgcttggttggcttgagtcaaccattctttgcgccgcctgttccgcaagctaaggacaatgggctgaagaagataagagcgttggtagctgaggataatgtggttaaccaggaagtggttctaaggtatgcactactttttcgattcgtatcatgtactgacccctgcagaatgctggcgttagaagacgtctatgacgtgactgtggtcaaagacggccaagaggcttatgacaccgtgaaagccaatatggaggagggcaaagtattcgatttgatttttatggatattcaggtaccgcaccctctatactaatctcaggcttttgctaacgtttgtaagatgccaaacctagacggcattgaaagcccccgtcttatccgtcaaatgggctgttcggcccccatcgtcgcgctgagcgcattctcagaagccagcaatatcaaagatcgcatgaactcgggaatgcacatgtttatgaggtccgtcttgcgacaatcattttggcgctccgggcatgaaggccttccgactttccagtgtagacgacggtctccgg

SEQ ID NO: 13391 - DNA, 393 bp, Emericella nidulans
  unsure (1)..(393): unsure at all n locations
gcagcaganagccggaaataaagacagagcgcccaacaattgaaagacagcgcacaacaccgaagagggggcgaccgaacgcaccgacgccgagacgccaccccagccagaanagaacgngcgcaagacagccnacaaaggcccccggcaaaagcaaacaagaaccacagaacgcccacgcggagcacgangcaggagacacaaacaacgccggccgagccagcaancaggcaggacgaagcaccagacggaagaaacgaggaagggcaaaggcagcnaaacgggcgcncaacacgagaacagacccaagccaaaaccagaccccggcagccacaagcagacgccgccccaaacaaaagcacacacgggcaggacccaggcaacaacggccag

SEQ ID NO: 13392 - DNA, 395 bp, Emericella nidulans
  unsure (1)..(395): unsure at all n locations
cccgacagggaccacaccgagagggcaacgaacagcacgagttcnccaaccacggaaacgagaccgacgggcggggaaaacggcaacgccgcgganaccagcggcagacacacacgcgaacgacaagaccccccgaaggagcagcaaggacacgacggacaagcagagggcgagcgcaccaccggggcacaggaaggccaggaaaccgccgcgggacaggcaaagcgagacagcagcgaaaanggaccccaaagcgcgcaggcggacccaaaggaaggccaaacgaggggaacacgccaggcacaggggcggcacgcgcaaacccgcccgngacgcaacagggcaagcacaagacccgcaacccgggagacaaaagcaaaggcggaagccacgcc

SEQ ID NO: 13393 - DNA, 1133 bp, Emericella nidulans
gcgagctaaccagacgaggcagatagtgtagacagccatcgagataatgggagcgcatgccttttctcgaagagtttcaggtagactaccgaagaccggatgaaacggtgccgattttgtctcagagccagcccctaaagaaggaactcgacgcagattccaacggatctagtcaggccagctgtgctacctgcaacctcgttcggataccggtcgataatgaggaccaagatgtcacatggatcagctgtgaccgatgcaaacgctggtttcatatggtatgcgctggcttcaaaaatgatcgcgagaccaggacagtccataaattcatttgcaaaacttgtcggactattcacggccagaccactttttgcagaaagtcgactcgtgttcgcacctcgatcgattatgcacggtctcaatcagggcctgacgaagtccgtaacagactggttagaacataagttcattttacctattaagcaaaataagatccgcttttctcctggaacttgcccgcatgcccccggaacttgcactgctagtattttagaaaggaatggtttacagaacaatctcatcccgctagttcaacacttgcaagataccgccaccaacccgagttgatctttgttaaatcccccgccaagaatgtctcggctttataccttcgcatgtgactatgaccgttcggtgggcaaataatcaaatgtatccgagggtgacggaggagttaagtttttgcccgaaaagggggggtcatttatacactgggaataacttatctctaaggggctttaggagtctgaaatttcaattttaactcggttaaaaactagagataccctccatgggtttttttcttatcttcttggtaatctcattactacttgttcttttttcatctattcctattctttattaggttgttcttctttttattctctgggtattattcttcttcataaaggtggatcatcgtttctttcttttcaccattttatactatactttatcactacttttcttaacactttatcacttctctgatacatattttgtttattatcttacttttattatccccaatatctccaattcactctctattttcttttcttttttttcatatt

SEQ ID NO: 13394 - DNA, 636 bp, Emericella nidulans
ttccttcttacaatggcaaaacggaagctcaccataatggggattttcgcggccaattaaatgacgagctgaaagatgcgcctggagagaaatcggaaaagaaccacgagaggcgacatgagaagaagcctggatcataccggggtcaccggccaggacaggagttgcctccgcctcctgaagcacctaacagcatgaaggctcttccgacaaacgagctagaggacttgctcacaagacgaagcaacacgcgtgtgaggctggccaatgcgatgcagccactatacgtcctgttacgggaccgtcgaattcgaccgaatacacggcattataaggcggttatacagagcaactcagatcctgagcatggatcgtctaaaacagtgcggaagttgcttgtggaaatggaaaagtataacattcccgttgacgctggcccactccgtgcagcactgctggtacgtcaattcttgaactcgatgtgatgtttaagctgatgcgtttgtctacaaggcgcttgctgttcatcccgactatctcctgcggcaggacgtgttgcgagccctacgggatcgatgggacaccctcaacgaggatgactggcattatgtggtggcgggcttggtcaggtatgag

SEQ ID NO: 13395 - DNA, 931 bp, Emericella nidulans
gaaccgcttgcgcttgagatcccctactaatttccccaaagcgtaaccatgtgtgaataaattttgtgctagtttggttgcagccacgagtaagtcttcccttgttattgtgtagccagaatgccgcaaaacttccatgcctaagcgaactgttgagagtacgtttcgatttctgactgtgttagcctggaagtgcttgtcccaaccttgtttctgagcatgaacgcccgcaagccaacatgttagttgaagcatcagggcgattagcagcatgatatcaaaacgctctgagctgctcgttcggctatggcgtaggcctagtccgtaggcaggacttttcaagtctcggaaggtttcttcaatctgcattcgcttcgaatagatattaacaagttgtttgggtgttcgaatttcaacaggtaagttagttgctagaacccatggctcctttgccgacgctgagtagattttaagtgacgggtggtgacaatgagtccgtgtcgagcgcttattttttcgcctttagagcgagatttattccatagaaattggcatgagattggattgctttagtcagctcttatagctaaagtcttgagtgctagatgactatcatgaaggtgttgtagggttcaggtttccctcctaggctgatattgacttttcttttactggttaacagaccaacccatttttaccgttattccagggctttaaacccttacttccaatgggggggtgtctctggaagctccaaggccctaaaaggtaagttttttatatttaaaaggagctttttaagagaaaaccacgggggagtcaaaaacatttttcaaatacccaaacaggttttccaaatcgtccgtaaagttttgtttgctgtgtctctttcttatactaaaatcattacacatttttattattgttttcg

SEQ ID NO: 13396 - DNA, 523 bp, Emericella nidulans
aggaaacctaactgagacctaccaaggcttgcgccacacacgagcccaagagacccaaaccaccacggccataaagattttggtcaacacacggagcaccgaccaactggggcaccccaaccacaacgcacaaaaaaagaccctgtgtactgagacagaatctttcccgacactgcggaagcaacacaacgctgcagtcctaacacaactataccaccggtaaaaagcgtggccctggcacacattgtaaaggggcgctggaaacggaaaacgccggatgggcctcggccatgctgaaaaggcaagcaagagtgttcaaccagcgcctagaacgaccagacaaaggcctggaatgggacctgacagaactcaacggagcaaggaggaccacaatcaatgtaaggccgccacgcataatctaaaaacaaagggcatcatgactgacatccacccgggacaaggagcaacagcagcaagtgcttgaaacaaccggcccccagaacaaggaaggcctgcccaaccc

SEQ ID NO: 13397 - DNA, 1016 bp, Emericella nidulans
gactaactcataccatctggtatttccggtgaagccaattcagcaaaatcgactcattatgctcgccaacctccggtgcagcatccatcctggggcggaaccctcccctagggctgaatcctggcggaagaagggctggcacagtgcctcgggagtcttcacctcagtccaacgatttctcgcgcgaagctgcgtatgttcccagacgccctgcatgtcactcacattcgcattagcaatagcggcctcgtcaagccgacgtgtggcttcctcggcagtgatattggcgaaggatttgtgaataatctctttgagcgcgtcgcggttttggacgcgaagtgagttattcgagaagcgagcgtccgttataaggtcaggctgcgagaggacaagcgtgcagaatttagcccattctcgttcgttctggatacccaacatcaccgacccgttgcctgtctcgaagggcccgtaggggtagatagaggcgtgagaggcgccagcgggtacagggccgggggcgccgttgaaggcatagtacatggggaatcccatccattcgaccatgctctccagcatggaaatgtcaatgtggctgccacgaccggttttggagcgctgcatcagagccgctaggatgttgctgtaggcgatacatgccggatgcgatgtccgcaatcgaaatcccaactttggcaggttccttgccagtgcctgtaactgaaagcatcccctgcttcctgtgaacgaggagggtccactcctttttatgtcggggcgggccttttggtccgtatcgggaaatatcacacacagtcaggggcgcgggctttttttacagggtcgaaaataaagggcataataaaacattaacacggggcgggagtatttgcaaaactctttgtgttttgtgacaagacaataacatcttgggaacttgaggtttatcaaataacacccttcactctttttaaaagattccaacagacaaaaggggtgcgctttctctcctgaatttt

SEQ ID NO: 13398 - DNA, 711 bp, Emericella nidulans
atccggccgataatacgactactatagggatcgtggtcaaaaacaaaaataaaaatcacagtagtgagaccgtgagactcgtatcatttccctcctcaggagagcccgtgcatggggctggcaaggcgattgttcccaacttacgaacgatgttcaactgtcgtaggccactttcgtaggccagagcggcctggtggacaaccgggtgacctggcagctgaagatgacagagtcagatggccttcaaaacaggataatccgatatagtcgacccatatattaatattatcgagagcgacagggcaagtagagagcagaaaacagaaaaggaaaacgggcagcgccggccggtctggccaattttaggaccagcgcccgctcactggcccagactccgcttccattcggggcctcgaacatttgctgcagcctaggcccgactctattggcccgtccgccagagaggcgttttggggtgtcagttctcttcacaggccaggtgctcgagaggttgaatgttgctgctggagagcttggtcacgaaaaaacggtcgttgacatggggagggatcggatggtgggcaatatatacaaaacaagcatggacataagacactggatgatctccagacactgaagaagaaggggggttgcgactgaccaggaaattcaagagactgcccgtctgcttgacaagcaaaagattagtgt

SEQ ID NO: 13399 - DNA, 1885 bp, Emericella nidulans
  unsure (1)..(1885): unsure at all n locations
aatggctggtccatagatataggcattcggtgagctcaggatttttctattgcccgaagaatttctagataaaaaggaaacgactttgactagtttagaaaagcatcagatagccaatagtaagggtctagaagcctcagcaatcacgaaatactcctcccttgctggagtcattgagactttcccttgtctagtgcgtcaggctgacccaaggagaccctcactaaggatacgtatcgcagtaccagaatgccatgtgactattattgacctcgaaacataaaattcttagaacgaattccaaaaatagtcctcaggaaagggagtttttggcatcgcgggcatttccccgcgataagaagtgctgcctgaggaacgcaggtgcccgtccgaacatctaccctaaaacctcatatcgagcgaagacaccagcacacctgaaggctagaagttgaaatgagtcatcataccattcggagtgagttcccagtagatcgaagattctatttgccgtcaactgcatacaacaagctgcaacttgcatttattgcaacctaaaggcgttcaaaaatcatagaactactcgaaacagcatttgaagtccgcatagtattattacctaggcccatatttgaaatccncctgtaaacacctgagagaaaaccaactcgtacgtctgaaaaagaaggcacgagcaggcaggaagcttggaatgaacgacttggtcaacctgcggccggcaaacatctgcttgatcccatgcaaataacagtgagtgccactgtcacgcttacagagtcgcgtgcttttgctaatgtagaattggatgggaagcagatacatgttgatttagctgcgggtgatttcttttgtgtgaatatggaatacggatggaaaccatgccaaacagcctgcatctgctccatatatgtactaggaagttgaatatcttccataaggtgcaaggacaagatctgactagtgcagaatggtttgccggtcccagtcctatataagccttaaaacatttttctaaaggtacaagcggaaagccaagtgatcccagcccttagatgttaaaatacctccgtagcttgaatacatgacgacaagggcaggttacaagcaactttgaaatgcatatataaaccagtaacgcgtgattttgcgcaagatttagtcacatcgcataactcagccttacgtttccgctaacataattatagtcaccttccccatcttatccacaaacctaaggtggtttactaaagcctaacgggatcgccaggtggttctcctagtttttttttggagactataaatgctgcctgaggctcggtttgctgtcgttgctagcacgggcactttcgacttcacacctgctttcgaggaggccgtcttctgtatcctcccttcagcgctcttcctgggtcgtggctctacagcgtctcttctagctgacaagacagcttagcaaggtcgccaaaagccagagggcaatcgttaaagtggcacgtgatacccttagccctatgacccgttaccgggtgttgttttgggtctaagggtttcgccgaaaaaataacacctttttgattgatctgggactggagggatggattgggtggtcactactttatgacctgcattggcgtggcccgactttaatgcataaagcggccttttcttatattcggctttggcgggtctccgcttttttaaagcttttttttgtttgtccacccggaacttatgcggaaccaccaataaacaatttattgttactatagttcccgtggagccgccttttttgcacctttatcttttattggacaagttttgtgcagttttaatataaatatatttttaatttgtcattctctat

SEQ ID NO: 13400 - DNA, 985 bp, Emericella nidulans
  unsure (1)..(985): unsure at all n locations
acctatcggtgcagagttttgcatggaccttgatgacatattgcattcgacggagtgataaaccaccagtataaggtgtttatggcaaggtcggttctatgcgaacaaagccgtttctgggccacaagtgtacgttactcgaaaccaacggccacgcgcccgggagatcatctctttgaggtatagaaacttaggctgtgtcacgcgcggctggtgggcgcctttgtggacttttatttttatgatttattactatgttcttgtaggtttttttccttttcctttacttttttcttactttgtggttttttatttgtttcttcatttatatgaatttttattattttttacatttctttgtttgtttttattaactaatatgtctatttcttgggttgatgttttggttgctatagtctgttctgacttttatcttttattcggtattgttatactgctttatatgtttctttgtatttattttgtgtattattctaagtttttttgacattcttccaattatgttgacctttgttgctgatttttactgttttttattcataataacatgtgtttaatttctcttttccatttctattttatattttttgtttattgctttttctactctttattatgtcgtcttttttgcttttacattgtttatcagatatattgtatctattttttttatatattattaattttatagtatttaattttcttactttgttatgtttcatttttgaggggtggttttttcattttttgttcttcattaatatatttttcacttatatttattttattccatttttttattatcgttttttttttttttttttatttttttcttttatacttctttatatcttttctttacttacccttttcactttacccttattttcctgtttctcntcctttctacttctcatctatctcctctattaatctttactttactattgatggtaggtgggtg

SEQ ID NO: 13401 - DNA, 1246 bp, Emericella nidulans
taggttatcattgacggtcaacggattggcaatgtgaggagcccgagacgttctgtcctgtcgccagtcgtttgacccgtcgtccccttctgaaactccacgttgaggctcatgtcgctgcaggcttgcgggtgggacgctgtgctgttcgcttttgtccttgtttcgcggtacctactttaatgtttccatcttgccggactctcttgtagtagcttgtagatattgttatttactatttaattgcgctatttctgtttgttctctttcatctctatttgatatgcattatattctatttattctatatttttttttttttttttagcaattatcttgactaatttcccttcttcgttttcttttcttatatttttctattgttcacttattaatctctctcttcttcactcttcggattgatcgtccgctctattcgttgattgttcctgtttatatcctattctttttttttatattctgtaatttgcatcttagttattattcctacacttctttctctattcacgtcatattctaatgctactttctaataatatttaaattcctcttctcttgttaccactcattcgatattattcatctatcgttatatctatcctgtttctctttacctttccttattatcatcatttaatatcatcatctttatttcacattcactctattttaatatttttactctatcatgataatagaattttttattgttctcctcattttactcgttttcacctttcttcttttatttcttacacattttctcatttgttactctattattctttattctttacattatctatcatatctcaactatcttttcgttatcctcttatctcatgttgtcgatcttccttatattctctctttctacttcctcatattttatcatctttctcttttcatttgtatatactcatttttattctatttcattctattgctgtacttcattatctcatactttgttcatttatataaactctactttattttctacgtctatttcgtccctacttataatcatattcatcataattctccttacttatttataagttcttacttttattatttagttacatatcgtttatgtttctctcttacttgctattcccatattcaatgtaatttctacacctcattctatgctctatcttctatgttatcttcattctatcatatgtgactttcatcttatctttaaattcttactactctt

SEQ ID NO: 13402 - DNA, 823 bp, Emericella nidulans
catcttcttcgtctgcgtgattctatccgggtatgcctttcccttctcaagcccggcggcggatgacccgcttgcagcattatttccatcctccacagtagatagggctagggtactgactgactgcgtacagaaacgccgaaggaggcgtgggcctaatctgcgcctgccttccgtcactaaacatcctgatcgccaaggtgcgcaaccacagttaccgctcgaaatacggatactacgagcagcaaagcggagacgtgcagctgtccaaggtcaagggcggcacaaagaatggggcgtcggtaaatctgtcgcgtcgggatcccgaggagcaggactttgtgtcggatgagagcggcctgatcagccacgcgggagccgcgggggatgttgctgttgttgatcgtcatggagatccagctgggaggaggagtaaaggagggattcacaagacggtggatgtgcagcagacggtggaagttttggctggacgtgtgcaggcggggaagaagggttcaacgtactgaattgatatataatatattatgcctaaataggtatgggatggcttggtttggattggattcattcgggtttgtccgggtttgggttgtggtattgtatattctaattagatgttggaaggatggttatctggagtgagttcatcaggcctggagtgaagtcagggacttcgccctcactattgctatatctccaagatctgattatgacccgcgcgtgcccgtccgtaccctcttatcccagttcgacgagtatgaaacgaagccctcttggcgtaatagggggaccgcacaaggcc

SEQ ID NO: 13403 - DNA, 1095 bp, Emericella nidulans
cccacatgacgccatccatcgctgtactctaaattgttgatgatagactataattagttactacgaagaatgcgtatgttgaagaggtgtatttacttgcttcttattcattattttatggttgtttatcattatttgttttttcttttttttttcttattctttattgtttttttattttttatttatctattgtttatttatttagtttttattttattttatgttattatttatatttttactattttttttttttatttaattttttttttttatctatatcttttttttaataattttttattaatatattatttaaagtttttttatttataaactcacttttttttattttattttattatttattcttttttgatattctttctgtttttctcttacttattttaattttttttttttacttatattaatatttattttcttattataatttctttttttattttttttatattttttttattatttatttatttattcttttattattatgttatattttttttttaaatttatcgttgttattaattttatttttatttttatttttttatttttgatatttttttattcttttattatttatttttaatgttatttaatctttttcatctttactttacttttcttttattaatttgttttttattttattttattttttttcattatatacttttatcattaatatgtgttattattttatttatgaatttttcttattaataattattattattatttttcatttttattaattattttttctatatttatattttaattttcttttatttatgtttatttctattatttttcttatctattttttattttatttttcattcttatttacttattatttattatattttatttcttttttctcattttttcttctgtctatatatatttatatataattgttttatgatactttttttaaatatcattttttttaattgttcttatattatattttttttctaatttttttatctttatttaattacactaattattattgtatttttttttatttattctttcttagtatcatttattata

SEQ ID NO: 13404 - DNA, 981 bp, Emericella nidulans
  unsure (1)..(981): unsure at all n locations
aaaaaaaccccccctngacgaaccccccacacacccccccccccccaccccacccccaccccccccccccccccaaacagccaaacacaccaggnngnnnntgcgccgacttacaaaccaaaccaaaggcccccccccccaacagcccccccatggggcgcttggtcaccggattcacaccgcgccgcacacccctacccgccaaacctagtccacctaaaccaccgactataccccccacctgcccccccaccaaaacccccaccgcagtacggaacgcgccacccccaactacaaccagccccaaaaccacaaacacacaccccccccttcacacgacatccccaacccccaaccacccgccagccccccccaaggcccccccgaccccggcccggcccacctgaaccacatgcccccaacacccaacagcacgcccgctcccaccggccccaaaacccccggaccggcccgcctccccccggaaacccaccccaccccccaccccgcaccggagcccccccgaacccccccccccatcggcccaccctcccctccacacccgcgaccccccccccccggaaccccccggccccccacccagcaaacccgacccccccaaccaccaacccccccgacatccgacccccgaaataacccccccaccaccccccccaatttccaacccaccggaccgcaatcacccaaacacccgaccatccccctgcccaccgcccttaacccaccacccgcctatacccacccccaaccaccccaacaccccctcggccactcaaccccccccatccccccaaaaccccctcccccccaccaccatacccaaaccccccccccacaaaacccctacaccccaaaccaaccccccccccgccaccaccccgccaccaccagacccctcttcaaaaaaaacagcaccctcacccaccaaaaaagcccccccatcccaacaccccccccccc

SEQ ID NO: 13405 - DNA, 1002 bp, Emericella nidulans
aacattattcaggttcgggtgacatggtatcggatatctgaatgtagctttcctgatatacactgacgggtctgtgctcgctaaaaagtaaggtagtattgaccctgtttttcctgcggtagtggcagtggcatcaaaaggtgcggataggatatttaccgatatcgagtgattgtaccacccttcaacacagctaacaagaggtatatctactttactaagtcgcatgtgtaaggacatggaggctagggagctgatatacaatctaaccggtgcaggctgtgacatttcagtttcaagtaattggggtcaacactctattttagtgttatctagtggtatctgaaaagtaaagaagagacaacggtccagatcattattcatcgagccatgtccctttccgcgcttaattctatataccgcccatactccagggtggatgaagataatgatatttagaacatttggccccgatcatttccacggagcacccctacattctgcactgcagagtaggtcagtgcatattcccagttccctcaagcaccttgatggccggaatagctccaacttttgtcttccagggaccgccgccagcagggacgatagatccggtgctggctgtgtccattggcgagtcggggataactgatatgtggggaaccactatatccacgcctttggtgacactgccgctaccagagaagcagggtttatggcgaggaggcagaggacgatgagcagactcgtacatgtgactcatgtagtccgacgctacgctgctcacagaagatggcgtcgacggagtattgcttaatgaaggaagagtcgacagactagttgagctcgtgttacggccctttgcacggcgtatgggaagtacagactcgtcgccgtggaattttgacaggtacttccaggcatccgaagccataatgcaagaagcatggtcgtccgtgggtattacgggcttccattcggttgggtcaaggtcttactgac

SEQ ID NO: 13406 - DNA, 105 bp, Emericella nidulans
aaaaaaaaaaaaaaaagaaaatatacacaaaaataaaaaaaaaaaaaaaaaataaaaaaaaaaaaaaaaaaaaaaaaagaaaagaaaaaaaaaaaaaaaaagaaa

SEQ ID NO: 13407 - DNA, 489 bp, Emericella nidulans
actcagacgcttctgactccgaggctgaagatcacacagagaagaaagatcctaaggtcgtcaaaatcagcgacaaagacacgctggttatcgactcgaaacggcgtgagaaactcctcaaatccaagaagaaacttctcaaattcaagggtaagggaacgaaattggtctatgacgacgaaggaaacgcacacgagctctacgagatggaagacgaagaagcattcaaagcccgcggtgatgcaaaggaacagcaggcacggttcttggctgaggaggcggcacgcacccagcgcgcggatatggaggataaggagattgctaagcagaagaggcgcgagaagaaggagaagcggaaagcgagggagcgcgacgtcttggctgaggaggagcgtgaagagcgcgtcgctcagcttgttccgtttgacgaggacgaggacatgggtgatgcaggcgggtactcgcagtcttcggatggagaagaggagg

SEQ ID NO: 13408 - DNA, 1088 bp, Emericella nidulans
tttttgcgacatctctctttgcggggggaacacaagccagcttagccagcgctgcacaaaaccagcacccatatccaatggaatagcactaggcgccatcgtggaccccaaaagccccttgcgccctgcgccgcgcggggattgacgaccggggtgggaaagctgtacaatagcgggagtgccatgggcctgcgagacttcggcatacttgcggtactgctcgaacaagtctttgttggtttcggcgtcaatgtattcccctgatagggcgggatcgaagggtgacccgaggtggtttacatcgacttggacgttccctttgcaggtaatttcatatcagaattggttttgttcatcttgatgaatcatagatagtttcgaggcgaacctgttaggacggcaccccaaccgcctttggcccactgatcgtagacattgatcagagcaggagtaggaatgttctgaaatccacctagcatctctgccatcgcggcctactgaggtcagtatcgcgctgtaaaaggggatgattggccttgtttataccttggcgaggcggttagggagtacgagcccgcatgggagcttaacagagtcgtttaacgacggcattataaaagaaatgttacgttatatgatgaagaggtatgcagaacaagacctcacaatatacgaccagataaagcaaggacaatatgcaggataaaccgcagccgaggttcgctttttcacatgagtggaaacccctcttacttttaactggtaactgttggtacctaggtactactacgtatctagaaccttcactcaaggctacactgcgatgacgaagctcattaatatcaacgaggccagattaataatgttcaattcgaattcctagccctaaaacggtatacagcgcaccggaagagcccttgtccggggccggtgaccaaaatagtagagggagccacgacatccgcccatccgtccatccgacccggatcgcagtcgtccggccctgcagaaccacctcaccagggaccaggggcccggtccacccccagacttagatcggatccctatagtgagtcgtattatcgccc

SEQ ID NO: 13409 - DNA, 583 bp, Emericella nidulans
atccggctgcaccagctgatatccaatccagcgacgttctttcgacgcttggaactacaagacccttattctcctcttacctccgtatccgctctctcgcaagatctccctcaaaccctgagcttcaacaagcgcgctccgagcttgagacaacactcacagacttaactgccgacctagacgatctagtcgagagtgtccgagctgtcgagcaagacccataccgcttcggcctcgaaatcgaagaagttcagcggcgaccaagcttgtcgatgatgttggcaaggaaatcgaggagatgagaggggagttgatgaaggttattacggattccgatcatgccgaggctaaagctacaagaagcactgggctcccaaatccagcagactttgacgatcatggtcttgatggtgatgccaaggagaagactattatgcagctatggagcagcagcggcaaatggagctcatgcatgagcaggatgagcagctggatggggtatttcgaacggtggggaactgaggcacaggcggatgatatggggagggagttggaagacaggcaattatgatcggagagattg

SEQ ID NO: 13410 - DNA, 947 bp, Emericella nidulans
  unsure (1)..(947): unsure at all n locations
ttctgtattgcctgtggtctntgtggtgaaattgtcagctagcatgactgctgaccactttagatttggcgaggctgaggacagtaaacgccggaaccacaagccgtcagcccggctagctcacagtacatgggccgcattatggcgtggtatctactcaattcatggccggcagagttggtcgcgactcgctcgcctatacatcatcagatgcttatcatgcgattgaatgaatctgtgtctcactttgctgtagctggaggatgaaatggaataaactattgaaatataccacggaaaggagtcacatatgcctgtatttccaaatttgtcgctaatgaaattcacatcgagagttgcataaacagtctccaaagtatgtggtccactatcagctgtcagatcaataccttcctcttttactatttttcgaaaggtgatcttacttttcccaagagcttcgtttttagtgacgtgctctaccttctaacataaagttttggcggtggcacattccaatccacacacaactatcgcgcttcgagcagacccattactggccctctcaagggaagaatgcagtcatggaccggaagatccgaacaacccagcaacccaggcgttgatgaaacgcaaattggtacaggttttgacctgagaaanggccccccggagggcgaaatgatttccttgatgatgatcgttcaagctatgcacccatgatggtcagtttgtaaattccgcccaggaggatgctcatctgtcccgcaacccgtttctggccctctttaaggccaacccaattttgggaaaaaaaatttaccccccaaattggttaagggggccctctttttttttttattataagtttagcgaacagggaaacacaacttgggatcctctttttgaaaaaaaaatatagccgttttttttttgggaaataaaaa

SEQ ID NO: 13411 - DNA, 112 bp, Emericella nidulans
gtggaagagagcagcaggtggaacgtgaggggtggagggagaaagtctggacgcggttttcctcctacccctccttaactcataaaccccatcgacccaaagaaacccgcct

SEQ ID NO: 13412 - DNA, 993 bp, Emericella nidulans
tcgagcctatccgtgagagttatcttggggttccgaatcgctaacaaccttctgtcaaatgtagatcctactactcctggccgcagacggttacaaaagcactcttcaacgaccttcctaaccgatgcctcctctaataattttgccggatctagactgagtaacttgagcaagcggaggctctctattcgcgatcagagggtgccccaaggcccgcgcccacaagagcaaccacgcaggtttgtttccttagttgcccgttctcgcttctcatcgctggtcattgtctgttatccatctcatataactaatgtgcgattgtttacagttcgggcgcggttcaccactctggcaactcctccgttgactcgacgaccggatctctaaagaacagcaattcacgtattagcctgcgttccacgagcatgagtaatctcgctaaccagaatactgccgagaatatggagttccttgctcccgttaacttcgacgactttcataatagcattatagcagaaccgagcttgaaccattttcctttgcctacgaccggaggaactggaaatgaccgacaatcaacctctttccatcccaccaatccatgggcaaaaaataatattgataataatacgcctggaccagctaaaggctacccgtcacggagaaagagcttgatagggcagaatatttcctcggactcgtcttcccgcccgcaggcatcaactgcagccggtcgaaatcgtcgccagagccttatacaaaaccaggcgcctgataatcctacaccgcgagcgccgcgcaaatcaattgggcccggttttttacctacagcttcctctgcgaggcgccaaagtctatcatccagaaaagccagtgctgacacaactcggccggaccaaacaagctatctccgcccaagaagccagcatcatgaaatgaatgggttcaacgggccccggcttccgttcaatgctcccagtgcgaaggccaagt

SEQ ID NO: 13413 - DNA, 110 bp, Emericella nidulans
cccccccgcccccccccccccccccccccccccccccccccccccccccccacccctccccccccccccccccccccccccccccccccccccccccccccccccccccc

SEQ ID NO: 13414 - DNA, 1746 bp, Emericella nidulans
cggaaaaaccatatttatagggaattaaaaaccaagaagggagcataaaaaaaaaattgggggcctccaataaaagaaatggcctcggggcctaaaccggggttttgatagcttaattaatttgggggttccgagagggtccttgacaataaaatcgcatttttaaaaaagaatggcgtgggcttcatgaaagtgttattttccaaaaaggttttttgcaaaggtttggttggggttgaagcatgtgccttttttgcttcccaacggcaattgttttatgacagtcagattttctcttgatctgatgggaccttgggcctcggttcctgtaacccggcctgtaaattttctgctgtcccaattacagtttatggcaaagttggctatcgggagggctgttggtccaagactcccttgcttgtgagcgaaagcccacctatttttgtaagatcccatcttccgatgtaggggtctgttcagatagtgctggggccgatctctgagtccgtagaccttctccagatgtatttgaattattgaagtgggcagccacctggtcgcgaacggatttaggtacagaatatagagcttcctgtgagattgagttgacgagttgactttctctggatctcgaacgggcccgacctctggcaccgtccctctgtcctcggtcatccatctgatacgactggctttttgtgagccgcctagcagcggggaatagtgcattctgagccatattccgatccgccacatcttcctgatatagagccgaaataatgcgggtataagatctccgcttcaacccgttccgctgtcgaaggaacggcaccatattacgttcggctacatcctcattgaagggcgtgatgggagacagtgtgctagcagactgcatccgataccgatgggagggaaaagagagcatcgagaaggtcgacatgacgtgggttcctattcgtgagccggcttgatggtcgagagggtggagcttgcgaggccggagacaagggccgttctttcagctgatcatgcagcacctcgaactgcctctcgatattctggaaatgctcattctcgctcaatgccgaagtcattgaactgggaggccggcctcgaaagctctgcgtttgggactcccggtcccctggcactggggtcggtggggttttctccgcatgaaagagacgtctcagcaccaccatcttggtcaatgcgtagctgttgtctcagagaaaagagatatcgggcaatccagctgaagcccacggaacgagcgtcaaaggaagtatcgaaacagaatcagcgagtgtaacagggttggataggccgtaatgagtgtgatcaacgcatcataataagagcgagcgagtaaaagaacggcgaggccaaatcatagtatatcatacctcagtgaggccgttgaaggtatagtaagagcaaccgcaaaagcaacgctgatgaagcgaagagaagcccgcgagaacccatgcaggaggggagcagaagaaaagaaaaacggagagcaaagtcaacaaagacccagtaggaaggagcgccaggaacgaggctatggggtttgcagatcacacgaaatcatcttcgatcaggggagactagagagacgaactaacagtgatgggccagctccacgatgggccgtccgttattattattattattatcattataattataatcatttagcattaccatcagtatttacataccgacatagcactcaac

SEQ ID NO: 13415 - DNA, 1089 bp, Emericella nidulans
tgtgcgctcagaccagtacccgtgcaaaactatatcaccgctatactagtctttttgatcctggagcagttgatgacctggggtttctatggtatgttgctcggacttcagcagaagcagaactaacagcagccagactatcagaaccgacatggattgaacatcggagcaaaagtgctgatggttattgtcgctgtactcaatgccatgagaacctccttctcattcttccttcttctcatagtctgcatgggttacggtgttgtcaagccatccttgggtcgaactatggtatatgttcggatccttgccatcactcatttcgttttcgccgtgatttatgccattgcgagcttgtctattacaccggaagcggcaggcattttgatactgttcattgagcttcctctcgcggctacattgactgcattttatgtgtggactctgagctcattgaatgcgacaatgaaagaccttattgaccgaaagcaaaagacgaaggccatgatgtacaagaagctatggtactgtctattgggtagcattatagtgctctttggcttcattttcattaatgcgcttgccttcgcaagccgcagtgaagaggacttcctgcctgagcattggaagaaccgatggtttgtgttggatggatggctgagcattgtttatcttgccgatttggcattcatcgcctatctgtggcgacccactgccaataatcggcgattcgcaatgagtgatgaggtgagtcaccgaagacagacgaaagtggcattgccgctaacatgactttagcttgctcaagacgatgacgggtttgagattcgttctttcaatggagctttggacgaagaagacgccctcggtggacttgatgaacactccgcttctgagccgcgtcgtgacttgtcgccagttccgcctaaaccagttccctctgccgctcggactcgggagtcactggatggtgagacgatcttcgccgtcggtgaagatggcgacaaatggtctgatgatgaggatgagtcgcgcgtaactcaactgagaggaaacactcacgaaggatgtggactaagatgcaagatg

SEQ ID NO: 13416 - DNA, 608 bp, Emericella nidulans
gatccagcaaaaactcctaacatctaacaccccgctcaatccttgttggccattctctaaactccgatcttattttgcacaaacacacctactcccccatcgtgggactccatacccttacgctggatcactcgtcgtttcatcagatgcaccatgctgtaatttccgactctcctccacatgtttctactctctataaaatttcatcttcaactaatttcgagctgtacttaatcaacttttcccaaacctcacagtataatcaattagtcaatatgccatgttaccctccctcattctaatctgcttattagctttctttggtcctggcctcttatgtccatacttaatatattccatttttagtacatacatatcgtggtcaaaaagcattatctcactctatgagtcaaacttgaagagtcgtacctctgcaaagtactaaaatttactagtcaatagattctacccgaacctgatggactacaaagatttgtctcattatcacttctttgtcctctacaaacggataattattaactatttgaaccttaaaactatccaggtaacccattaccttccacattggacgaaacttacttatctac

SEQ ID NO: 13417 - DNA, 996 bp, Emericella nidulans
ctcgaactctgcgaaccagaacgagtcttttcaccgttagcgggcgaagaagtatctgacttgttgttggatctcaaagagcgcctctcagctggcattttctcaggcctttgtagctgcaaagcccaggcgagcgagacgagaccgcggtgccgaaagcaaaggggcgattgcaggcagtgactcaaaggaggctgaaaaaacgtagcctcgacaaccacaagaatctgcagttatatcaatgagcaggtagacaggaaaacgataaaggataacggctgacagagtgggaagattgtggttgatgaggtggtgttgtgatgtcaaggctggtctgtctggatggacagcagaggcccagctgggagcttacctaagtcagtatcagctgggacaaagcttacggagtgccaggaagcacggtcagctgcctgcaaccgtagcaactatgatactaaaagaacatcctagcacgtacaagaagtactgaaagaaagaatctttctaagcgatcaagatctagcgactgatagttttccacgactctttacctctcggcgtctgctttccttcccaagctctgtttccgtcggcttcgccacagatctaagagcctgaggcagcaacagcaacaaacgttgaacccgtggccaaacacaaccaaaacacgggactgagtgctagagatcgaaaactgcgaagcggccccatttgattcaagagaaatgtcgttgctagaaagccacctggagcaaattatgctctcatcgaatgcgatcgcagaactaccgtgaggattactcttgcctattcgtcagctccatgctaatgaagacaatcagcttcccccagccacggattttcacgaatgctcttctgggcagccatgatatcaccgccctaattcgagacacggaagcacatgagcgagctttgtttcaaagcgacccaaccgtgaaagctagtaactcccagaaaagggccacaaggcgagcg

SEQ ID NO: 13418 - DNA, 916 bp, Emericella nidulans
agagcacttcggtttggccaacctccaagaggattccatcgacgatgatcagatcgccgccctgggccgttctataacggctcgttcaaggctgtctgagcccgagctggccagaagactcacatcaatcgggaccacaggcacaatggatcccaactacgaggtcgactttgaggacggtaatgaccaggccaatccgaaaaactggtcgctcaagtacaaagccatggcgattgctatgctctcatataacacactgcttatgtgagtcagtcagggttgggctgttttttttttttttcagagttcaggataactgaccctcaaaagtgttctacattcgacgtcttacacatccggaatctcacaaatcgccgacgagtttggctcctccacaactatcgtaacgctggggctcactttttacctgatcggtctggctattggttcgatgatcatggtcccgttgagcgaggtctacggcccgaagcacgtttcaattgcgtggctgggagtgttcacgggcctgatcatttcctgcgcgctggcaaagtcattggggcgcttaaaattgtcgggtttatggggcattgttcggaaggttataacttaacccccctggatgtggcgaccttggaccttaacaaaagaggtgccattcctaagggttggactttaagggccgggccggaaacccatttttaaccccacccaattaagaggcgttgggctattaggggtggccacccgggggaggaaaggaggagttttcggggggttcccctaaaaattttttttcaaacccccccgcaacatagcgggcttaaaaactgttaaaataataattttttctctctctggttctattctcccccacactaattctttgtgtgtattatgaaataattaatatcac

SEQ ID NO: 13419 - DNA, 611 bp, Emericella nidulans
actgcagcatggcctttcgcgccggctgaccaatcccaccagccactggctcatcatgtcacaggaaccgcggccctgtccagtcctcgtggattgctgtttgcgcgagggcctcggcgataatggccggctgattgaactcgataccgaagccgaggtgaattatggggtggagcaggcctaccagtttgatggcacttagggcctgattctcagcatgaacagcaggaatacaaagacgtaccaccaaacaaccttgccatcatactttcagcgttctcgtcctgtttgaagaggtactcagaaagaacagcctcaacaccctttttgtcgatctcgcgctggaagaactcgaggaaatcagggtaattcttctccttgcctagtgcgtccttgaatttgcctttctgatgaaggccgttaacaacatcctcgtgcattggaagagcctttcgctgatacgtcttgttccgatcataggcagcctggatctcatcaggtgaagcccccagtgcgtaaagagtgagaatttgatgggcatgtgatctacatgagtaagcgtctgttttatatacatgaatcattacaatatactattttgtcattgaaag

SEQ ID NO: 13420 - DNA, 648 bp, Emericella nidulans
atattttacaacattgcaatatacccatcgtcccggtaaaacctcgctatgctcccgtgcggatgaacctaccccgctactgttcatcccaaaattgcgtctgatgattgaacgctgcaatgatcaaactgtgcttatggaagagaacacaaaagaagatcacggggaaagatgggaggagcttaatcttggttgccggcgatgtgggagctggcgtatggtttcattgcatttccggcgacatatctgacactgcatctaacgcctttttctttgactgttatgtttctcctctttcttcctctctctctctctctttttatttttattttttatttttttttttttttttgtgttggctaaagcccggtatattggatttgctttggtgcttggcacggacggaatggtgttaagggttctttactgtataatatgataacaaagcaattatgacaatgattattatgtcctaaacatactcgcgtatcgtactcgcgtatcaactcgcttatcaactgtaaaactctccagtgtcaacgccataacctgggctagcttcacaggtaatatcgccttaggcatagggcgcaaattcggcgcggcgatcataagtattgctcagtgtttccgaggaagaatagtgag

SEQ ID NO: 13421 - DNA, 795 bp, Emericella nidulans
cactaagcagctaacatggttttgatgcaggcccctaagtcccgtcttgtaagacatctcctagccgccttgatcccgggaattgtgaaatgcaggatcagtgagtactaattctggaccagctgttcgggactcggggcatggccaccgttgccgacctcgacaagaaggtcgagatgtgcaatctcgaaaaggtgagctattccttgtcgtgactctattgtggctagcctcggttgcttcggatgagttagcgatgctggacaaactccgctaacggtcgcattctagggcaactacatcaactacaagtatgtttaagagtcattggagtctggagtgctggtctattggcgaagccaaatgtcgggagttgactaatatgtttttgcaacttgcaggaagatgtccgagaacctggacgttgttcgccgtcgtttgactcgtcctctcacatacgccgagaagattctgtactctcaccttgacgacccccagaaccaggacatcgagcgtggcaagtcctacctcaagctccgccctgaccgtgttgcttgccaggatgccaccgcccagatggccatcctgcagttcatgtcggctggtatgccgtccgtcgctactcccaccaccgtgcactgtgatcacttgattgaggctcagcttggtggtgagaaggatcttgctcgcgcgaacgagatcaacaaggaggtatacgacttccttgcctcttcgactgccaagtacaacattggtcctgagagccgcctgggtcgcttgcgttggcaaaggtct

SEQ ID NO: 13422 - DNA, 582 bp, Emericella nidulans
tcccaatgcgaaaactagaagaagttctatagccgcaagatggttccgtcatggtctatcccacccctaaaatgatctgatagcactctgcccccgaggatagtttcttccacaacgccctcaacgtgtttgggttcgatgcggccataccaaatccctctaccggccagcggatgggccacagacgagtctccatacttcatgcttttagggatataaatgatgacgttcccagcatatttgtgtccgccgatatgactgattagcccgatatgagcacgatccgggcgatcaaacttgtcgttgtcaggaccagctggggtatatatacccctggactccaagatctttcggaactgctcttccaatattggcgccataactccgcatcgcatatcacggcctccgtgaccgcatatcaagataactggggaatgctctatatccacagcgtcggggaactctgatgccagctctggctttcggagcaactcgctatgtcgcggatcgggaagtgtctctgtcatcggactgagttgggtgggaagtaggaacgcttttacaaaagtggagaggttggtg

SEQ ID NO: 13423 - DNA, 1239 bp, Emericella nidulans
  unsure (1)..(1239): unsure at all n locations
gtttcgcatgtgccgggcagcttctccttgggactggagccatggtgtagctcgcacctagtgtgctgtatatcatagggtgggttttcaatttcatttctttctcttccggccttgagatttgcttatcatccttggggtcacattacattatttattcttgaagttctcttctctctgtagaatagattttatgttgatgtacttaggtttcggctataatcaaattttatggagggactctgtttctatttcctttgtcctctaaagcattggggaggattggccgaactttgcatttagagcgctgagtagggaaggcttgtggttgtccgtcagatgtagtatatatatgtcctgacacggaccgggagcttctccagcatacaagcgaacggaatggaagccagctgacatgatattcacataaaagaagccagtaacttccaattctgcacatatacctcgtcacaatatcatatatatccaagacaaagaggcctcggcgcgagggtcaaatacaacagcactaatagaacatacctacctacctagctacaagcatacatcgcatcacattcagtgcttcctcgatatcataagcaacccacacccaccatccaccccaaaaggagagaggaaataggaagagcaaatggggaatcaaagcttcttctccaacttcttcaagaaccggttcacgctgttctcaactctggacgccgactcctccagctttctaggccgctggccaggattctgcatcgccagctttgcgtggtcctgaaggtgcgaggaggcctctgcctcagtagggcggtacatctggttgtggattgcgtattcagagcctggagtgctgacattggtggctggttggatgctgggtgtggtctgatggtgatgagggtggtgcttnccttctgcaatcgttccttgaacttcgttggggatcccgcccatccgcggggactgggttgccgataaaaccatggtttctgcctcatgtattgtgatgctaccatccacctattgatttcttgtaccacccttctccctctaataactatttttataagcaccccctatctctaatcttcatatccccccaacacttcatactctacaattccatacctgttcctccacatttttattctcctcttttctcacaacatgactcctctcactccactttaattctcctaaatcgtttctatatctctccccccccccccc

SEQ ID NO: 13424 - DNA, 707 bp, Emericella nidulans
ggccgcggcggggctcgtggtcgtggaggtcgtggcggccgtggcggtcgtggaggacgccgtgacaacaaccgtgactggagggaacgacgcgacgcggaccaaaagcaaggcttcaagaacggccaggacgagcaacccgaacgtcgtgaggtccagaaggatgctcggtaagactaccaccaaacctcgctactcaaccaagaaatgctaacagttatagcggtgtgcctgtcgtgcagagcaccgccgacgcaggtcagaagcgtacccgtgaggacgaggcgagcgccgaacaccctgccaagaaggtcgacaccaaggagtaatgatcttgcattcacctacttgcatatctgctatatgagttttgtcttaaatcgggatggcaaaagttaccaataccagcttgttttcaacgccccaccatcctgcttcatcttggagacgagttagcatgtatacgtagcgtagagcgcgttggtcaagatacatacctaaggaactacgtaccacctctaaaactccaaatcataagccaatgtatcctcacacagctcttccctcatcttatgtaccctggtatcacagaaagagttaaccaagttccaagagtcaattagaaccccttccaccacccccaccaccccaaaggtgtataaaataagcaggagactcactctagatgcgccggatgcaccgcgtat

SEQ ID NO: 13425 - DNA, 922 bp, Emericella nidulans
aaaagaaaaaccaacctaattatcgactaaatagctctcttcctatctcaccgctccgccgcacactgatgcttgaactactgcttcgtcgccttctactgcgattttctgctggatcagctgggcttaatccgctggctcgagcatgcaggttcaacacgtctgttaggctcactacgcccacaaggcgtcctgacaaccgggcccccggcagagcagacgctggaatcgacggcgtaaggggtgccggattcacatatggacctgccgtagattggcccgccggctgcacatgggccaccggtgcgttgggagattggggcggcgactgtgcgctggtgcttccagtcggatagagtggaatgtgcaccgttgagtgcgatggagtaggaggtcccgatgacgacggtgagtatggatcggtaacccataaactacaaaagtcagcactgcataaccgctgaaggacggcaaacctaccgatgtgacctagtggctacaactttagccaccgtatgggccagagtcgaacccgggttaacatggaaaacagggaatgaatctttgccttcttgaaggccgcgtgccgagagaattacggagatgaaatgtgtgcatgtattgtttaggagagggagtgatgatgacctcgtgaggagctatgcgagtcagcaagaatctaggcacgaacggcttacataccttaacatccgtggtagatatgtttccgacaacattgaaatgattgtcgacaacagccacagaagatataccttcactgtgcatcagctgcaacgcttcggagagcattttgtcaccactacgaacgtcagcgtgcgtaatccaatgccgtcaagaacatacttgatagagatgaccctgtgagatccgatcctagtattctatagtgcacctaaatcgt

SEQ ID NO: 13426 - DNA, 949 bp, Emericella nidulans
tcgcggccgcaatttaaccctcactaaagggatctcgaccgaaagaaaaccagacaatccaacaataaaaagaagccgcaaactgggagtcggaaagaagagaggaagagagagagcgagagagaggagtttgtcctctgctaattcccagccgtggtggaagttgtgattacgaggtgactctgagcgagctctcaaaagagcagcaggagttagagtacggccggggcgactgcacgttacctccgtacctttactggacgcttaccccggtgactgtcgcgggataaaccacgaagctgctgtccaatgatcggctgcacggtgggccgatgagcacaaagcattgaccacgactgggtcggagccaagacagagccccacaatagagtcacggggaggagctgcacttgggtctgtgccaccatctgagccaatggacgcagtcgctgaaactcaatccggtccgagaggattgtcagttaaagccacgcacctttccagtgtacacgaccgtggctttgaggttccaccggccgaggaagtgaatcagaatggtccagagaaagggacaaaaacagacacaccacggcgctacggaattcataaagagagaatgagattgtggacgaccagacccagtttgatactaggagcgtcgctccttattcagattccttgagaactctgagaacgtccagctacgtccagctacgtccagctatgtccagctatgtccagctacgtccagtcgataggctaatctgcaaagaaaagacaggaccaagcgcggaatagagccgtcatcagagccgaggcgattctgcggccagatgtaggggatagagcacgtccaggtccagctcgcgcatcttaacgtcaacgcacagcggtacacggcggtgcagcggccccacgtagccggggggaacagtccatcgggtgttcc

SEQ ID NO: 13427 - DNA, 504 bp, Emericella nidulans
acggccatgtttttaagcagaacaccctagtgtacaacaccatgctcggaagggctttcacgcaagctggtgggacaactacacacaggcgactataggggcatcgtgtgaccgaggacagctgaacagagcccagacgtgccctgactcacggctgcctcctcagtggatcccgagcccaacagggggcacggcaggagacctccactagaatcaccagaacactacagtatcagtgcgtgcagaatccgatacgctcatcccaccgcgagctggcgcatgcatctgtgcagcgccatagccgaatctcactccaagtcagggagttgtgcatcaagaattggagctatttatagccgagatgcaggcagctaccatatagacgcacgatgaaggacgagtcatgattacagagtgcaaaaggggatggctacggccggggtatgaccagtgcgcttgggactcaactcggaattcgaatatgatgcaggtgccatggctgcg

SEQ ID NO: 13428 - DNA, 1243 bp, Emericella nidulans
aaaatcaaattccctttggacccccatcaaatgttccttaggctgaggtacagcgtatacctgagaatgcatcgatgcgggtgctttgttggttggccgtagtactcagcaagtggctaaagtcggcagcggtcatgcatgacagtcgagtaaaaagtcggcctacttcatcttagcacatccgattaagtgcccaaactatttgtaacttgggggtattgcggtccgcaagtattcgaccccgacgggcatgaggtccgttgaaagaccccgaatgctttccatcttctcctgctcagtcattcgcatcgcggaaactaaatagagtctgtcatagacgtttccctggatagttgcgaactcaacggtcatgagattgatcaaatcccatgcctgctgtttttcatccgtcgacggagtatacagcgccgtgtcaatatcgtggtcctgaaagtgcgaggtcacaccgatgttaagcgaaacgttcttgtcaatcgtatacagggcccagaaggcgtggcgcttggagttcgccagcggagcgggatcggtgagggtggttgcattccggtgaagccccagcgtttggcacatgttgaacgcgagagagaggtaggtccagcagcgctggatgttagactcttcttgggctttgatgatctgcaccattaattgctgtgacgatacgcaagagggaaaggggtcatactccaatcagcaaggcttggaccttttctaatgttggatcagacagcatctgcgggtgatccagccccgcggagaagtgtcgctcacagaataatttgctagaagaaaggtcgaagtgcgcaagatcaggatctccttcatgcaaatagtcgcgaacaacaaaatacattaaaccgtgaagcaatgtcgtggaacccgacgggatttgttcgagcgggaagtagatcgattggcagagcgattcaagctgccgggtatctttccatgactgactgacgaggaaaaatggaggccgtgctgcaataacatcagtcagcgttaaactacaaaatacgcatcgactgcatacccttcactttctttacaacggcaacgacaagatccacagggagcaatggctcttgagcccgcgctgcttcagaggtcgcttgcccgggggaaggggaatggctatccagactatccttcaaagacgacaacgcagaagagacctggtcattgagcgctggccctcgcgattacacaacagcagaga

SEQ ID NO: 13429 - DNA, 538 bp, Emericella nidulans
ccaatatcagctcgacatcaattcctgctgggggggggcgctgaggtatgtctgctgaagaagagagctgggtgactcataccactgcctgtatataacccatcatccatccataacgtgcgggagccacagttgatgatagctttagcgcgcgtgtacccccttgcgattttgaacttcttccatgaccaacatatagatcgagcgtctgagaaggggctttacttatccccatagttccagtgagttcagcgttacatcaacaaaagccatcgaccagacatgtcaccacactgctctgcccgtgtacaactcattacacaattgggtgcagactatgctatagcgcattagctaatgctggaatgtactcatatatggtgtatccattgaattgttgggaaaaagccacttctgtagggaaggggaaacctatccctggcagtctcatgagatggcccgatcctgtgttcaggtaatatttcaactcgttcaaaggaaggcaccctattgattgcacctttcaaacattaggcat

SEQ ID NO: 13430 - DNA, 1605 bp, Emericella nidulans
  unsure (1)..(1605): unsure at all n locations
aatgcctttagcgtacggtattttgatgtataagcggacacgagtagatcaatagctatctccggtttattccatgcgatcagacgcccgctcgttgcggcggtgatattatgcgtgaccatcatcgaccgtctcatccagcgtatgcgatagaagcggaaatcagccaattggatgaactcggattctgcatgagggatccatatctttgatctggcggaaaaagataggcaaccactcaatccattcaacttccacctcaaccagagcttgagcagcgcccagtccctggctgagtagtgtagcaatcagcgcaagctcaacttcctgtggcttaagctcaaatccagacactcttgcatcctgaaagcactgaagggcctctgtcattttgcccgcatgaatgtagtaaatcatttgggtttgtaagttctgataatcatcaacggatctcgaaggtcctgttaactcgtgcaccgtgcgctcataccatccatcagcgaagtaagcctgctccactgtgtgatttgattgtcgccaatttgttcgctggtcgtgaccaagaagctgttgcgacgcagtggctcgcatattgtctgctcgcgcagcgtgcaacatctgccagaagcccacgggagaatcccctagtgcggactgacgtttgcgcaatacgtccagtaccgcagtttgatccagattaattttccacccgcgctcgcgcgccaaatttgtgaattcggagagcatagccatatcgcccctttcaacaattgcctccaatatgtgaccccagagaacctgatcaggaacaatatcgaatttatcaatatagcggtaaaggaaatcccgaatctcgaccgctgtgtgagacggccaatattcaagaaagatgcggtggaagatcttgagaaagtccgccttgggactcgtcagacctaggttgtgcatttcgttaaacccttcatcgacagctgtccagtcacattgcanagctttcgcgtacactagaatacctttcattcgcacattaagtgggacttggtacgtaaccgtcatctcgtgtagcanagtttcagcatctgcgaacctgccaaaatccacatatgcctggagcattggacttatgagcttgtgagtaggtttcttgtccatgcgtcggagcattatcagtaattttgtgaactggccgttgagaagctcaatgcttctagctttcttccacaggcccgtaagatagacaccacataaaccacagtctcgatccaggtgtaaatgctggaagagaacctgtttcgcagtttgtagcctgcgagattcaatcaaacaccgaaggacaacgtccaataatatcccaggaatagaataggagtccttgtaacgaaggaagaccgtcgtagccgactctatgcagcctttcttcgccaatgcgacaatcaggaccttccacatagtgtgggacacccgatccacttcttccagtcgttcgaatagactcctcgcgatgaaaacattctcttgccggcagttcaagtaaaacagctgttccacaagtagtcgcctatgaatcgatatacctccatttgaggctggatgttcgtgaattat

SEQ ID NO: 13431 - DNA, 788 bp, Emericella nidulans
tttacgccgtcctctcgatctcaggctatcagacagtctggtctcacgtcggatcaatattcttctacttttccaaacatagttgcttgaagatgtctgatcaagcgattatccgcatcacaagggtaatcttcagttcattattagagtcatcttcccataatatgccctagaatagactaacacaagtctcgataccaggagatcaagcagatagagaacagtgccgacctttgtaagcacttcgaagagagatgattctcttttattccaaattaaccagcaaggccttccatgctcggtaggatgttctcgctaaccgttggtaaagcgattgcagttgactacgatgaaaaagacattcgaaatgtgcgcgcggtcattctgggaccaccagagacgccgtatcagtttggtttctttgaggtcagatatattttattctgctattagaccttcttgctgaattcggaacaatatagttcagcatcaagtttggaaaaggtatgttttgccattttcaatgcctgattgatgctcatcaagcctccagattaccctgcgcgtgctccaagcgtaagggctctgacgaccaattcgggagtttgtagattcagcccgaatctgtatgctggagggaaggtctgcttgtaagtttgccaactggacaccatgttgctagttttctgacccaagaagatcgattctcgggtaaagcaagatccctcgcatcttatgaggcgtcaattcaactaattctgtgtgagcatgtccggcaaccaggagag

SEQ ID NO: 13432 - DNA, 748 bp, Emericella nidulans
gacactattcggaacataagcagaaccctaattcatttactactatatttgtttctagacacgttaaataagtttgcgtcttggtctgggacacaaaagtgctacctcctgtccaataacccatgcttcgagctccatgaataacatcatgaatcaccgttcagcactatgttatcatttcttttacactggcagatatatccctacagcacttcatttctggctctgacaaattcgtcaccctgttatgtgtctttcatgaattcgtcgacacggaagaagttgagagcccaggtgagcacagcagagtgatggagcttctcgctgaggaggcagtggtgctttatcatttttttttagcaaaaatcaggcactggatattgctagttgctcggagaggtcacatgtccagtcaacgaaaggaataatccgactccgtaatcgagtcctgcacctcatcagagttgcgcgaattcgactctcattccggaaagtgatccagtattgtagaagcatcaggggtgcccgttcgttgagtaaggtgtcatgagacttgttgagtctggataaaggcaacttgcgctcgccgccgcctcacattctataccaaagacccaatcagcggcagaagattgaggtaggaagcagcatacttctctaatcccaggagctaaaatcacaaaaaacaccgatccccttgaatttcttcttagccggttccgacgctgggtcgtcatccacaacagtt

SEQ ID NO: 13433 - DNA, 1315 bp, Emericella nidulans
tcgggccgataatacgactactatagggatcggccctagtctgctcctcagggctttcgctttccggctgaacagatggcgttctcttgatgaagttgaacaacaatggctgactcgcaggtacagcaggagcattagggtccggaataccacggcgaattcgttcctcgcgggcttttgcttccttctctgccttcttcttctttaactgtatgcgtcgcttctccttttcccggagcttctgtgcttggatttcacgctcttcttctcgctcgatccgggctatctgagatgccgtgaactgaaaccgtttgttgctacgttggtaccgacggcggacggtgcgggacttctcaaggatgactcgtggtcgatcggccatttgtcacgttgggagaacggcgaactgaaagctaaacggtgcaatagagaaggtagacatcgagtatgaggattagtagagacagtctaacgacagtgaatgacgcttctaacaatatgggcctgccttgcggttgcctggaaacattcgctgctaatagctgtgaagagtgctcttatcttgaaaccacgtgacccgcccttaggcggccggcttttagcttgaaccattgtctaagcaacaaagagtcaccaccttccttgagtctattcagagaaagaggccgttgaccaaggatttcgcccaaaaagtgtcgagttagattaaagggacgattttcattttggacctgtatacatctggtccgattccgagcgagaggcatcctctccagcccctgcaaaactaacttcctggtatctcaatggtacctctaagactaagttgcgttcgattgcgttcaaatcatctgtacacttatctttcagccgtcattatcagacgtcattagcagagaacaagcctctacagcaccagacacagttctcccaatggcggcaggcatacccagcctgtagatcgcagttctctagggaaaggtacgtgcattagcttcagtacctgcgtagcgtggatggataggtcaccgcttttactgagtctcctaactgccctctgcaagagtattttattatcaattacatataaaggaggagtacccaccgagtttatagaagctagagtatccgctatcctgacatcctgcagcgtgcagcgtgcatatttcgaatcaaaacggatcttatctttgtatatggtagtacgactgctatcaaatagagctattcaattagcatttagcacatggctttgcggtaggagacgaatcggtatcgacgacaggactgaccattgctggtatattgtgcaatg

SEQ ID NO: 13434 - DNA, 837 bp, Emericella nidulans
  unsure (1)..(837): unsure at all n locations
gatcgggcgataatacgactcactatagggatcacaaccggccctttccacgtggtttcggctcggggggttccttgcggccattctcatcttccagaggaacgggggtgaattcgatgtcggactagaggaactctcgctcggcaacgggatcacgattcttatcaaggattttgaagtgttgtatcgattgacgtagagggaggtaagcataatgctaacaacgatctgaggccaacaactgttaataccttgccgtatcaacacggggagacataacgcacgatcagctccagccacgtatgggaagaactggggcttccccagatcaatcttgtcggtcccattcaacgccattacgatggcttaggacagtcacagtcggcagaacagcgaaaattagcacgcgacccgaagatcaaaagatagacgaacaaaaagcgaattgaaattggaagaaaccccttggtaaaattaaatactgagaagggcaaagaaaccccctagagaaggatgagtgtgttggaaaagggagagagcagaatctgggaatcgaaggcgaagctgagggaagacgaggatggggagtcgatctaagcagcgcgaagcctcggtgcagacccgcagtgtacaactcacgatccatgcactataacagaattttatataattatccaagcctactaagtaatggactgctctttcttttaattcagttagttagttntctttttcctactttattgatgggcagcactcattatcagcactctgctgtagattgatctattcccctgaagaaaggggaagaggtcagaagaccccgatccacatgac

SEQ ID NO: 13435 - DNA, 713 bp, Emericella nidulans
cttaacgccctatgtgtgtttgtaaaagtttctatgacccgcgcctagctgctctgacaggttgacgtgaattttttacgcaggctttggactgatcatgcatgggggggctcgtccaaccgactaccttaactagagtatatggagggccgtgatgatacatctcaacgctgatatgactgcccacagatagatctagtgaactagttgaatatatactatgcggctacctgaattgatgactcactactgcattgtatacacactacggtctgatacgattgaatatcatattattatgagagcagtgtgtccaaggctgcaagggtaacgaatctgcctcgtattatacctggcgtgttgaaggacaccatatgcaacggcgagcttagctatggaggtgcttaagtggctgaatacctatggcccatgctgcaggcctgcgtgagtgacattgcgatacactcagctgcctcgagcagtgaatcagtgaattagagtagcagtgcaatactgctacctgtaatagacatgatacccttgcagctgtactgtagccgaccatagttaaaaatagagttctcagagttatggaccagtagatccgtgaacacctatcgaacttaatagcttctagatcgaggcgttagctgcctaatccacatagccctggtacgcaaggatatgcatcgagtcatacaaattattgctac

SEQ ID NO: 13436 - DNA, 268 bp, Emericella nidulans
cttaaacattgacaccaaacatgtgtctgattatacaattttccgtttcttttcatctcttgcgttctcgcgcctcctgacctcttcggtttcctcggtatcctcggtcgctattatcgacttccgtggagccgtctctagttggctcttatcgcctttgctccaattactctacctcctggtggcctctctgccttatttctgctgggctacgcacacttctttctggagggtttccacacccactcattattgttaaacaaaccat

SEQ ID NO: 13437 - DNA, 532 bp, Emericella nidulans
acatcgtgtctgtagaaccgggtgaggacgtcgtttttgcgcacttcctctaaaatagaagcttcgccgcggaagaaccgccgcagcgtcgtccccaccacattggcaatctcagccatgacggagccggacgcctctgctaacaaagtgtccaggtccgcctgggttccgttcatccagtccttgtgcaggatcggatgctctcccgcggaggtcttggtcaaggtccggtcaatccaggctgccagccgggagcgatggtggtcttgagctaggttgcgtcgttcatcgtcggtgagttgggagtttaccagctttatatatagcaatgcaacatgttccatggtcagtgcatgggtggaaaagtcgacaggatctgcaaaggacccgtgccctgggttcaatggaccccatgcgagcttggagaaaactacccgctctgttggtggctggacgaggggggcaatctcaacgccctccatttggactatacctcattgttgtgcgtgacaaactcacatcccggatatgc

SEQ ID NO: 13438 - DNA, 1010 bp, Emericella nidulans
attgtttcgccctgccaaatcccgtctttaagttcagggaaagattcccgtaccaggactggctttgtggacactgtaaattctgtctaattcaatccattgatctgttctggactttaagggctttgcgtaggctatccttgaatgacaggcgagactcgggattgtttacctactagacacagataaccggcgacgagtgctaactggagcagaatatactcccttcttcggcaagtacgcgttgctaagcagggcttttatgggtctttagagttcgggatagtgctgcgcaactttgtttgcaggagttcgctggtcacctcgaagacacaacgactattttcaaccggctgaattgacacttagggcaggaacaatggccgatcacgaccacaagctatctgtctgccatccccaattcaaaagtctggtatgaggtcttgtgcgccgagacgacctcccaggtgcccgaatcaaatacttgcaacatcgtagccagggccgaactctgaaatatgaacactaatgaagcataatcgtagactcaaagagtatggatcgtcctcagcgagtttatgcaagggagacggatggctggatgggaataatctccgcggggaagacgtggtccaatgagtccgtgcttcattccgaggttcaccttcttccacggcgtgaggtgtcatcgacgagttaggactatgactgacaatgcccctgacagatattgcaccgagaccaagcatttgatcttgtggtgtgctggactctgagacaaggttctcaccaaacaacccgcgcactaagcatctgtcgaagaagttgattagcgtgaccactgcgcagaagatcccttgatatctgggtgaatcaggaaccagcgcaattccctatcaagacgtaagggatggctagtactagtgataggctagcagtagttgaggtgcatcgcgtgctcgggcatacgctctgagcacacatattgaatctggcaaggagtgttctcc

SEQ ID NO: 13439 - DNA, 255 bp, Emericella nidulans
  unsure (1)..(255): unsure at all n locations
ctcgactttctgtacggagtcacatctcagcaaaggtgcgcaccggcgctcgggcataacacacggacgaacaacttaccagctcctaaacacagaccaccttctcatccgcaatccacaacttcatcttttcaatctatgaggtaacnttcgcatcccgacaatcctccaactgatcttccgttttctatgaccgcgcagtgccttcctccacctccttcatccaccgtttgttctccttctctgattcctcaa

SEQ ID NO: 13440 - DNA, 147 bp, Emericella nidulans
ttttttttgttgttttttttttttttttcttctttttttctcttttttttgttttttttctgctaatattttgttgttccgttttgctttttttttcttttatttttttcctgacatatcctatatccactgcgttttatgcgatcc

SEQ ID NO: 13441 - DNA, 451 bp, Emericella nidulans
  unsure (1)..(451): unsure at all n locations
ttaaagggaatancttttaacggatacatatgtataagagtattatggactgcttcgttcgggattgatggaccgtagtattctgtctacgcgaaagagcgtcacttgggaccatatgataggtctagatgcgccttacaagggggcttatactaaagtctttactacatgcacgtgagaatgactctagaaatctcactaattacacgcgatcttttgatcgcctgttatatagtagattatgacggatctctaggtctacgcggttgaacagagcatggactgatcatcacgtatacctaccaattggggggccaagtgaaatttttcacaacattataatgacccataatggcgcgcacgacctgttgctatctgcaagatgggattgtacagggaactagctacatatgaagattaactacaagtcggattattgcagcgaggcatg

SEQ ID NO: 13442 - DNA, 299 bp, Emericella nidulans
atgggggagcacgaaacagtagactgggtggaaaccgctactgaggcactgactaccccgtggtgtcatgggcggcggggacgagagatcttcaaggatgcaataggaaacacgctggatctgtaggtaaaacgaactggagggcaataggcttggggatatggcgacgtgtatcgaaactatacggatagactagtcatgtgcacgtatcgtaatcacggcattatcgataaactagcagatgatcaaggtatatcaagaaaattcagaaggcccttatcaacaattaagtgaaacat

SEQ ID NO: 13443 - DNA, 521 bp, Emericella nidulans
tctaacgccgtcggcacgttcgaggccgtagtttcgggccgattgttccgacatggccgcctatgaggaactgatataccccgagctgcccaagcaagcgcaggccgcccacagatggattcgtgactcggatctcgagactgccaaaacagagagacaagcgcagaactggaggccggataatgcacagtgccagggggctcagtttaggcctgtgtcaggtcgaggctaagaccatgccctcataaatgataactcgcggggccataagccgcctaacagactttgacaccgtaccagaccatgcttttgctcgtgcggaccgactaactggggcgcttgaccatgctgattactgcacagagccgaagatgctggcccagagcaaggcttctactaggatgataagaggaaacgcgcgacgcgcttcatggtgttcattgacgaccgagccgggctacgctactgcaatgacagagactcggccaatggctattctggctagataacgacgctgatgc

SEQ ID NO: 13444 - DNA, 1030 bp, Emericella nidulans
cgatcgaatccatgactactggtgccaatgggaaccacggatcaagcataacagaggatgaattttcacaatggaacgatctgtcgcgcttgtggggtgatcagtatataacagggggggccctggttgacagcgccttgacctggctattggacgatcgaggtaaccaagtggcttcgatatgacacttttcgcagacctattagtacataaaggattgttgtctgggtgcgtgatgaataaatccactcagttttaatttcaaactggtcgttgacgacgaatcgagctgtactttcatttcattcgctttgatcgaccttccttaagaaagttcttacgggaccagaacaatagtcgtcttgaaagttaccaatgactccttgttaacaccctttttgaaaagtggacccaaatacctgtttcatgtacaaccaacttcggcgggtacatggaaatgttgggaattggttcttcgaattggtcacaagtggtttacccggtaacccccccattactatggccctttaatgcggttacggtgttcaatgatcgccatactaaatatatctttatcacttggccgcggacaagacttttcaatggtttttaattgatccgataccagtcgtattacttgggatgaaatttaaggtctccattccttatttatacaaagacaaacgcctcttatatgttgtgtatcaattgtttcaggggttttgattcaaaattggagacttttgaattaatccgattggtcaattacaactgatatgattttgtgttctctctcttgttcatttatctttcttctatatatttggtggcttgatcatgtgttctctttctttttaattgtttagtctcatactttattattctatatctcatattatattatattatttttctttttatttctcctttttcacatttgtctacattttcttcatactatctatttattagttgtacctctttttttatttcctttattttaccaattataatttactattttactctt

SEQ ID NO: 13445 - DNA, 1271 bp, Emericella nidulans
atgtaaaatcgtcgcgggaaaaaattggctttgttgttgcagcgggtttgtaaataagattgaattgtcaagaagaaaagatgggtatctctaaatttaggataagctataaataaaagtgattgatcatccaattgcgttgtaacgccatataatcggcctgttcgtcctgattcaagctatcaaatgttttgatattttttttttctatcggcagaaagcccaacagcaatccattggtaaagcggtggcgcaggtgatcaagccacaggagtgacatgtgccacgctcttcatacatcagttgcgttccagactacatgagagtgtcaacaagatcatcgccctatgagtcggggtgaccctgccttcttatcattagttcaggttgtaattgttaaaggctagtatgtctcctcggtgatgccttgattctttgtttctgtcgtcgcattgcattctctagaataggcgcaggaagacctgatcttatgtaataatcgataccttacattgtccgtatttcattaattacaaccttaacagcctattattggacctcaggagagatctctccgcgcgcccccccccatttcgtctcctccccatcgactgccagacgttcattttatcgtgttctcggatttgcgtcctgtcagccctaccttggaacttccaacttattccagtcctggatccaaatcgttctggcttcgtccttgcgacgttcgacttctcctctcattacgtggtgggctgagagttaacccagagtctgatctcatcgttgcttcccacttcccgcttcagtcgcccgtatggccacataagttcggcgtcgtcggtctgtttctaccccttctcctccaactgaggccattcaattttgctctgcgattgaactgaggtttacttgttggactctgtgctgagtcaaaaaggaaggaaagaaacgaaacaaaaaaaaaaagaaataaaagaggaaacaggaaaaaaagtaaaaaccactttcgtcggatcgccagccactatctctggggttgtcgtctccgctctcttatccgggctttcgcagcctaccccatcctaacccgttctttgccgtgcttgcggcttaccaacttccacagtgaagctcatcatccctcatcttaacagataggatcctatcgggaattatgggaaactcgcagacgaaagagacccgaccgtttactgacaattgtccggtggggccaccatggggttcggcagagtcatggaagaccccga

SEQ ID NO: 13446 - DNA, 1232 bp, Emericella nidulans
agatttattaaccaagagtgctgtctacagactagagacacggcgaactaatggacaaggcaatggaagttttttcggcttgacgatgtgggatgctaggtatgagataacgtatgtctggttcaaggaagtttgggaacttgatctagtagtggcgtggtccttaatgcatgtacaagtatctgtttgccactatcagtccatttttgtctttatgtaactggcatccccaactccattcttgagcggcctcgaatgttcctgagccgtgtagtgccatccgaatgcgcagtacttgctcctcttatcatgcactccagaagccaaaggtactactaggtaatagaaacagagaccttgggcacaaccggtcaaattgttttgtccgaggtacgtgggtttacaaaccaccgcgtagatctaaggcctggccttgcccgctgtctcctcactggccggcctaatgtcagattatgttagccttcttttcattttcttattctttctttttcttctatgttaccgcgttggtcattctaacgtccataacagataactgtgctatccagttcagtgttggccctacagaattgccgcggtaccgataggggtggctaaacctgtggtgtcagcagtcaattgaattagtcactaaaaaaccttgcgaattggggagataagtgatctgtgtgtggactagaagtgggcgttgatcgtcaacatgagactatatgctaagttgagtctacgaatttgatttcttgagagccgcttgtctaccagaaagctttgcatgagtgagctttctatcatcaaatgtatgaagtccgcatgctctgcggaagcaaccgagtcactctcagatgtgatctcaaaggatgccgtacagtggcccggactgcatggccaattgcacaagtcattgctcagagcagccgcagactacctgtcatatcagtggcgtgcagacaatggcatctgatatgcatcacacgaagcgtcctagcaccactacaatgtgccataccatcgatgcataagtcccccagcaattgaggcaagcgacgcagctcgcaagatggaggatagggcttttttggtctggtaaatgtggcggtttagtcaccaccgccacctaagcaaacgccccaccctgatgattcgccaggttaagtctgagaaaactctgtacttaccctgttcatggttcggactaggctagctccttggcc

SEQ ID NO: 13447 - DNA, 380 bp, Emericella nidulans
cccgccatcggagataaccagagcaggcaacggcccgcccggcgacgcagccagggtccaaccccggacggggacaccgtgaaggacaagcccgacgcggaagcgggattagggattgacgggcaggacaccagtaggggacgcgagggagagggggcgagggccggcgaagagcgacagggcgagacgaggatggacacgggaggcgagaaggcaatgcagcggcggaccgacggccacggcacgccctgctcgagagatgagcctggcacgcgagatggcaaagcgacaggcggcagaggcagaacgcgggagggagccagccagacgagagcgacgccagggagaagcccggcgcgggcgacgacaaccgggcccag

SEQ ID NO: 13448 - DNA, 830 bp, Emericella nidulans
gatgggtaagggaacaccgagatgagcccgcccgggaaggctactactaatgtggagtctcggaacagcaacgaacaacagcagcagcagcagcagcaacagcccactcgggtcagtcaaagttgggtaggtaggagtcgataaattagcgggcgttagtttgctagtatagccaagtcaatgtccaatgactagtaagcgcgacgtttggaaaattcatacaaggtcactggttcgtggacaagtagtaggccgagctaaaaagggaaagcgaatgctgagctggagcccggtcagggacctcttgcggtggtctgacctacctcgcgctgacgacaggatcaatgaacaagcgactcagatgatgcttcggactgatttctgtggcagaacttgatcgagggtaaaagttgggctttacaaggtttgttagatggaccaagatttgaacaagaatctggtttatgcctgaggcgctctttccgtgtcagatccgtaacatccggtacggcactagaaagatatagtccgcaaacgtacattgagtagccgggctcggctcatgtcttccctgatttacgctatgcggatctcgcgactacatgagcaacacagtctgaagcaatctgataaagagaagaataatattgcataatattttcctgccgaaacaagtctgaaattcgaagtcaagaaaatctaagctgaaggcgatgacgaatcgcagccagattacatgatccgatgctagtgcggacgctgcgtaatctgaatacaagggaacgagcttatattcacctcccaactacctttcttgtacacaacagagg

SEQ ID NO: 13449 - DNA, 692 bp, Emericella nidulans
gagcccggctgtggtcgcggagcccccggtagagccgctgcggcaggctgatgaagggtatgctgggaaggcagtagatcctggggtgggggaggagcaacacctggggcacaaacaaggaggaaggccgcgacacacaccaaacaaaaaggcaaaaacaacaaccacaaaccaaacaaacaacaccccaacaaaaaacgcccaacccgcaaaacaaacacacaacaaacaaaacaacacaaaaccaccacaccaacaaaaaaacacaacaacaacaaaaaaccccaacacgacccaacaaacccaaaaaacaacaacccccaaaaacaaacaacaaaccccccaaacaacaaaatcaaccacgcaccccgactacaaaactccaaaacaccaaaaaaccacacaccaaacaatacaaaaaacagccaaacccccgcccacccaaaaaacccgccaaaaaagggcaaccacaccaaccaacccccacaaaccaccacgaaacccaccaccaacagaccatacaacaccccaacgaccagaacccaaaggcccagcccaaaaggacaaaaaacaacgacacaaccaaacccacaataagaacccaccaaaaaaccgcccccccaccacaaacaaaaacaaaaaaacggactcccacacacaaacaaaaacaaataactcaacccgaaacccca

SEQ ID NO: 13450 - DNA, 130 bp, Emericella nidulans
aaaaaaaaaaaaaaaaaaacaacaaaaaaaaacaaaagaaaaaaaacaagcatataaacaggaaaaacaaaaaagaccaaaagtaacaataaaaaaacgaaaatacaaaccagagcaacaaaacagcacc

SEQ ID NO: 13451 - DNA, 127 bp, Emericella nidulans
aaaaaaaaaaaaaaaaaaaacagaaaaaaaaaacaaaaaaaagaaagaacaaaagaaaagaaaaaacaggaagcaactaaacgatagaaacgaagaaaccaggaagcatccgaaacagaacaaaaaa

SEQ ID NO: 13452 - DNA, 946 bp, Emericella nidulans
gttggtaagtatgggcagggtgaggcagacgaccttcgagataatcatagagcgggcttgtcggcaaatgtagttcaagggctctcttgtactgcaggcgggttccattcttccttgtaaaggcaacgtatttgtccacgacatcttgacaccgatgtttatcgtcactggcgttctaattagcgtccaaagttgcaccaggggtctgtccttcactcacagagcagcaaataccagcccaagtttgattacaacctctcgatactgctccaggtactgaattccttgtctttcatagagacttatgagtccctgccacgctgttttatcgtcgcccttgatgcgagtggccgcgaggtacgctctttcggattcgaggaagtgattcagtttatcttgcgcaagaccaagaaagacatttctaggtgtcgagcattagcacggcactgaaagaatgtgccacttcactcacgcatgatagttttgaggctgttccttgacaatggccttggctttgtcggctgcaagctcgaaatttttcgcatcgagggccgcccgcacctccttgagagccgatttgcttgacatcttaaaagcaatcgcctcatgggcttgtcggaggttgctatttcctggcttgggagcttggagaagggaaaacactctcggtggggaagccggacactgcgtggactgcggtacgtcagagcccgcttatcgctcttgaggtagcgccgtttcgtctccgcattgctgactgcagctccccatgataacctccagctgatccatgactgattctatattgacttgtgatattattcgctcttttttcaagatcacgagaacatccctttgatagccccgtgaccgaattccatagattcttgtttcaaagacaccaagctgcattcgttggtgagcagctcttatcagcaagatctag

SEQ ID NO: 13453 - DNA, 99 bp, Emericella nidulans
aaaaaaaataaaaaaaaaaaaacaaaaaaaaacaaaaaaaacggaacgaaaaaaaaaaaagaaaaaaaaaaaagaatgcaataataaaaaaaaaatccc

SEQ ID NO: 13454 - DNA, 1279 bp, Emericella nidulans
caaacacgcactccctggcctgccatcgaccgtatcgacgcagtgccaggcctcgacatctcagagcaaattttctcgtcttatcctcaactgatagctagggttaacatgaatcatattcgctagccgcaactccgccctctgtcacgaccttctgtcccagcaccgaatctcacctattctctgcatcatgcgctgggaggatcttcagcacagtgtgcggcgccaggaacgactgcagctgcaggcgtgcagccagggctcaaaccgcagtatcagatccagcgaaaacagatcgagctcgaagacgatcccacggaagatttacttggctgtctgaatagtatgttgaactggattcacggcgcacttgtccgccctcatccacatcctgagctatttccgcaaattacagacctgagtccgcatactggcgggcaggtcttggtgcgctgcgaacggggcatttcgtgctcgggggctgtgatagtcgcttatagtacgtcccgcccttccttttctccactgcaggctaccatgagaatccagatcgggcgagatctgagagcgagctttagcatcaccggaaaagaaaagaggataaagtgaaacttgctggaggctgcctgggaattgtagacattgattcaaagaactaactggcttaactaccagtaatgccaaacctagttcttccgtacagaaccgccctcaaaatcgcccagctttcacggccacagatctcgccgaacatcggatttcagtggcagctgcgggtgtgggagtgttgcgggtatgatgtcttcgagaggtccctataggcaaccacggtcagataatgataaagcgcaaggccggctatgagcagtgggttgatgtggtcgataagatctatgaccgggctgatgtcatggaactggtgcgtgcgaaggaggactatctgaggaatttggcggagatgttggaaggtttggggtgagatgcagagttattatgttggtgggacatgaacacgggtttgaagacggacgtcgttgaataattggggttgttaaagcatgtttggaattttttttagtagagttcatggaaaacaaacgtccctcattgctcgttaccagctagatatcaaagttagcttggtagactttgcctttctatagagacaatattattgaggtacaggttggggacggggcttttggaacggaccttgtccattattggtggcaggaaactttagagggacaaaaatttttttattggtaacttttttttt

SEQ ID NO: 13455 - DNA, 611 bp, Emericella nidulans
tacgcttcatgaataatatctcgatgaatccagtaccgatgataggcaacatgctgccaattgacgggcgtttcctgctgcagcagtgcgcggaaattcaggccttgcatataggttggtatcagcaatcctgcgagatccaggaacgttggcgcaaaatccacattggagataatatcattgcaaacactacctggcgcaatctcccgcggatattggatcaagaacggcatctggaaactctcctcgtacatgaaccgcttgtcgaaccagccgtgctcgccgaggaagaagccctggtcagatgtgtagatgacgaccgtgtcctccgtcagaccctccttatccagaaagttgagcattcgactgacattatcatcgatactctggatccatacatgcccgggagaaacttccgctctggacatgataattgactgcgaagagacgacactggacacggcgtactgacggctcgtgcaggtgctcccaaagctcgtcctctacttgctgtatccatgatctacacgcctgaagtatagtcgcatatgtacagaagaagacgttgacaacggctagaagagccagagcgagcatttgatctagagcgg

SEQ ID NO: 13456 - DNA, 111 bp, Emericella nidulans
cgcgcccgaaacactaaaacgccctccgtgctgcgctcccccttccccaccctcccctctgctgtgctcggactgactcgtacttcttgtgctcttcgacctctcaagtac

SEQ ID NO: 13457 - DNA, 610 bp, Emericella nidulans
cttaacgcgcttggggtgagatacgactaatggtcaaactaataaagcatttacagagctgcataagtattcctggctcggttgtggcttgttcgcgactaccagaacatatactgagaggtggcatgagaattgcctgtactacactcaattcaaatacctagcatgaactcacctactaacaattacgcggtttagctttttacataacaacggtgattgactacttgactaacaactactatatagcatggcaggcctggataattgtcaactgtgcctgctgaactatataataaggaggtgagatgcttatgctattacgtagatgctaatacattgtgcatgtgaacgggacatgaatcgttagtgcggttaggcaccttgaattacagacctactgagcccttgatatacctatggtccattatctgacacaggaatccagctctcttgaccagacagtaagcagagttgcatttatagagcatgagcatgctagtctaagacattggcataattaatgctgctgcctgaagagcaatctgactctaattctggacgtttaccacatacaggcattcttatcctactttggctccacgaccac

SEQ ID NO: 13458 - DNA, 918 bp, Emericella nidulans
  unsure (1)..(918): unsure at all n locations
acacatcgtactgtcacagtgttagaaagggggatatcattagctagggacgctcagtgtacctggacagcgcttcccatgtcgccatgcgaacgacagtcatggaaagaatcgtaagacgagaaaaccctttctacagcagaaacaaactcagccagccatcatagacggcgatatggttcaacattggtgatttatctttacctcgaacatcttaccctcacagcggctcttgctccgctccatctcgacaggcaatactccgagactttttacggtatcggaatccataatgagagagctcgagtctgtgaaatggtgttgaggaactgtgcttgtcaagaatgaagggaagtatgtgtagctttatgctgctgcatagctacatcaccgggctttccgataccaggagattctgttccttatctctgcccagagtgacgggctgggggcgaacgaatcaagaatctaggtgcacgaaatgcggagactgcgcgcagtcaatgttccgctgatagggaccttcttatgccttaaggcacttcagagcgcatgctgcgtctggcgtcagatactgaggcccgtcctgatatggcaaaaaagtgcgttgagggcagtgatgcgattggcctaatcacatgccccaatctccattgcccaattgaagaagcgcagcgatctttatcagtgcttagcctggcctttcggaatactacatgatttccgagctcgttcatgccagactggcttgcacgtataagaaccgtgagcgggattgcgaggtcttgatagaacactactagcttgtggttttagcatttccgtacctaataacagcaaaatgccacgcacgaaggagggctacatgtggactccgaccagcacgactganggcctgatcaccgtgccgtgcagaaa

SEQ ID NO: 13459 - DNA, 1128 bp, Emericella nidulans
ctgctatgctgcgcgtcgatagctggtagactttgatgctttgtgtccctgggttcaggccgtgggactacgggcgcttcctatattacggtctgcgagaccagtcaagcatacagagataacgtatcatcgacgctggcatgcacagtatctaggggggataccaagaaataagtcgactttgcggcggagctgaagacacgtctggacgaaaggtcttacagtccggccctggttcaattgagccttgacgtcctggacatttcgtacgggaaagtcagtgactacccgcctcccggtggcctattcgagtccaacttgatttcctgcatggaaattgttcctcaaatggtcacaccagggtcgctagccgtgtgttctttcgatccggatgcaggtgatggtgatagaatggctcagatcggtactcgcgctatcttaacttgcgtcaaagctcttttaagcgaaggagagttgtccaagaatctgaaggtatagtatgcagccacgccgccgggactgcagacaggattgcctgagcctacaatgacaatggcatggaatacctcttctcttcatcccaacggccttgtctgtttgtctcttacatataatctacatgaaccatcattatagtattttacggccttgcattatgtgtttcatcgtgagcgggtcctattggatgtcagtttgtacagtacgctagctctattttatgtacgtctctttctttgtaaccttatataggaatgatatagcgatataaatcgcatgtggccagtcaagcttaacaaagacctatgtattggcccaaatgaaatcccaatgaaatgttctatagccgtaggaggtatctgcagccgagcttccgctgcagtaatagactcctgaccactatcattgatgggccacaatacactaaaccaatagtttactgacatcagggttagatcagcccaacggccgcagagaagaaccgtggatatctgttgaactatataagctctgacttaccgcgacatccacgcagaactacttcgtcattgctccaccatgagtatcatacgatatcaaccttagcctcactctgccatcactctgcccgatatatgagtccaagtgcag

SEQ ID NO: 13460 - DNA, 109 bp, Emericella nidulans
aaaatacataaaaagaagaaatgacgagggaaaatccgcatctgggaaaatgacgaaccgtattaagactcgatttaatggtaggctttctcgtcgtcattatgggcat

SEQ ID NO: 13461 - DNA, 138 bp, Emericella nidulans
ccgacaacgattctacgactggggttgttgatgttgtcacaatcgcgttccataaccgcctccttgaggaaacaatcggtagtctctaaactcatcatagccaaggtcgaaaatatatctatgaccaactggttgcgg

SEQ ID NO: 13462 - DNA, 969 bp, Emericella nidulans
caagcttgctgaagcgttcctgcaccctgcgcccagttcattattatagcgggttcgaggatgcaaagggtccatttatttgctctacctctgtccactcattgagggaacggatacccacgccgcaaacacgcacagtggtatcattgttcagcagccgcagtctttgccagcgttgcccatcctgctgaaagaatggctcaacatgcccgggacgggtgatattgaaagtctcgacacgaaaactattggcaagtccgttgctgaatgtccaggggccgtcagccaagggctcatccaagccgcttctggcttcggagtactttgcctccatctgaattgcatcagggctggaacttgaggccacatccaggaagggttacccgccaacctcggttctatagccaaacactgcggttggagttgagggcgctagcgttagacacgttaagtcggaggtgtagtatgaagaccgggaccattggcggactgttgatgttgatatggatggacaattatctctctgtatgcctagttagcagaggctcctgcatacgctcctttgactaccgagtttaggggcgtttcgacatacccatcgacaaccgcgatacacgcggccagtaaaatgaccacgaaacggtaaagaggagacatcttcgctgcgcctgcttccagggatgattccctctaagctcagtcgaaatggccgtgttctgtgcgctgtaggaaagacgccggaaatatgggcgctgcttggcgctgtttgtaccgaactaaagcaaagctcagtggagagccgacatggtcaccgaagagtggatcacttgcaatgcctgctcaagacgatgtaatgaatagacaatgcaggatgctttgcaaaataccgagtctgttatatctagtgatgtatgtttccagaatctgcacggccatcgaacactcgccgccctccattgaaaccggcgc

SEQ ID NO: 13463 - DNA, 831 bp, Emericella nidulans
  unsure (1)..(831): unsure at all n locations
ggatcccgttgaagaagcccgcgcgtctctcgagagtgccagccctgcccgtccaaatcgacaaacacagaatctcctgcatgaggatctaactgcacggttctcttcagcttccgccgcagccgatccggctcctcggatcgcgacccagcctggggaccagcccgtctatcgccctccgttcctactggctctcgtcttcgctccgttcaacctcttatatagactgttcttgggctccttccgcctcttcggatccctatttcccttcctcccacgtttactcaatacgacagcaagcccagctctacaaggtgttgggcgaaataccaatggccggcgtcccctggctcctaaagatacagccgcgaggtttatccgcgaattcgaggaggaatatggagctcattcactcccgttcttagagaacggatataatatggcattggaaaaagcacaccgagacttgaagttcctattagtggtgctttgcgcccctgagcatgatcacacggatgcgtgggttagggaaaccctcttgtccaaagaggtcaccgattttatcaacgattcccaaaataacatcatcgtttggggtggcaacgtacaggatgccgaggcataccaagtcgcaaattctatccgatgcaccaagttcccgttcgctgctgcgatagcgcacacaccaagcgtttcctcgactgcgatgtccgtcatcgccagaatatctggcgttacgtcgccggcagagtttgtagagaaactacgcactgccatcgcgcagaacaaggagcctcttgacggatccgggttacgcnggcagagcagcaa

SEQ ID NO: 13464 - DNA, 1529 bp, Emericella nidulans
atgaatgacgggaagacagggaaataaggagaatccgcaaggaagaatataaaaataatatgggggggggcagaaaccccaaagaagagttttttttatggccccccccgagacaaatgttatattattttaaagggggagaaaaatacccacctctccactaaaggttgttttagccggggtttccacctgagaaaccaaaccacccaaagtccatgggccggattaaagccaattaaaaagttcctccaagggttattcccgttcatatcccagaaaaggatggcctacaaaaggccaaaaataggcccacttcaagtaaacacgttggaataataaagaactttggcgtgaagtgggaaaaccccttaaccatagtaagcaatgtttgggaagtaaaaggatgtatatatgtgaatgatccttccttaacccgctaaactaatagggattattatgaatctcaagctaaaagcttaaaaagtgcaccaggcagtcttactatatccctactctaatcttatgagatttagacatgttagacataatatatgaataggacaagtttccaattttttcaaccagtttagagactacttttatgacgctgctgcctatctaacaatccctggtcctaggccgctagccgatacctaaactacaatccgcaggacagcaacatgaccgatgctaccaatgcgttttatagcaggatcattgttacaacgcgagtactaaactcgagcacagttcgaagacagcaactacacagacaaagcaaacgattttagcaccacacttcctccaagctcagtagtcgcatgattgaagattccgaagcggtagcccatgaagaactcccaattattattcaaggtgtatgaaccaccaaggtctgtgaaggttgtaccgtcgccactaaatgagaactggccgctgcctgcaccgggcgatatatccgcttcgacgcggagccatacttcgctgttcgagtattcagccgtggcaacttcagtcccggtggaaaccgtgttccattcagagtccatctccagccccgttgtgaccgcgatgcgcgttgtacttccgtcattgacgactccaatccaggcggaatgatgacgaagcaatgcgaggccggctcggtcaccactggccatggagctaatattgaggtggatggtagccgaagatttaggaccgaggattcgatgagtcaatgtattcttcgccgcgaagaggtcatttgtgagcgaagcggtggtgagagtcacgccttctccgatggaccatttcgcattatccgggttatgattccattcccactggggcgagagtttctccacggttaaagtttcaatgtagggcttcgatgatgaaacaggggttgacggtggattattgcaaggtgcgtatatgttacgctcagggcccatccccaatttcaccatcgtcatcctcgctgttcatatatggagcctaacaaggtgcccccccgggtagccttccataaggcttttttccatccc

SEQ ID NO: 13465 - DNA, 456 bp, Emericella nidulans
cgttctctctcacggtcaccacgaggatcgcgttccctttcacggaattctccacggccatggctcgacctctaccgaaagaattgactcgaggatggtggtcaactagagcccgtggcctctggcgcgctctcgtcctatgggtagatttgcatcatcagagccacgagggccggctgggggtcgacgatcattgaatcgttgtgaaggggaacgatcacgggggttaaaccctgacgattggggatatcgcgcagacatcaccggaccatgctagaaggtatccggaatgatcaacctggcagagggccctgcagcaggttagtcacgtacttcgctctgtacgctatgagataaaacaaacggagtaacgtcaaaactcgaaaacaacttcgatcaaaggcaggggcgtcaggcgcatggtcgccaacactgcgcagggctaaaagatgtggg

SEQ ID NO: 13466 - DNA, 797 bp, Emericella nidulans
aataacatctccgtctcaacagcgcaggatatcagggggccatggactccatttgagctagtgttggcctcaaccgaaccccactcgacaaatccctcgccctggccattgtggacaccagaaaagcctacaagcaagatcgccctagcagtggaagacatcgccatcttctttgccgacgattttaaaagcgcatacgaacttgttcacacgcaaagctggaacacgagtgaatacagcaccacatggacagaggacagcttcctatggcgcgataaacgcggccactggcacgcgctcgcacactggatgattgaccttgtcgaacacgatgggcagaagtggccgcgggtgggaacccatgtgtttgcgagggagctggcggggccgtggcactggaatatgcacgaagcgtttgattcaacagtcacctatacagatgggactgtccagacactgaagagaagagagagggcaaagatcttcttcagcgacgacggcgagatgacgccgttgtatctagtcaatggagttcaggaaatggacgagacctcgagaagttcgacgtttattcagccaatcggtgaggggtggagagattttgagaggcgattgggctttagatagtctcaagaaggaaaccagcgccagaagagagctgtgagccgttcatgggtaagaaggatcactgtagttgtatctgtgggtcaggacactcactgtggacacccactgaccaagctgttttggtcaaaggcagccagaagaaagccttgttgcaactacttctttgatga

SEQ ID NO: 13467 - DNA, 997 bp, Emericella nidulans
agaatttagcatgaaaggtgagtattcactttcaatttgagcccaagatggatcggccacagcattgcccacatacgaaccccgtctccagcacaaagtcaatgttctcgtttcccagattcggtcgcgaatcgatcgaccgctgaatatcacccagtggacgatgtacttggcatttgacgtaatgggcctcgtcggcttctccaaggacttccgccagctcgaggacgccgtcgagcatgcggccattgaagagctgcacgggcagatgctgatgtatgggattctgaggcccgttccctgggtcttaacaatcctcggtgcgacccttggtctcgccggtaagtacgggcagttcatgacatattgtgtggctcgcaccgcggagagaaaagctgtacgttttctagccacgaattcgataatatcctaactatcgcaggaatggaacgcctcggaggacaaggtcccccaggatgtcatttcctggctgttcaaggcaagtgacgagaaggatcagtcggctccgcaggagagcaggccctgaacgaggatggccaactgctcatcatcaccggcagtaggttcattctgactcctctgcggaatcataatgactctacctggcagcgacaccacgagcggagctttggcaaacgcattctactacctggctaagcatccagccgtgtataaaaagctacaggcagaactcgataatgctttttcaagcgggaagcagtcccctaagattaacaacgaaaccctacgcaaactaccatacctcgaagccattatcaatgaaactctgcgtttgaagccggccgttcctagcggccaacccaggcagacaccaccgcaaggacttcagattgacgaggtatggatgccaggcgataccatcatcatcgttccccagtacgtgatccagcgcgacgatcggtacttcccctcaggagacgaattcattccagagcgttggttagatgagaaggac

SEQ ID NO: 13468 - DNA, 1726 bp, Emericella nidulans
aacattccattaacgcatcgatcttgccttcgatgccctcgattcgttgctcctacgcatcaagatcatttaacatgaagtgcccaggcaaaataaaaccgacgtaccatcttcctagcataatccgcctcctcatcgccagaatattcgcaaatctgacccagccttaggcaggacgagcaattcggccgttcgccgggacaccgcgatttctttcgcctactcggtgttagttgacaaagcaaagcccgcacatcgagacgatcttaccggcattgctcgcacgcttgacgaatccgctttggaggccttgacatgtccattgaacagtgcatgatcacttcttgttggcagagagctcgatacagaagatcatctggatccggaactgagccgagcttttattactaagcaatagtacaattgccgtattagacaaagcataaagtcacatgacatagacctacaagcgcagggtaagatattggaaatatctcacacacaggtagtccaggtcatcagaggatcataactactagagctgcaaagtaaggagcgctacacttgaatcgatgtaatcgtcccaactatcaacccagattgcctcagtctttgtccgctccccggctcatggaaccaaccccaaaccaccaagaatacccgtaagaggttcgcacctcagtatgtcccccactcacttgtctgttgtttctagcggtgcgtctagtagcagtggttttcagacgctgctgataggatgagcctcatcactctgggcatgccaaaaatcagcttgtattgaataattgattgcgcgaaaaggcgaggtttcataagcggctaacaaaacgcaaatcatcaatatagggtgtagcctcagcctgccgccggctctgccgcacttgagtgtctgaccgctgcggctgtggtgcgcgtcctccttccctcccccccgcggcatgcgccctttactgcccttccctcccctctggacccgccacttccactctgcctcttccccccctgctccccctccccgctccctcccgctcctcttacttccccttccccccccttcccctccctatctccccccctccacccctccttctccccttccttctctctctctctccttctcctctctccctcccccttccttcccctactcttccttccctcctctttcctcccctctccttacccttttcctccccctcctcctctccctcccccttacccctccccctctccctcttctactctctcctcctcccgcctcacctctatcctccttctcctcttctcacttccctcacccttccccgcctcttctctccttttctctcctttttcttttcccttctcctcctccatcctctcgtcttcctcccccttctctctttcccatctctttcctcttcccccctcccttctccctttccttctttccctcccttcctctcttctttcttcctctctacccccccccttccctccttctcccctcttccccccttcccctcttcttcttcctccccacttcctctctctctttcccttcctaccccatctctcttctctcccttcttgcctcccgcccctccccccccccccctcttctcctctctctcctctctcccctttcccctccctctacttcctctcctcttctcttttccttcctccccttcctcttctttcctcttcccgctccctctctcct

SEQ ID NO: 13469 - DNA, 768 bp, Emericella nidulans
tcttagccagtcttggattgactggcacatgataccactcctcatccattattttgcttttccttctcttctctttccgcctgcaactccctcaccttctcttctatcatcttctccaacggcagatcccctagagtcctttccaactccccctgcctcttagacgcttctgtggcctgttcctctgtcgagtttctttccgctctaggaccttgacccaaccaccataatctcatcaaggacgcagctcttagtcggcgtatcgactcctgcgtcgacttcgtcttcttcgggtttccaggcttcttactcgcactcggagtatcggccaaaccatacagtttctcatccagctgcttaatcaaatctttataaacaggatgatcggtttcctgcacgaacgggccgtagtaggggtttcgagacatagtctctaggtgatcaactgggtcttgctttatcgtgcattcgatattgctatgcgctcccgtatcggtatttacttcagccgtagcgtcgacgcttgcagcatcggggtttgtcgcgtcatttctggcttgtggtgataatggtgaaaggtcaacatggagaggggaggaatcgagtgcgtttctcgccgtagcggggtgccaacattgcgaaattccaaagctgcgccccgcatttcccctggctggtagacgggtttttcccttgtctgaaccaagggacaaaagaatacctctccctcggcaggatttgtttggtggtccttaattttcttccccc

SEQ ID NO: 13470 - DNA, 862 bp, Emericella nidulans
ctcagggatctagtcgatttgattttgtttctcagtgttgtgaggaaagacatggttggtattagttggagttttcctcaattttcagatgaccgcttcgtctaccagaagtgcaaccgatattgtggtttaggatgaatagctgcatgtgcaacgcagttaaagcagtcgtatttatccccaactaaagatttttcagggtttgctgttaattgccccagaacgtagctgccaaagagcccttttctgcggcgtaccttcgcaatagcgaatattgtcttatacccacggcaaaacgagcagtatgcatctcgcttcagggctaatgggcaatttacccatcttatgctctattgtgctactacttcagctggcttagtgtccaaggtgcagatatcttcagattcaagcttgctcgtgccatcatcactaagccccgaaagttatggattccttttggaaaatcttggatgaatcacagctcctatcttccgctgcgcatgacataaataattagtaatggcactgttgctcctgtatttcatggaaagttactgaatcgtacattgcagcgtcctgtcttctatgctagtccgataggatattttggtaccaaattgtgaatgagagcgattccatcacttctctgaatgtatctgccaactatattcggaatccgcgatcactcctagatgctgcaatttcgatagtggcacgcttgttgaatgtcatccgaaattactactgacagaaaacaatcatattctcatactccccgagattccagtacgttatcgaaaaagtgagaagatagtagaagccagaccgaaaatctgattaaactttcatcagtggccatcgg

SEQ ID NO: 13471 - DNA, 510 bp, Emericella nidulans
aaccagactatgttgtgctaacggctgactaacatgggattcctatcctaaggtacaggatgggattgagcatggctcagggctgcacacatgagcgaatgcctaacctagcccattatggcgcaacctacccatgaaatggcagcaagctgcaggacgggtatatagagcgcacgaaagaactcagacccgactgaagccaccatactataatggtacactaactgacagattgaatgtcgcttttgcgaagaaggagaatgatatacaggcgaaagcacattgacgaggaagacgcacgctgatgatacatcgaccgaaaaggagacactctcgggaaaagcgctcagttagcatttagtgctgagttaagaccagaacgcatgccatgaatcgtatatatagagcatttagtagtgtggatgtaagacgccagaatccgattctcgcaaggaagcaccaacggcgggcatatcacgagctaccggagccacgtgttggcgtataagc

SEQ ID NO: 13472 - DNA, 1678 bp, Emericella nidulans
caacccgcgcggaagaatatctctccaccccgaaatgtaattagaagaatataatggcccggccgcaaagctttgggcaccggttttgtaaataacaaacaagtaagctaaggatctataagaaccaaccttcaaccgaggatttgtaataacttcctgacccgaaaaatgcattattttatccaaccgttatatttaaggacctttaaaataattcgttgttaagccccgacaaagactccaaaattatattaagctcggaaggttttttttttaaaatttcaaaacttggggccatgttgcaccaaaagggcttaatcatttaaacaaactgtttttctttaaagaccttgtgtgattaatgagcattcgccatatggcaagaataattaggttgggcccctcaaaccagttttcaagcgcgagcacttcatacttgataaatcatattcaggccgacatagcttttcttggattatcacaaaatgccactatgaccgacgatgtcgagaccctgacggtctgaagcaatatgccaatgtaatctgttgtactttttgtaattatatatcgttaggcgtaccgaccggttatctgctcggatagacatgcctgagacgcagggagcccacgcacgaatcttctctcaaattttcagtggtgatcaaggtggcaaagacatcaaagaagtgcataattcgcaacagaatggatcgaatttgcaatatcctcggctctcaaaggcgcagcacgggcctgctggtaggccaacgtgcgcacagtatatcgagatttccctatcgctcagggacagccttagcaggttatttgacaatcatgcagatcttttgagtttgagcttgtccagaagtctaccaaacgcggtagaaaccccgaaacgagcagtttgttttgcgtctgtggatgaaacaattcgatctgcggtctgttccaactgccggacaagaaccgaagatattccggcagatcttagttcatcgctcagatcttgagacacgacctatactccattagccggctgctgttcggcattcgcgggcctcggcgctatatccaacttcccggtcccatatcgaggatgaaactcctcggttggtggacaggatcgaattaaaatttgggaatttcaaaaaagtgtgttgaccgagtcgcccagatactgcgacggcgggacataaataagacctttcctgtatggtctgctcaagattattgccgcataactcgacagaccatccacgatgaagacatcagttctatcagcaggcctgagcctcattacctcggtagtagcgtttccgcactacttggacattgagcgacgctgggagcccagagaatggattgccccaggaccagacgactgtaagcttcattttcgtcatctacttttttcggcgacttgttgacagtcaggcataagcccgcggtccgtgtccgggtctaaacaccctcgccaatcatggctacctcccccgcaatggtaaagggataacgcttgatatcctcaaagagggcatgcttgaggggttcaatatcgagcatggcgatgcggtgcttttggtcttccaggctatcaggaccagtccaaattcttttctcggacagggttcgaccctccgccgacccttcggccgggcaccggcataccttggaa

SEQ ID NO: 13473 - DNA, 617 bp, Emericella nidulans
  unsure (1)..(617): unsure at all n locations
ggggtggccacttgccccnggcctattgtttattggcagagttttttgttgcggagaccccagaggggcgtcaggggggtatttcgatggggcatgcgggggcccaaaccggttgccgaacgcgatagtcccgacagcccatgacccaaaacgctttgagcggctcaggctcaacatgttagtgcacaaaagggcagtgacacacgggactggactttacatcacgaggctgacaacaagcggagacagcggcacacaagggaccgttacactccaagaagaaagagatgatgctcataaccatcggatatccagtctagacaagcgccctatcatgaaactcagccttccgagtgatgtctgcccggtcaactcgctatgcaccccacctaaccaatcggtgaggaaagatcggtcagacctcccttgagcctcatcccacgaaccggttgggagatgaacacgccttccagatcctgagggcccacctgcataaccaaattccttagctctaaccttgccctttgaacctccaacccccaagaaaacaccctgtcgaattgcgcccccagatccggctccagatattcccccaataagctaccaccaggcgaatc

SEQ ID NO: 13474 - DNA, 713 bp, Emericella nidulans
tctctaacttgcgtactcccgggcatgaccttcctattggattcgactgaacaattgaacagtattgtggtattctactaccgctctttggagtttcggtactcactactgtgccacaactggtattcgtccatatgtattctttgtagtttcttacttatttttattccattttttttctttttttttacttttttttcttctttattttttctttgactttttttttttatttgattcatattttcttctcattttcattttttacttttttcttttctttactctcttctactcatttcattatattaaatttttcatttttttattttatttttaatatctatttatatttatttttaattttttatttcactttttatttattctttttactttttattttctttttctatattcatcctatatttttttttattttccttcttctcttttttatattattttttttattttttttttctagtttttattatttcttttttcaattttgtcattctttatcctatatcatcttcttccttattatcattatctattatcttttatatttttctatattgttctcttcttctttaactatcattctatctaatctttttatcactttctaatgtttctcttatttttctattaccttacagtattattttatattatttttcacacttctccttttacacttctctatg

SEQ ID NO: 13475 - DNA, 514 bp, Emericella nidulans
catttaggtgacactatagaatactaggatctattagcacctagatgacgagtccctcgtccgatcgcaccttttccttacaaggcaacgtacgacaaggagaagcagttaccttcagttcccttagagcggacgtacgtatgcccagcaccccccagaagtcaagatgtgcagggatggcctcacataccattgtgcggtcaagatggcagagacagacatgtatgagtgtcatgagtacccatactcagacaagtatctatgctccaataaagatactgcgtgcggacatactgcgaacgatactaccatcgcttccagaacgctgtgcagacaacgctaactaggtccgaggatcggatccatgcaaatttttctttagaattgcgagcttatagacacttacgcaggatggaaagcaataggaaacaagcagcggttaaaagcgggagcctgcactatcaacctttaaccggacttctggggaccataataggaaaagctggctaccaat

SEQ ID NO: 13476 - DNA, 664 bp, Emericella nidulans
tccccggtcgctttccggacgatctcgcggggcaccggtacgtggactctcgggggatgagcgctgcactcattatcgtttgctcggttatgccaatgttggttatatgatgtgatcgcacactgtcactgccgtgtgctatgtgttactatgctttcaaccaatggcctacgagcgttatattatcatttgacattggtatattatggaatctaaccataccctaaagtacacggcaggggatggggatcgagctctctcttttggagagtttctgggggaaatagttatattacagcggatttgtccatatgacgtttgaaatgatgactgtagcacattatatctttttatagcataacagaatacattctggcttgaagggcatgaggttgcttgacgagcgtatgctgtaatcgaccactgcattacgcgtgatgactacattaaaggcaccgagggtgaacattctctttatagatattcaagctgtatggctgcttgtggggtgactagccctagacgataccttgtatttactaccgacattatactccttttgcttgccacagcttgaactcgaacgcctgtgccatgtttgcgcttgaggatttaaacactttacaatagaccgggctgacaggtttggttgcttttgcgcctg

SEQ ID NO: 13477 - DNA, 1009 bp, Emericella nidulans
tcgttttgcaaaatgccgacacttctcagattggccgctgccgaaaccctgggttatgtggttgtttcagatactggctgatattctgccgaagtgtgaggtcaacccaggttcgctgcatgagagtgggtgtcgtgatcgagatgtttggatgaaactttacgatgatttccgcattaagcggagagtaaggcgcactttctatcaaccccctttcccctcgataaaggtcactcgctgactggttgcctaggacgtatgcaaattactgagttaccctgcgccgaactggccgtcaggaaatgacccaccacctgcgtaatgcgggcttctacggcgttattggtgatttcggagttatttgtgtcatatcggttaagcaagtttacagaccatttatattgctgggaggttaaagtataaagtcaaccgatcttatcatgcgaacttttatccagataagcagaacaaacaaaccaggcacggaaggccaggtatgtaggtagttatgtaaataatgtgcacttaccggcgacaccttgagcgcaggatggactaaagcagtgttgccgacacttaccaccctcaaactcctcaaggcctcttcgatatcggccactggttcagacaaaatgaccatggccacgctttccacaaaagttggctttccgctagccttctcgctgtacctcacgcaactttgcgtaaccgcgcaaatcaccgggatcaaacaaattacgccattaaacactaccatcacatacgtcgatcaattcagcttcagctgcctcccgctaacaacacaacttgccgacccaatcgtgtcacccggcaggcagtcgtcgcacacgcacgtcattacggggggtaccgcattccaggggactatggggacacaaacggcgcggaatgcgcgcgagaccacatgtgacgttgcgctcgatcgaagcaattattgggttccagcgctttaccacgagaccgacaccggattgtttgagatggtaga

SEQ ID NO: 13478 - DNA, 948 bp, Emericella nidulans
gtactatcagtctatcgagcgcacgcgtatccaggtaaatgcctgctttgctggacagtctggatcgtttgcattgaagtgtgtgcggcgaaaggaagttcggaaaggcatggttgttctcaaaaaattggatcaacagcccaaagtctaccgagagttcattgctgaaggtacttatcatcatagaccatggttggattcttgctaacttatatagtcctcatcctgtctcatgcgacgactataaagcctcggtatcaggctatgctccatgtcggggcggtgagccaaacatgctctgtcatcgacattgaccgaccttacattcgaactggtgatcgtgccctagttgccttccgtttcatgcagcggcccgaattcctcgctcctggtgatcgggtactcttccgagagggtaagacgaagggactaggcattgtcaagagcgttggatacgattcaagcaatccattgagccccgaagcaagaaaagagtatgagcggaaagaaaagcactgatctttctgctggtgctgttcgactctctcaatacccctcaaaccctggccgagaagtcagcggcttacgacgcgtcactatatgtctgtctttctgcatgcgagtggatctttgagtcatttttcatgaaatcctgggtttctcttttttctatatacagtgcagacacgacagcctgcctttgtttattgttaatgggcaatgttatgacttttatgttttatttcttctgtttttaacatcaccatatgcaggacaattcttggatagagaatcttagctaaataaacttactccgtcttcacaggacctggtttttcgcttctatcatgaggtatttccaagggcgcccgtccgatctgtggctgtgcagagaatagaaaaataaatatttggtatagcagtagtacaccctgatacaaaatcgac

SEQ ID NO: 13479 - DNA, 309 bp, Emericella nidulans
cgatttaggtgacactatagaatactaggatccgtgcgtgtctctgccagcgtaagcgatgtacggactattttttcgttgaaaagacctatattgacaggctttgcggcgcggaggaccgtgcgccgatacttgggtgggtgtccgggggctctagggagcgcttgagttcagagcacgattggtactcagactcatcggttatgtgcgcaagactctgttgcttgatatatacttctggttgcacagtcttccagcgctgaatatgatgaacctgttttttgacacgactgctgtgacttttacagg

SEQ ID NO: 13480 - DNA, 469 bp, Emericella nidulans
aaccctacgatttaggtgacactatagaatacataggatccccgcatgcccatgtcagctcaagagatgcacggaccaatttttcgaggcacagaccaaaattaacacccatgggagagaagaggaccgcgctccgacacttgcaaaggtcttcaaaaaggatatggatcgctagaacacataactcgtttgcttctcagccacaacggttatctgccctagactctgctggatgatatatacagactggaatgacactctggtattgctagatcggaatgcacctgattactaacacgattgcgcgacctttacagcaagccaacgagctgtctagcgaggcatgaaaaccctaggctggaaaacgcattgaactacctgactggagccgaggacgccacagcatagtagtcattcagctcagtttgattgatggagactagatgctcaccgtatacgttataaccag

SEQ ID NO: 13481 - DNA, 579 bp, Emericella nidulans
ctcactatagggagacccaagcttaggatctcagacgttggaaagtgttgcgcctgatttgccccgcggactaacttttcaacatgtactttacacgtcggactggcttgaccaggcaatgacacacccactcaaactaccatgggaatcgccgagagtcaacaatgtactattgggtgtgcacttcatgggaagacctgccttaggactgatgttagcctggtatcattttgtaatggctttcgtgccccattcttgtttttggtttaagtgttttccggttaactatgtccgggtagggattgttatgcttccctttatgaagtctcatagaatctagtcttgttaacatttgaatgtcttgtttaattccgatcgtagctacattgatcgctgactctctattttagacgtgcgacttttcgttttttttgtatgtttgtgctttcatcctctcctttagctatttttccttctatttttatagaatcttaactttttctactctctctctttattaactattttttagatactattttttttctttttattgattttatcttagttatactcttg

SEQ ID NO: 13482 - DNA, 556 bp, Emericella nidulans
tgtgatagaacgcctctccactgccgtttagaacaaaaaacaaaaaggaagtaaaaaatgaaaaataaagctagccaacttaaacgcggcggataatcaagaaaggcgatgtcatagggctcaaattacaactgctggctcgggaaggacaggcgtggatagagaggaaatgtccggcagttttgatgctcgaagattcggaggaaattcatgacacatatgggtttgtaagcgcgagggctttcgggacgggtgttacttcgtaccaaggggcgaattggtaagttcgatctggtccgtacccagagaccacacttagcacccagttccaaggaacgcaaaatctgttccctctggttgatttaacagtcgcataacaggaggcttgtattcaagggttgaggcatagggcatgggcggctggctttcgatagttggtgcggtatacacgggttgttggtacccactggcatgaacccatacggtgtggataaaccctggttctgctgctgcgggtgttgttgttgttgtgttgctgctggtgctgttgctgatg

SEQ ID NO: 13483 - DNA, 682 bp, Emericella nidulans
  unsure (1)..(682): unsure at all n locations
ctcctatagggagacccangctttaggatcagacggctgtgatgtgcaaggagatccggaaaaaggcgcgagattccgagtcgctctgcttgcgagtattctccgagaaatggtcttggagttctcacttagccgcgaagtggaaaatttgtggtctagcgagntgctttttggagcgccccacaccgttattcctgccttggctgatcaacgctcgcgcatgttgattcttctcgctgttttttcccctcctctctctttttctttctctttttcttttctccttccctcttttcttctcttctttgttcctcccctctattttattttctccttcttctctctctcactctttctcttttttttttttttttttctcttttctctactccctcttttctttatctctttctttcttttctcttctcgctctttttcttttcctcttcttctctccgctcttcttattttttcattttttccttcctttctctccccgttctctcccactttctcttctcctttcctttttcttttcccccattccttcttcctttcttactttcttttcttcctctctctctcgttctcttcctactcctgctttcttttgtatatcctcgctcgtttgctctctcttattccccctctcctttttttcttctcttctctctttcctctc

SEQ ID NO: 13484 - DNA, 830 bp, Emericella nidulans
ggggaatggaacgggaaacggcgcaggctatggactacatcgaggagcaagataagggggagctcactgtatggggctagcgcaatatactctggctcaaatctggacgaacgctgaccgggatagaatgagaaatatgatgtcgcatggctaaggcgctttgccctgaacttcgagaagaagatatctaagaacgcagagctgcgtgggaaatttgagaatgatcctcaaaagtacggtgctgtggattgccagggtgcatgagctgacaagtcacagattcatggcctccgaagccgatctagatgcagagatcaagagtctgtccattctctcggaacataccgacctatacccagaattcgcgaagctgggctgcgtgggctctctagtatctctcctttctcatgagaacgccgatatcgctattgatgcaatccaaatcattagtgagttaactgatgaagatgtggaagcggagcaagagcattgggacagcttagttaatgcaatggtacgttctgccggcttagcttcagctgtatactaacaaatttagttggattgcgatctcatcgaactacttgcccagaatttgtcacgtctaaacgaagaagaagaggcagacagagcgggagtatactatgttctcggtgggtgacggtcctccattgaacagactgtggctaactcctagctaggcgtgtttgaaaatctttcttctcaggtgcatatcgcagagaagatcggtgaagattcaaacatcatgccgtggcttcttgcacggatacagaagaaagagagaccagtgagccagaacgagcaatact

SEQ ID NO: 13485 - DNA, 286 bp, Emericella nidulans
attaaccactacgatttaggtgacactatagaatactaggatcagatgtgctagctccttagacaccgtacggtgcggcctctttgtctaatacattgcgtatcatgcatgcgtgtgtggcgcggatcaatccagcctgagcactccatttgaggtatcagtgaggacggtttggtcactactccgcaggagtacgatccaggtgccagaagacatgtggtattgtgccggagtgctctgcctgctatgggacgccatgcgctcccaggcgtcagggtccgagctc

SEQ ID NO: 13486 - DNA, 398 bp, Emericella nidulans
cgggcggtcggacccagacagtacaagttaaaaaccaacctttgaccgtccatgaacgatactagcagcgcacacgagaatccgtgttgcatagctgcgttcgactctacaacctgacgctatttgcccattaagttgtaacggaaaaaaataatgtgattgacgtccagatggataggcagattagtcggcacatattcagacgttggattgatcttgcgaacgtggaggaccatggcaagagcacgccataggaacaatgtaactgatctacagcgatgaacagcgtacatctgtatggccggagaacatcatggcgagacagtaagtcgtaggcctagacgcgagtagtcggtgtggggacaggcagctgtcctgatagttcgtactagcgtggc

SEQ ID NO: 13487 - DNA, 870 bp, Emericella nidulans
aaaattaacagcggactccatatcgtacagagacgaccgatgtctgggggcttggaggcagaaaggctgggataggcgtccatcccaatagtaaggaacaataatagcaggcaggaggagcagccagcgaatcagaaaaccgccgagagtttgctatgatctcaccatcgttaccaccaaacccgcaagcgtgctggggtgggcctcaggctcaggcgcaggctcagtcagagtccaaactcagcactgtcaggcagagcagtgagcacagagcacacacctggccaggcttccttcccccacaggggccaccacaaagccacggtgcggttccaccagtgcgcccagccttgctcgagatgccaacgtggcatcagtggcgggtgattggccggacgggctgcctcactcccacagagttggcgctaagcatgtacggtaccatacgagacgcccagtgcctcacgcctgtgcctgtaagcgcttgtcgggacccgtggccgtcggtcgcggttctatcacgagtctacgagtctacgagcagtctacagcgaatctcctctctagtctccgtattctgggccctgggataggctacgcgatgcgctctgtgttctaggatggaccgcgttctagagaccgttctattttgcctcgtcgatggattcgatggattcgttgagaccagacggtccacagttccagaggcccgccgcactgtctaccacttacatctctagtctcagcagattaaggaggcctgtatagtgcatgtttcaggtcagtcgcaggccacgatatggatcgctaatttgtggcaacatttgctaagatgaggtattagccgtggtctggcaagtctgggaagtc

SEQ ID NO: 13488 - DNA, 163 bp, Emericella nidulans
cgggaggtcaatgcatatatggccgtttgctggacgagcccaaggcggatcgtggtctataagaacacagttctcaatggccttattagcctccctacgttatcaacggcattatcaggctactgtcccattgacggcgtgtctgtaaaattaaaccatggga

SEQ ID NO: 13489 - DNA, 468 bp, Emericella nidulans
ctacgatttaggtgacactatagaatactaggatccgagagcggatctcccaaacgaagttgcgtacccactgctatattcaagatagcacctgctatgacatgctttatggcgcgcagaaggctgttcccacagtggatacactgttcattggcgatatggatcgattgactccagtgctccttgactcgacagactcaacggataaatgctgaatcctctgctgctgcaggatgcggccggctattccagggtacggcgccagacatgcatacggtgcttaatgacaatctggcctggcttacacaggatactaaggaccttgcaagcggtgaatctcttgcattaggcctgacactgaacatgagacatgcagcctggacacgaggacaccaaaggcaacgtgaagttgttgctcattgtgtcaggtccgaaccgggaagaagtaagaagcatatgcggaggcgc

SEQ ID NO: 13490 - DNA, 909 bp, Emericella nidulans
tcaagccgtatttatatcgctgctccaagaatccgtagcatcccagaacggcccggtctaggctgagaccgcctgcgcgacctgcaaaccccgcgctttcatcaaaaacacgtcggcatcgatcggcttcacctcttcggccatcacagtccccaggcatcgcctcgtctccatctagccaaacccctgtctccatctgccgttaatgctcgaccactttaaccgaaagccgtcttggcagcgcagccgtaagtcgctgaaggagctggaggcagaatatcacgactcagacgacgagcttcccgaagatgctagcttatggaatatccccatttccccgcggccagttgaggatcgtgcaccctctagagaccacagccctaaccgcagtcctgggccgcaacctttccctctgtcacattcagtctctgaggctgcggttgcctccgggcctcctcgacgatcgcccgctacttctcgagcaaaccgccagatggcccgatctagctcggctggtcccgaacgcggccaaatttcgcctcgcaatcctcgactctactcttacaatagcatgatgtccgacttatctgaagaggccaagaacctcacccaggcgctagaattccacgctgatgagaacgatcgcaagcgcggagatagccttcggagcgggaactcctcgctgagatctagtgatgaatccaaacgtgactccaagtcaccgattgaactgccgcctgttcaaaagtccaacattatgatcgacccactacccatcagtaaggagaaggaaaaggtcctctcccgtactcgtcccagctggcttcctcctaaggatcaaaaggaggaaaggcgccatcttagagaatacaagaaaatgatggaacagtctcgggaagcagacaaact

SEQ ID NO: 13491 - DNA, 1198 bp, Emericella nidulans
tcaaacgtaagcagatatcgcttcagtcttcaagtgtgaactctacgtgaaaaagaggacagataaacaggtaatgagtatgggaggctgatgaaggtaatgaaaggtatttcggaatctagcctcgacaaagcaaaagcaacacctggacagtacgtcactgttgcctgattggccggactcaatatattccgtactgcttcaggaacagactcaggacatcgaatctcatctatagtcatattgaccaggaatcttttacctcaagctaccgatatcgagtcagtgtactcgaattccccgtcgtgagatgctgtctttgttgtctggggagttggggatctattgtctttgcttacgtaaaccataatcgcggagatcatcagcggtctcatgagctcgctcaagctcaacacgaatcagcataattcattcgtcggttactctgcgccagttactctgcgccatctcgaccatactcctcccttacaacttctcaactataatctccgcagattgtcctcatagcaaattctgcgctgtggcactccattctctcatataccatggcttcgaacgaggccgtctctaactcaactccggcgctatacgagtctggtctaacgattccctccgactcagaaaactactcagccaaccatgacacctcttcaacttcgtcagactccccgctaattctctacaagccatcgacgacgctctggagcgttctgcgtggtgcggcaattaacctatttctccctttcgtgaatggcttgatgctgggatttggtgagctatttgcacatgaagccgcgttcaggctagggtggtctgggacaaaggtatgccttagtcttctcttattacccttcgctcaagctgatcctgtttgctttagatctttcccacgtatcggcgatctcggcctgtagctgctgggctcggattatagaacggctccggaatttgtttgcggatctgagttgaaggagataccacctggccataagttgaggagttatagacattgaattcagtttcacgcatggattgatcttttcagatctactctttcttttcctgctcaatggcatgcacctggagtgatggctacatgtacatacataaacccaagcaggcaggacattatttagtttggagcattcacataacggactatgcggtcattacagtc

SEQ ID NO: 13492 - DNA, 768 bp, Emericella nidulans
atccgtaacatggttattgatgaacaccttcaagatagcggtgagatctcgagccttttccgcctctttctcagaaccataagaacataaaatggtgacactttctgaaagcgttcgcatgaaaacgccatcatcctccaagtgctcgttcgggaccgacttctctgctctttccttggcgccagtgacgatttctatatatgagtcaagcgctttaaatgcgagatcgaactcagccagtgctgaatgaacgtggaagagacgcctcaaaatcaaaaatgaatgatatgttcgagtcgcagcacggtaaagaatctaattcaaacaatcagtaatgagtgttacagcttaattcccacacggcacatacctcgagaacattcttccccaaagcatgctggccaccttccccaagttcgtcgtcatgccattgagggccacatagtcttttccagttttgaatgacctgctccacccatgcctcgataatttcgtttccactatcggctgtaggaaatttcacttcacggagtagattagcctcacatatggcctctacacgtcgtaactcggtggcaagctgcagtcgctccgggccttgcgccggtgcagtatatggtaattcatgtaaaaggatggcggaaaggagatcataataggacttccagatggatgattttgggacagactctggagagctctcattttgcatgccagacaggctctctcttgacttgatggagggatgagaggaccacgctcggaaga

SEQ ID NO: 13493 - DNA, 1820 bp, Emericella nidulans
actatttgttgcttgctcaagtctgatatcgcccactgggcaactacactagaaaggttgagaaccccactgctggcccaccagcctcatgtacagtagatagggagaccgtatcgatcacccaattaggaggacatacatcgcttctcagaacttttccaatataaagcatcctgttcatacctactggagcgattatactcctgtccgcttatcccctttcgcagagcttcatgcacaaatcatcaccaaactcggccttggcctcgagcttccaatatgcagttgttagccgggaatggcagacccaggtagagggctcactttcgcaaagcttacagtaactcgaaacggtctgcagaatctaaggagataattgctccgaacagactgagaagggcttatcttctctaccgcaagctaactctgcctaaagaccgaacacagccagggcttgttgcactttgttcgcgttgataatgatgatgaaaaacagtcaagcgggacgggatgaagttctgtgtttctaatcataacgtcgtatgtacttgctccatcttagatacatctcttaacaaaccccagagccagacctttaaacccactcgtaactcaggaccggaatctcaaatgactccgccatacaccctcatttgaagtcccgtagaacgagacgatgcgtccctggccacggtccgcgtagccacagttactcgggccattaccaatgtcatgcacccgaaacccgatgtactggtcggcgcaggatagaccgtctgcgaactcaaaggtcagggtctgcggggggccgtacccccacagctgatagtttggcatgcccgtgtagcacacgttgacccagttgccacttgcgcggtacaggcggttcctccgccctctggggagcaccagccgcggccacagaggcagcctttcgtgttgatgtcggcttcattgtggatgcagtcgaggctgtgggagccgttgtaccagttgaagctgatgactttccaggttggaaggaaacacccgtcgggtggagtgatggaggaagagacaactgtggtgagggagaggatccctgcggcaagagtgctgatgaccattatgggtctctagaaggagatgttcttgtcgggaaagtctgttgttttgctacagtacaagcaaggagggaggcttggaagagtttgttcttacagtacttccatagacaaggctagcccgttgatactccaatgcaagtaagcatttagtcaggctagatgagacaatgctggcctatcgcattccgttgctgtccgaactgtctcggtgaattccgtcggattgtcacctaagtctctctggatctgaaacctgaggctcattgatcacagaactgaactcataataagtagtctaggacaagagttaagacgcaatcgaaccctactgggccaacgcacaaaacaagtctcttctgcatgattacagtgcagtagcagccataggctttctcgagcgccgttgactaacattgactagtgatccctactgtttctccagagctaaagaaacgcattgcgtgacagtgtagcatagacagagttctccggtagtgagttgatgagttgtaaatgctagccatctgggttatttccgctcgtggaattgttatgtccgagaacgcgtttattaggagccttgtatgataatctagagttagcatcggctcaagcactagttacatgagtgccatgtagtatttcaatcaagatatcgtgccaccccagcgtgagtcctttttgttagacatccagtatatattaattcctgtc

SEQ ID NO: 13494 - DNA, 423 bp, Emericella nidulans
acgattataggtgacactatagaatactagggatccttaactcctgactgttgtacagagttctgaggtgagtctttcaagaattatcacactctcatgtctaccggtctaccacagtccatccggtggggatcagtggtatcagcccaccgggccgtattcgcgacgcctaccatctgtctacccagtgcacaacgcacgacaggctggcatagccgtctgcctgcggcatgacggatgccatgatttgtttatcgggcagatggtgcgcaccaccggcctaccgcacggctgtctacagcgagcactgcagttgccgatgtcactggcacctaagctgctagatttggctgttggactgaagcgctaccggtgtttgccggtacggctactgacgtagagctctccaggtctggacgccca

SEQ ID NO: 13495 - DNA, 570 bp, Emericella nidulans
  unsure (1)..(570): unsure at all n locations
cttcggatccactccgaggccgtagtggattgcggtggagtgccccggngaaagtaaatctgaccacaagacgaaaaccacgcgtgagcaagtgttagggccaacaccaagagcctcccccggcgagggcagaaactataagacggaacggacgcggcaagataaaacccaagacacattcgaatcaactatacgccacgcctgaaacaccagaaaaagggacccacgcacaacaccacaaaacaggccgatccgacccagacccacatcccccagaaggaactcgaacaacaccaacagtagccagaaccgaaacacaccccgaagcatagataaaaacacatatcatcacggcctatcccggcctcccacagtcgaccaaccaccgaaaacctcaaccacaacacccatcaactaaccaacaccaataacctccgcaaacgcatcccttattaccccctccaatatacacacccattcattaccatacaaccccacatcacaaaccattccactcatatccgaaatttacctaaaacataacaaaacacctcaacctcgaatctacat

SEQ ID NO: 13496 - DNA, 1443 bp, Emericella nidulans
gtgagatattataaaaggctatactcctggcatctctctgcttttcatttttattcacttttatatgtcaaagaagttcaatcagtcaaatttagaactccttatactttgagtcttttatcctctcttatcatctttttttttctatctcatgctaccaacagcttgagtgcttccagaagctgaatttggtgccatggatcttgtgccctttagtaatagatagaaagcaagtacagagatgcttaacagcagattatcagagaaggtggaaaacttcttgaaaaagcagtacatgaatattcctgcagacttaagcctagacctatgcccccttatagaagatatagtattagagcagatctctttattgttactggttatgctggggcgggaaagtcatctttcatcaaatacatcacacgggaagaggtgtatgtcggatctaccctgaaatctggtaagaacgactatcttgtgcgagttaaatatggtactaactagtatcaggcacaacaacaactagtcttgttcctgtgaccattggaaatagatactgcttattcatggacatgccaggattcaataccagagacttcaataactgggatgtttttaaaagactcatgacaggcatgtctgtagtacagccatatgtctaattccaaggtatcttgtatatagactctatggagaataattgtaggacacctgcagcagagaaaatccttaattagctgttctatttctgcagtaaggattacatgtctaatatgactgtcatcaccaccagataggatgggttggacgcagatagaattgaagacaagtggtcttgtttcaaacattgggaagcagacaacctttttcaagtgcttttcgacaatggagcaaaagtctactatcatgggcttctcaaagaaggaaatgacttcaaaaccctgtacattaagaggtagtctaagagaaggtgctccttagcacagactatgattatggcgtgctattacagctcaacaagcctacaacttcaaatctatatcaaaatcaccaaaggagcttgccttgagcaaatgtcagccagaagatggctgcgatacaggcatactggcaatacttattcctaaagagatgcaagatcaaccccattaaataagaatagctctggcagtgccgaagggcagccgcagcacaaccctgaagatcagcaaagtaaggacaataattattatgatgaaacccacgcagctccaggatagggagcttagtttgtaaaggttataaccaagctcatgcaatacttcttggataaaactctgggtgagcttgctggcatttttgatggcacaatatccttgcagttaaataatctaccttctttttgaaaagatatttaggcctattcaagcgatgatggccctctatgattttttgccctgagac

SEQ ID NO: 13497 - DNA, 484 bp, Emericella nidulans
  unsure (1)..(484): unsure at all n locations
acactactatagggtagacccaagcaagaaccgcgatacaaacagggcttcgaagaagtcccatgagatgaccgccgataggtaggcagcagggacggtggggcgaacgggggggttcacgatgtagcaggggcggcttgaccggaggatcactccagcggagctcgcgcagccgcttggaacgaacaggcaccggctcgtggcctttggagtacgggacacgcacgtagagctcgacgaggaataagcacgccaagcataggcacagcaggccagggactgtgaccccaggcctaatacgaggaagcgggcaccgcggtgcccatagcccgaacatggtacacccacggccctgtacccgatcaggagcggggggcctgatatgcgctaaggnagaaacacggaaaacgctagaagaatttcccgaattctttgaaacgggtttaactttttaacagcccccagtccaaagggtggtaggcca

SEQ ID NO: 13498 - DNA, 1246 bp, Emericella nidulans
gactacagccacagtcattagcaccgtgatcttttgctgcagggttgtctggtgggagaacgaccgcggcgggcgctggttcgtctcacgccttcctgctagttgatgatctgatataatggagaaatgtcgtgatcgcctgctctgattggctgctgggagacgccgggagctctagactgggcagcgagcacgcctggtgagagagtaggcgagggaaattgactagaaaagaaataaggaagaaaacgttagattatagagagatagatgaaacttgttactaggttggtatatcttcaaatcgatcaggagcatatgatgataaacatcgccagggacgggttcgataggggcgtttcttgacgggtgtaatgaaatatcgttacacccccagtacatttgttacacattacaaaccgcttaaccctttcaatacctgctttgagaggataatgtcgggaggttgtggtattgccaaggtattcaggcctcggcatcgaacgcctcgtaaattataacagcgcaatacatggggtcaattcgtctcatttccgtagcaaatcacagctgtccagacgcgcgttaactgctgctcttcaggacacaataatcattccgctgtggaattctccgtgcccgcaagcttccttttcaagcttgtctccgccctgtggcttgcgggtgatcaatacgtcgtacttttgaaagtggtgacatcccagggcatgggtctcaaacttagagtcggccaaggcgaagtagaagctttgaaggcttctaggtacccagaattcagtacagcggagtgtaagtccagtgcatccacagaaccaccgtggcgagaaagaatcctggcgacggtcttccggggtagctgagtcatgatctgcagtgtatccagccgggtcagaattcaggattcaggagtgaaacgcagctcttccccagaccagaaaaggctgcatacaatgccagaatagactgtcattattaatagacgtctgctcctcgagcttcggactgtgccgtctccagactcgactgcggccttaaagtgtgtttgttggctttgtacccacatacctccgctctggatgtcgtcatattatcgcaggatcgcaactggaaagagagtacagagggtaccaagtcagtcaccgactcttgagtgaaagtgaaagcgaagcagacctccttacgtacttgaaagagattggccgacacaacgtgggggagattgagt

SEQ ID NO: 13499 - DNA, 520 bp, Emericella nidulans
tacgatttaggtgacactatagattactaggatcacggcttacgacgatatgttgtgggttgtgctggggtggttagaccactcacggtttacatttcacccgcccgtattgaatccggaagtcccaagtactcgcaacacttacataaacctcacgagctggaccttgaataaacccgacaaatgtcactaggacgcgaccgccaatattgccgaccttagacaagtaggatttgacgcaggcccgctacccgccgaggttttgaatccccgataagggctaggctagacgtaaactccaaaactgctttttagaccagagtccagaactcccgcttattcacaaatttccgcccagccctagatcctgttataatccaaactccctagtaccaggttagccgactgtcacctgggaccggtgaacttacccgtcaaaccgtcttatcataaaaacaagggtcgaaaaaaaccctgaaaccatcctgattttgctgacaaaggccagaatttttagaac

SEQ ID NO: 13500 - DNA, 784 bp, Emericella nidulans
tctaacggcgcgctgttcgtgcttcaatatatctggttttatccgctcgctcaacgacagcgctcgcctctgaaatgttctgggaccaacccccgcccccgaatccgtccgagtcgacttcggtgtcgtcatgatgtacgtactcccgcaccatggggggttcatactctttagcggcgccttcaatgaagatgtatacccctctacccagacgatctttgtgagaggtgttaagctaccggattgccaacgttcgactgaatgaccccccgacgctttgttttccatcccacccgtatatttctccagacaccagcaggttatttggcttttttgcgcgtgagtctcttgcctcggaaacttcccttggtgccttctctcctcttctccccattttccctcattttcctttacaccaagtcttgtttttaacggtttctcgggggtgtaaaccttatattgtgtaccccatttctaaaaattatactctcatgtggggtctgaaaggctttccgaattatacgggcccctttaaaatttttcttcttcctatgggggaggttaatagcggtgactctttcccgcggttttatttctctttacctggttttttttgtacaggaaccaacttggcccccttgctggaaaattttttttttcaagacctatcttactgggtttgaccgtgtgtcattaatacattttttacgactttttagggttgcggctgtaaacataccgcaagtgccaagttttgggtaagaagctgccccggtttttccta

SEQ ID NO: 13501 - DNA, 294 bp, Emericella nidulans
ttaacgactcactatagggagacccaagcttaggatccggaacccgggtactagatgtttcaccaaccatgtcagccacgattatcgactgatcaaggggataggcctttggctcgcctagagggggggaaggaatttttaaggccagcccagtggaggacactatggacagtggagacgtggtttcatggtgcggggaagatactgcacatgcggagagttagtgttacgaggttccaggtgtcgcgagagatctttaagtactatacaatatgtgggacagtgacttaggaa

SEQ ID NO: 13502 - DNA, 1569 bp, Emericella nidulans
atgctcacacgcacgctggcacacttggttcgattaagaccttctcgctctcgattcgggagattgtcagagggttaaggagaagttcgggggagctcgcggcctcgatctcaggtacattatgtcgctcggacgtttgggacgcgaagttggatatggcaagcgcggcagtcaacgatgaccggacgcattgtagatacggacgcagggactgggactgcgattgtcggttagacagcttgaagtgcttggttcaattgctacctaccataatgaggggtgacgtataatgcggtgttgcgggtgggctcaaggagtcagcaaataagcaccaacttcaacactctctgctcaggcaattctaggttcccacaagcccagcttctaggacatcaatgcaatagtttcaaaagttcggcgtagatcagggagaggagactagagtgttgagtggtcagccagttcgataggcaacgtcccgcaatcgggcctggagacgtttgctttgtttgcatcgggccccacgcctctccaaacaatctgacaatcgctctgatgtacctacgccactacactcttaaacgagaagctttgcaaagcactatttcacgtccagagtgacgacaagacgtcaaaatggcctctataccaggtatggccctaaacgatcatgtattgcgactttgacagcaacgtagctgactctacactagttatcgttaagcatcaagggaagcgctacgatgtcgagctcgacccgaattccactggcgaaacattcaaatatcagctatactctcttacaggagtggagccagagcgacagaagattcttgtgaagggaggccagctcaaaaacgatactctactatctactatcaatgcgaagccgaaccagacattcatgatgatgggtaccccttccggggaccaaggcgccggagcattgacacgtcctaaggaagttgtgaaattcttagaggatatgacggaagcagaggctgccaaggcagcaggggccatcccggccgggctgcaaaatttgggaaatacgtgctacctaaactcgacattgcagacgctgaggagtgtcccggagctacacgaagagcttcagagataccgcccatctagaaacatcagcggcgcatcgaacctctcgaacctttctgatttcgggcttggtggcctgggcgcctctatggacctcacttccgcgttgagagatttgttcaaacagatgtccgagactcaggaaggatttcctccaattctatttctcaatgctctgagaaacgtatttcctcagattgctcaacaggaccggaacgggcatggctacgtcaacatggatgcggtagaagcttggtcacagattgtgtcgcagctgcggcaaaaattggtgatcaaagatggcgagggggagtctgcgactggagtatcatttgtggaagcgtatatgggcggaagatttgaatctgtcactgagtgtgatgcaccggctgcacaggaggctggtgaacaacctaacaagacttctgacgttatcttcaagcttgactgccagat

SEQ ID NO: 13503 - DNA, 207 bp, Emericella nidulans
agccctccccgggttacgcggggtgtttatgtggtgctatttcctcacacacgcggttttttaccgcagcggccagcctaacggacgcacgtgccggtgcctcgcctgcttgggtggcgagccttaaccctccatggcccgtcaggatgggcgactccactctcatgctgttcttccaagaagtgatgctccgttggacagagtgct

SEQ ID NO: 13504 - DNA, 192 bp, Emericella nidulans
acagcgcctcctaagcgttacggagagccatgatctgatcccataaacacacatatgtgttgtgctagcgcagaccctacagaacccgacgcgcatagtgatccttagcctccttgaccggacacccctcatcctccatttcaaggcaagatgtgcgataataccccgttgccgatttgacactaagtagac

SEQ ID NO: 13505 - DNA, 835 bp, Emericella nidulans
caaagacatggaccagctacctctttcccctcctgctgagtcggctcttccgccgacaccggccttgttccgctagactctcccatccgcacaaccgcaatccacgagctcctcccggacatccgcgttcccagctcacctcaccaaccacaccggtacaacccggtaacctgtgcaccgattgacgcagatgacaagcgcgtgagatccgagatcgaccaactgcggaaggactttccaacaccagatgctgcgctgcaggcccaggaacaggctgcgcgcgagttgagacagaaactagacgatgcggagaagaagcgcgaggaggtgcagagggctatggataagaagatcaaggagaggaatacggagttgaaggttttagagaagtttcaggatgggaaggggccagcgcttgctgctccttaatcggagttcttctcttgcttggaatatggcaaaaaatcgcttccaggggcgtccaatggcatcttacaggaagctgcgatactggcgagaccgcttatagtgcttgttatgggagaccatgtctgcatcttggcgatggcgatcctgttagcttccggcttgggatatcggagtgactcggctctcctggaaatcgatactcgcaggaacgcactgctggacgatgaagtgccgcgtaagagcaactcctttggacgatttcaatggtgcttcacaccaaggatactccggagatttcgattacgaaacgtcaatataggaaaagaccgtccgatgcataaaatcccccggttccttccgtactcagcggggagatagaccaatattatgccacaaaacatcgata

SEQ ID NO: 13506 - DNA, 338 bp, Emericella nidulans
tacgatttaggtgacactatagaatactaggatcttatactgagggtcggttgaaacatgacaaacaggatgtctggcctctttaaagcgggcctggttttctaaataagaaaccgtgctgatcgtctagtctctaatatgtttgctgtggccagcttccccggactcaggcgtcatcttagggaacctcaccctttaagtgtaagaagcctcgctgggtttgttccctcttccatgaaccttattgcgccgtttttctgacctacctctttcgcagctcacaactggaaacagtctgctattggtggccgaatataatgcgttagaatccgcgctct

SEQ ID NO: 13507 - DNA, 223 bp, Emericella nidulans
caacggcctaccagcctactataagttgttcatcggttccttttaacactaccatacttggcgcggcagtattccccagtaacgcaggggtgcgtactgatgcgtggcttccttggggagcgacccgtcaaccagcatgacaggtgaggatgggagcctgcacccagttgccgattaaaggagaagtgatgttccggtaagcgttttgctcacgagtggcttg

SEQ ID NO: 13508 - DNA, 595 bp, Emericella nidulans
  unsure (1)..(595): unsure at all n locations
agacccaagcttaggatcttggtaggccgaagacttcgcgctggacctatctctcacgcgcatgtcctgactgacagaattcctctttgcccggtccgcaatcggcaccgccgcgcgcgccgccaacctaccttcagcgatcgatctcgtctgcacgacctataagtccaacagtggtgatggtaagccgccagctcagctggaagaggaatgccgtggcggtcgggggctnggnnnnnttntttttttggtttttctttctcctgngttgngttttgctcgtctgttttctctcntgtttttttttttttttctttttctttttttgtgtttctcttgttcttgtccttcttttttctttnntttgttttcttgtcttttttcttttgccttttctctttctttttttcttctttctcctctttttcttctctccttgcttttttctttgccctcttttcctttctcttttctcgtttttttcttttcttctttttcnttttcttccgtgtgttttgtcgttcttttctcttcttctctcctctctctttcttcttcttcgctttcttttcctttccttgcgtttcttgatttt

SEQ ID NO: 13509 - DNA, 495 bp, Emericella nidulans
ctatgatataacatacgatttaggtgacactatagaatactaggatcactccggggcggaactaactgaagggaccgctctgtttgagtatgaccaggtccgcgaagcatatgaagaatgaaatgcccatgtgcacaggacttccaccaccgaatccaatcgatgatgctgatacacagagaggggctatcttaaccgacaggtctgaagacgagctcatgaccatgcaaagacagaagagggaagtcacatccgactctggaggaacggagtgggacctgatgctgaggagaaaactgaacgctgccagctacgacacggtatgagatgtacgcacctgagtgcatgataaacagaggacttacggtaccgatggtacactttcgaccacgctgataaagagaatgcagaatctgaaccgaggcgctgtacgcacatagaggcccgatcataataccgagaacccgattcaaggagactattctcatgacttac

SEQ ID NO: 13510 - DNA, 568 bp, Emericella nidulans
gagcaatcgcctgcgagcgtcggcgcgagcccagcctcgccgggccctccctgctgctgctgcagatgcagatgacagcccgggggtaccttcggggcgccttccaccccgccgttatctgtgccttggccatcgagattatcgttcaactgagcggcgaggccggtgcagccacgtcagggcgcccgccgtactcgctagatagtatggctcgggcgcagcgggcgcctatcatcaagacgctggagcgtttgaacagtcagctacgagaaatgatgaatcaagcctttccggctctgaaacgataccagctgcatcttggctcagattcgtgccttgaagacaggaatgccagttagaggggcagttttgagcgagctccaggacaggctagaggatgcgcacgccattctccaaagtctgggtaatcaatttggcctcttgggctcgaaaactaaacgggccctcttctctagataatagtccatacgaacagggtgtccagacgagacgaaggcgattgattggtccctgattttgtcgtcttcccatcgcccgtgagacaaat

SEQ ID NO: 13511 - DNA, 767 bp, Emericella nidulans
tgaccaatttgcggaacgcataatacgactcactatagggatcgggaagagagccagttcgtccatgtatgtgcattgagacccttctgttgcacttgcaaacttcgcctttttttgtcctaatataggcccgaaatgcacaggactgctaccgcaaactgccacgctcctggctgaagcccacgatggccaacctcgagcacttgacgttatactctcgcctacgtgccggtttctgcccaaaactagacctgcgtggcctgcatttcccgcgcttaagatcgctttctctcggcaactacgccttcatgcatgactcgcagctagactggattctttcgcacggctcgacccttctagagctctacctggatcaatgcactatcatttatgaggcagcactctcttttaatgtcgacgagccgatccccgtttcggcgaccatcctttccttggaagactttcacccgcatccggacctggtggtcgaccgactctacgcctcgtacagcggacgctgggccaattactttcgggccttccaaaacgccctcccccatctacggcacttccggtttggattcacgccggggaggtggaccaggaggattttgccgtttgaacaagacatgcagattgcgattggattcatcaacagtgctacatggtcttttgtgacaaaactttatcgcccgtgtatctgcggaagatgaagtggagatacgacttgggtgggcatgagagacgcaaggatgagaaaccttgat

SEQ ID NO: 13512 - DNA, 503 bp, Emericella nidulans
tatcctatgtatataccatacgatttaggtgacactatagaatactaggatcttgctgggctccctcaggctgcagatggacctgaaaatcgcgcccgctgtggcctttgtacgcctccgagccggactctgctgcgtttgaggagagaccgtgccagccggtgcttcggcgcggtgctgaacactcatgccggaggttgcactggctgcttgagacgccgacgatcatgatttagacgacgcgctagcagggtcctgggccctgccgtcctgcgggattgatgacgtattctggaccatggtcccgcggtgcagctcctgggggcacaacctcacaagctttttttgcggtgctgtgctgagcgtgccgccggactcatctagagcgcgtgtcaccagcgtagatgcctcgttcttagtgtcttcggtgattcgaccccttcgtgcctttgtccactcactgtttgcgctaaccgtccagatatcaaactgctttcagcctc

SEQ ID NO: 13513 - DNA, 498 bp, Emericella nidulans
tcctatatataccatacgatttaggtgacactatagactactaggatctttttgtggcagctcatcatgcagagtgccgctgtattcatggagcctcaggtcgaagatcatgtcgaggcctgagagcgcgaggacgctacagttgaccgggaaggcggagccataccaggacttgctcctgacggagaagcgttagatccccactatgaacccggcatgggggatgcactcttcgctcatcaggctgaggacgccatccctaatgccgcacatgtgcactgtcatctaaagactactaaccgaccacctagctggtgatagaacatgtacactgccggacgtgacatgttgtatatagtcagacgaacactggcaatagttgttcgaaccttagcaaacacctgcgccttagtgttaccaactgactggtgcatctaggattttctgcaaccttcggtgatggtggacataatggctgtgaccaagcccttacccttc

SEQ ID NO: 13514 - DNA, 883 bp, Emericella nidulans
tgcatgcggaaccccagcgaggtaaggatgacgacgcgcacatcggctccggggagtgcggccgtctgctgcaggagcggcagacacttctggatcaacaaagcgtggccgagatggttcgttccgaattggacctcgtagccgtcgctggtcttgcccggcggcaccgccatgataccggcattgcacatgagcagatcgaggcgggattcctgggccaggatggtgtcggccgccttcttaatcgagtcaagggaggccagatcacacgccagaaacgataccttggttcctgatttctgtgtctgctggatcacggcgtcggcactcttcgcattgcggccgctgatgtaaatatgcgaaggagagtgcttggcgagatggatggccgctgctgctccgagaccggccgttcctaggcgtcgtcaataacaccaataaggtatgaagccctccgggtatggtaaataaggacagacctccagtgattaggatgaccttgcctgagaggttggggatgtccttctccggggagaacaagacgccagccatgatacgtatgatgaagctgaagctgccttgacaacagcgatatggggagtgacgattcttgtaaagtcaacaagtggaatagagttcagaacattgagaggggaaattatcacttgtaatatagtcctttgtttgctgaaaggggatagtcccgaacacttagctgtcccgaacccaaagcgcagtctaccaggagacttatgttcatccgcaggccgactgcggcaatttatagcaacgtctaccatacaagtccggtctacagcgtctagctaggagtttcggtcattcgcaggtaccaagagaaaacgcgaaggaggcgctccttttt

SEQ ID NO: 13515 - DNA, 1556 bp, Emericella nidulans
tcaaggcttgttggatttgggacacaaaaaacattcccgttcggggttatagttcaataaaggtatcctcgtatcaaggttatgtaaacctaccaaacccacttcttgacaaggttccagagaggttttacagtccccaaactgtaattggttggtatcgttcaaaatgggggtgcaacctattggatatatgtcatccgtggtcgaaggtaagggttttgatatctggaagtcagggaatataaaattcagtgacagctcggtaggtgcaaaatcgtggtgttgcaaagggtatgcaagctagagagggataaaaagaaaaacaagtggtagaaaataccggtaacaacatcagcaagctacaagggcagattagcgaattgtccaagtgcaaacatctgcaggtgagctgtcgtacctcgcctggcggggcaccttcgatgaacgacgacgcgggggatacgtatgacgccaggggagtaaggtgagtttgagtaaggcacgaggtgagaaataaatgtcgcgcgtagaagtagagcagattatttccaaaggtgtagcaatgagagctgaagcggggagtgaggaggactccggtgtcaacaagcagctccacgtagcgcgataccgcggaacggcacgtgggcggtgatacaacgcatggcgcttgtgcctacagtacgcattacaatagaaggacctgaggaaataatgctgaaaaattcattattggagttttttatggctatatttccacctatttattgtgtgtatgtgcgcttacgaccaggcaatattgtggacagaacacctagctaatccgtaaagtatataatgagatctataccgaggtgatccgtatgcaaaaaatccctgagtgatctgagtcattcgaacccgattgatcatgtcacaggcgttacaactactagttaacctgttaataggggattgaccagcgacaattagtagatattgattatatagatattatcacaatccatatcaaccatagatacacttaaccttctccctcgtctatttcgctcccttcctgctagcgctagagtgctgttattatcttctcatctaccgtatcaggaaagttcttggagaagtacagggatgtgcacgggagtattgttagccgacatgagattatagaggtgtcataagataattaacctgtattggcggctgttgggcgccatgttacacattactattacgaaagaaccttcaaccacttgcagatggctatagcacggtatatggcgacgacgtacgaagcctttctgtcacgatgattgttactatgggatagatgatctcctaccctcggcagtaccactcaacactgcaattatttaggggtcccacactaattcaggagtccccagaattacgaacgggtaatgctcgtatccctaacttcccccatttggtccgtctaatccatccccggttaaagtacctcggagaattggtaaagttatattattccggccttttttaaatagccccactgacagactggggtactctattagaagctt

SEQ ID NO: 13516 - DNA, 572 bp, Emericella nidulans
tatgatataccatacgatttaggtgacactatagaatactaggatctttgcatacggggtctaagtgcaggctcgcgactactcaggtgtgctcacttgccagctcatattgtgggagaagactaacagcccatggtcctgaccctcgacattcctctattaggcactgttaccacataggggctgacctcacacatatggtagaaccccttacatgaaaaagcacctactgctgaggccagtatcgactccactttaagtaccggagagaactcgctgctggaagggctaagcacgcgcaacctggaacctgatgtgagatggacattcctgaaggctggccattgacaggtctctcggagccagagacactctatggccgacacttacatagctcgtgatgcatgggctattggacaggctagctagtcaaggcccttatctgcgtgcggagattcataataacgagtccgatacccagagcttaccctatctggaagcgtcaacgtgctgtcaccaccgcagagacatagtgcgccctagcatggacggacacccagagacgtatatag

SEQ ID NO: 13517 - DNA, 574 bp, Emericella nidulans
cctatgatataccatacgatttaggtgacactatagattactaggatctttttgtgccctgtcacgctgcaagggccgatgctattatgcaggctcagttcgataatcattttggggctggagattcttgggtcgagacgcttcccttcccaggcccagtaataccacgtgatcatccagacggagttatgtaagctccctgctacgaccccggcttgggagaagcacctaccgctcaccacgggtgtggcctgcattctgaatgcctagctgagcacggtgtgtcgaaggagaaggaaccgcccacgctagcccggatgtgacatgtccattcgcagaaggacggctattgcataggatctctcgaaaccactggccttgtcatgttcggccgtgacaaagcacgtgcggcctcttgttaccagacgactggttcgcttcaggactttatgctgctttcgatgttatggaccatgcagtctgtgacccagttactcacccttcgtgcaggtttcagcgattttacctgacccctagtggcagggcttccgctcccgtgatccggatcgcatgc

SEQ ID NO: 13518 - DNA, 1322 bp, Emericella nidulans
ccaatatctgcaagtttctcttctctacccagtttgctggaagaatgctaactggggcaggttcttattctgtcctatatcggctcgggacacggtcggatcctgcaagcccatcacgatgggtggactatggtcgtgcagcattcgtcgttaatgacgttcgatatgggagactactttgccgagtcggctttcgtccgctatactgctggacgtcctgttgctgtctagtgaatgtatttgttttggagtatgtccttgagatttgttgtggaagcgggcagtttgaataatgatgttcgtctggactgttctatatgtacttccatcaccgaggccttggaatacacattgtccccgtttaagcatatcaccgtcgcagatccatcctcaccgtttcctctgtcttgccgctttgctccagtatatcctcggcgatcttctccgccagcatgtctgaaccatcagcaaccaccaccgggcctaggggttgacttacagcatgtagactgaggatgacctggaggcagaaatggaaacgcactggcatccaccacccgtaagcgattcaccccaaacactcgagcttggctgtccacgaccgccatcctgtcatccgccctgcccatcttgcacgtgcacgaaggatgccagagagtcatcatattgttccgaatccaatccagaatctcctcatccgactggacttgcggtcctggatagtattcctcgccgatgacaactgggcgcatctcctcactcgcaaaggcctgtctgattcttttgaatgcagctactgccaattgctgatccgactcggtatctagccagttcgggtttattatcggcgggtcgcatgtgtcattggacgccaaagtaacagtacctcgacacgttgttgctatgagtacaccaagaatggacgcatattcatacccatcgtccggttggatactgtagaaattggagatattcccaaggaaccctgctcctgacatgtactgtataaggttagttcaagctccgtcccaacagtacataaaccatacctcaacctctggccagccgtctgcaaacagtgagagattccgccgtgtgtcttcagaaaagcctgccctcaggctgtctggaatccgctcccatgccaggaactcggctaccgggctcgtcaagactccctcgtgcttcgtgagccagcgtatatattccttaacctgggattttggatcgtctgctagcctggtcaatgtctcaacaccgacacgatagctagggccgaagaaggggtggtcaagcataccctggccaacgccaggcagttc

SEQ ID NO: 13519 - DNA, 648 bp, Emericella nidulans
tacgcccgtatacgcttcatctcttagtaatgggacgtgcctgacggccaataaactggaaaacctccggcttgttgacgccgtaaggaatctaaatcgaattagctaactaacgttcatggcacacgaccaagcctctcacgttggatattttgacaacaccccatttgggaggccctttgagattgaccaggctaccaatcggcatgtaaccagggtttgtcgttttatcaacgctttgtgtatacacagcgagaacactagagcgttctgggacatcttgaaggtcagggttactcaggtggtgcaaaggcgagggttcagtgcactgagaactgcgagacacaagttcagtctcgtgaggcgtacgtgagagctgcggcatcatagtaatctgggtccggttaacaagattacaagcgtcctggtagggccctgagtgtatctgaagtgaggtcctcaaagactccatagaaggaaactcggaaacgctgggggtaatgtcactagacgataaataaggagcagtgttactgtcaggaaaaccgttgatggaaaccacatctccgtcgctttgcttgtaagagtgccaggcacgacgcagcagtgttaagagttcatgttggattcaggacacatgggcctggg

SEQ ID NO: 13520 - DNA, 477 bp, Emericella nidulans
  unsure (1)..(477): unsure at all n locations
ctatcgaatcaataccactcactatagggagacccaagcttaggatcatcccggttttggcgcgccctgacagcttttccagatggacaagagtttctgaaatcacttcaagtatcctgctgcgctgcggaagggttccgttcctgtcatgcattactgcagaacataataaggcagccgtatcaaacataagaaacggtgcgaaatggaatttcgcattcagtggtagtatatgcttnnnnnncnnttttttttttttttttttttttttnttgtttttttttttttttttntttttttttttttttttttttttttttttttttntttttttttttttttttttttttttttttttttttttttttttttttttttttttttttctttttttttttttttttttttttttctttttttttttttttttttttttttttttttttttttttttttttttttctttttttttttttt

SEQ ID NO: 13521 - DNA, 561 bp, Emericella nidulans
ccatacgatttaggtgacactatagaatactaggatctcattcacaacatggacacgattctaggcatacgctagttccttgactaagcgtgaaatctcctgtcgagccagatatgtgtggcttcggggcctgacgatcagcgtgcagtagacagaaatatggctactctgcggtgcccatggctgacggactctggccacctacttttgaagcgagatacgggcacgctactacacttacaagctaggtttgactgctgcgggcagctaggccacatcaggcaccccagtgcgtagcttcaggctggtgtcgggcgaccgtacggaattacagacgctcggttctactggcaggagctactcgaggagactactaaccgcgataactcagcagctaaggctgagaccgatcgctgacatgcgcgacaggcttgcgggctacgccgagcggggcccgggccctggagatctcgcagagggcgcaggcagagaaggatttcgcgtatagcagtctgtagaggccatgtgctaggtcccaagacggatgctgtgctgacaggg

SEQ ID NO: 13522 - DNA, 574 bp, Emericella nidulans
ctatcgaaataatacgactcactatagggagacccaaggctaggatcctagaggacgcttacaatacatggactctggacgtgagtcattcttcgttaatgacgttctatatgagagatatcctctgctcgtgtgatgtggcaaattcacataccgtgtttatgatcaagtaatgctattttgtgtgactgcaattttactacccttgcatacatcatttgacatcggtgcacgttttgaagggtccccacatttataattaattcttgtataaatatcttcttatccctgtttttttgttttatttattttgtatctgaattttttataatgtttttgggtttttaaatttcactatttggtggtttttttgtttattattgtacattattggtatatcgtattttttattactttatttctatacgtttatcttctgtaatatttatttatcttttttttttattgtattttaattatcttattccttttctcttattgtttgattgttctttgtcatttttttcttttttttcattatttttatttatcaatctgtttttgttactattac

SEQ ID NO: 13523 - DNA, 637 bp, Emericella nidulans
acgaaaacacaatacgactcactatagggagacccaagcttaggatcaatgggacgagttgactaacgggagggctgtacgctcgttagggctttatgggtgctttttctcgtgtgttcgcccccctcagttatacacttttttgagtctcttttatatgttttttggtatgttttcatacaccctttttattttatcttttttatttccacttttctcgtctatacggttattctttcattcctttttttttaccgtttcatctattttcatagatatgcatggttgggtgtttctttttaatttttctatcttgttacgtctttatgggttgatccatgcttcaacatactttgtaatctctagtgtttgctcatttatagtattttatatcgttttttatttatacgattgtgattcctctttatatttaaacttcttagttgtttaattctctttggtgatggagtcaatcatgggatttctatctatctgctatctctatttctgtagtgcgttgtcgcttcgttcgtgcggtagtctagtcatctcacgtattcttgcgtacttggttaattctccttgacttttttctctgttatcgctttttgtgttctttattcttctttaatgtatg

SEQ ID NO: 13524 - DNA, 478 bp, Emericella nidulans
gggagcttctctctgaggcgcggatgagcagatcgcgcacagtgagcatgtggtgggttaccagcgccgtgaaaaggatgtgtggattttgcgtcgaggagatctaagcctcagtgacagttgtaaactggatcgagaggaaagcttgttgtcacttgcgggtcataccttcacgcgcccgcgctcttatagctgaggcatagcagcgaaagtactcagtgcttcctgcataacagcctgccgaaagtcttctccctgcgggtgctcgccccaagaatcgtcttcagggcactcaggatggaagcgcaggactacactctgtagacgaggcagtcgactcagtagcccaagtagaaccccaaagattcacttgtctcatctttacccatccacagttgtggctgagcattgtcagtctttctttgccctttcagagggaatcgatactgacttcgttgggatcataggtatcacatat

SEQ ID NO: 13525 - DNA, 326 bp, Emericella nidulans
caccagactcgatgaccggcgtctttgtctcacatgccacccacatttttttgtgacacaccagctgctcgcaaatcagccatgaggaagtgcagatagttctgcctacatgaccgcgtgtatgcatcatctctgcagcaaacgatcggctgctacttgcttcaagtagtaagacgctctactggaccttcaatgtttgctagaatcggacacttcaagctgacaatcaatgcacagaccatgcatgagagtttgtcccctaggagcagggcccacacactgcctggatagatgcgagtgctatgtatgaccacgcttatatcagc

SEQ ID NO: 13526 - DNA, 765 bp, Emericella nidulans
tgcatagcgcagggaaactagtctttgatctgtgattgtggcgtggaggaaatgaaccttttccctgtcggttggtcgtagcattttttgacgaggggcggattgctgtatcgtaacccagcgctcgccatactcctcgtataggtccgcactgtgaattgcaggtaatgtttcggtatagcggccaccctaataggccccgttgttgacatcgaattcataatgctgatattgtttattgttgaaaaggtgctgtcaattctgacgaactgtacttagtcaagataagatgttgctttgacatacataaggagttgactgggactgcaactttttttgtatttatatatgccaactaaatacaaagacctataaaaaaaattcaaccagaggcaatctgaggcaggaatcggaactctcagggctgagtacccgcacacaggagtcacacgctcgccgccgaacagaacttttcattcaccgaaagaaggacccagatctgacgcccattctagatggtggctgtaaaggaagagtgcctgagtatttctaattatgagcctgacttgtcgtacctggcaaaacgccatgtatttagggcgccctaccttacggagcgttacaaatctggatactccatttagcattgagtaggggcataaaacaaatatagttcaatcatatcaggtgtgtttgaaatatttagctttagcagaagcgaatcagatatactactttccatgatttcagtctgtggggtctact

SEQ ID NO: 13527 - DNA, 421 bp, Emericella nidulans
gatcgagggcgggcgaggtttggtgcaacacgaacgcgagtgccacagctacagggactgcgactgtgacaacgacttcgtctacatcggagaatgggagtcacaacgcgagtgagactggggagaccgcagatcccactgagactagcgcgggcgctgttgtgagcgcgaaggccgtgggcgttctggcgcttctggtgctgagcagtcttggggggcttatactctagggcccggcagtcgaaagggcaaagccggattgatgtactgggtattcgtatgaagtatttattcgtgattaccgcatttgtaactcctttttcccttctctcgattgggcagtttgctacctcgatattgttaaaaaaaaaaaagaaaaaaaaaaaaaaaaaaaaaaaaaaaaaggaaaaaaggaaaaaaa

SEQ ID NO: 13528 - DNA, 830 bp, Emericella nidulans
atcgccgccgtgcagcgacccttgtggcgtggtctgtttgagatcggtccatggcccttctcctctgacacgggggctctcctccatatctggcggagcgagggtaatatacgcgagcactttcacctcaagctaggttctatctccagagccgaccgcatcgtccccatcacgcgtctgggacagcttgacatggatcgtgctaattctagcgccgagcttgaattccttgactgtcaggatggcgggcccagcgactaacgttcgctggaacgtgatttgtaacgcgataggctcaggagagcgttttcgcccttgcctttgtcctcgttttggtcctgcatctgtagcggcgtgttttcgggcgaaatgcgtcgcggctgttcggagagcacgctggccgtgtagccgccgtgagggactacaggaggtcagtttccgtgggtgaggtgtgtcaggggggaaacgagagctcataccctttcaatgcactatgcgggtcaagataggccgagtacgtattcgcgtcgatttgaatcacggcaatagctgtctcaaagatggatgagtggcttgcagttatcgtagcagtcatcgtaacaactcactagcacgacgctcaaagacgctcaacgatgaccgggtttcgaaggtcgaaatctaagtactgggttacctgacgtaaaggtgagagtaatattgtttatttattctttttttttttatttttgttcttgttttagttttttatcatcggcgtgatgacggatatgtatttgcgcagactgccgttaaaaaaggttcttcggtgatcattcattgagagagac

SEQ ID NO: 13529 - DNA, 1013 bp, Emericella nidulans
ctttgtttgtgcgaagaatcttatatgatagctcgttgcatagtaatattaatgaagcagataagagtaatgaccacttacagcaacagctaagctaatacagaatacaaataaggattaggaacatctttctccagcacagtcccgtttccaaaaacagtcccgttcttcagcagctccatgcgtccatagtgcagatttcttggtggtttatcaataatggtcccgttcgcaaagataatcccgttccaagacggggctatcttctgaagtgcactctttacagccaatgtctttgacgcttccgctacaggcggaaggagcggagaccgctgcccgctcacatcgcagttctcactgagcatatacagattcagtccgatagcgagggtataaagctcagcactgagctgattccaagcaaactggtctgtgatcaccacgccaatatagtcaactagaaggacattcggccattttgtggggctcatagcattcactcccgcccagtacaatgctggattcgtaggcatgatggcgatattctggatagttagagcggttgtttggagcgcgtccgcggatacaagccactggctgataagaaactggtcgttcgtgaacggcgagacacggttgattgctgaccatacggcgatctgatcctcggctactggctgtgtcgtggcgaggtttgaccaatggtcattgacggtcatggccgacgctggatagatgccgtcagaaggtgaagagcttgggacgccggagggaatattggagccgtcgaggaggaagagaacgcatcccttgccgtcgttctgatccatgaagtaggatgctttctggcgctgaaacttggtcgtcgtatcgaggttgggacagcggttgttaatcttcttgagttcgctgaaaaacttgttggcaatcgctgtattccaccggatcgcaccgcctggtagccgtttgataccgatgagatatctcaatttcagaaatatgatctctccggg

SEQ ID NO: 13530 - DNA, 1085 bp, Emericella nidulans
  unsure (1)..(1085): unsure at all n locations
tggctatatagcgcgccgaggtccagcataagcttgctaggagagaggcggaaatcctgcaaagtgcggaataccgtagccgccattcacttccagacacagaaccaacgccatcgccttccaatgtcgagctggaacttgccgttaagcgtaatcaagaacttgagagaaccaacgctacccttgatagacgactgcgacgagccaagaagctcattgagcaagaacaagaccgagcagatcggctaactgaagagaacaagctactcaagcagcgaatccgagagaaccgggaacatttctcacgaatgattgagcacggtcctatgtcgccagcggctccgccgcaaggagttttggatagcagtgacaataaccatccatttgctgcccttcttgccgcggaccgtgtcctgaacagagaatccagtaactttacgccaaaccgacataagtcccataggcaacattcgaatggacacgtgcgaggtagtcattctctgtcttcactccccattacaccatcagaaggaggacgcaaaggtcgtcattatgttactcctggggaagagtctagcgaagagaatcgtgatagggatagcacaatctccgcttccgatgtcgaggaggccgaaacggaggtggatataccttcatctcatgcttcatctcttgccactagcatgctccgtcgcaatcacccggctatgcagcaagatatgcgtgatgcagtcaaatcagcaccaaaatctagcacactcctgcagacgaagttgttcggtcaagtgaggaaacccggcgttgagcggcccacgaacaacctcaaacgcgaagcgagttttgatggtgcgagctcaaagaaaccgagagcggaggaccatgtgggtctcggtattcactagacgcagacagttcgatgcagatacttgacatctatgaccgcgcatgacgaccttgctttcgaattcacaatctcaagtgtcccttctattgntttggcatgccgccacgttacagaaatagtggcgcgattatgatattcttccgttgatccaacagtgtgttgttgtcgttgtagtagttgt

SEQ ID NO: 13531 - DNA, 548 bp, Emericella nidulans
gcaatgccctcgccaaatgccgcctctcgcagcagaactcaacccctcatcaccctctgcgcttccaaggaagcgcatcgagcccaacaatcgatcttatcaaccatttctggcctccagaagctcctcaccagcccaaccgacttcctccaccacctcgccgttcagaaccagctgcttgcctgcctacaatggctcggagagttccaagtcctcgcttgcattcccctcaccggcaccgttcccataaaagatgtcgctgagctggccggtgtcccagagactcatctctcacgtattatccggatgacagccactcgctggctctctggatgagcccagaccctggtcctgtccttcaacaacgctcttctccgttccttttctttacctaaccttgttttttcttgtcgtcgtctttcccatcaactttttcttctttttcctttatctttcttttttcttccttcttcctctttctcaaacattctttatatctatcatcttttctctccctttctacttaccttcttatacttttctcttct

SEQ ID NO: 13532 - DNA, 1144 bp, Emericella nidulans
ggtttgggtatgtcacatctagtctttgccggatcaacgattggagcttggttttatacttttacactccaggccccgatgtccccaggtcgatatagatgtccgccatctcctccgcatccccgaagatttcgtgatcgaacaggaagctgaggatgaattcgagtgcttgactgtcgacatcacttgccctcctggtgcggcaagcaaggacggtctcccggtcctggtttggattcatggtatgcgggatacgatgcattgggtgtgatggactgggctgagagtagtgtttaggcggttcacagattatgacgttttgctctgcggcgtccaagatctgcggtacgttgattctaaagccctatgtgcatcgaattttgaatccggttttctaatcaagtatgcttttagaccccacgaggctcgtcgctgactcgattaaatctggccagccgttcatctttgtctccatcaactaccggctcaacattttcagcttcggagacggcggggagacgaacttggctatcaaggatcagcgattgggacttgactgggtgcggaggaacattgctggttttggcggcaacgcggtacgggttctcggtctgctccatgataagcggctaactgaagatcgataggacaacattactttggctggagagagcgccggcgctatctacgtccatgcgcacctcatcaccggcccgccggtaaagaaggccgttctcgcgtccggatcactgtacctgtcatccccgttacccgtggaacgaggaaatgctctcatcaaagctcttgaggcgaaggtacagcagtacggcgagtcctcgctccggcaagctactgttctgtctctactacgggcattgaaggagagcaacgtcaacactatgtggatacaggaggacgatgaactaagggactgggagactagacccgagcacgctgacgaggtcatgatcggtgatacagagtacgaggtatgtcgtccgtctgtgttccggtttcccagaccgctcatagagtactaaccaatgcagtccgtcctctggcgcaacggcatcgagaccttcgacggaacaacacatcgccgctgctttcgagcaaaaccaaacatacgggcgtacatgccgct

SEQ ID NO: 13533 - DNA, 530 bp, Emericella nidulans
gggtttttccaactggtgcgagtataacgatctaggctgtctgtgagttagcataccttctcatcctcagtccatgttttttcccgtgaatgcgacatatccagttgagcatagaagccgaatgtacccagcttcgcttagtagacaagggggacaagtgtgccaatcggtaggattcctctatatttagcttgacagcaggaatagagagtgactcgcgcgtggtcgtgacatgtctcaatttttgtggacacatcgtttatccttatgtttttattctagtctatattctcttcccttctcctccttttttttagactttctcttttttttatttatatggctattttttttttttttttatattctctttttttcctttttatctcttctattatctttactctttttcttcttttattttcttattattattcttctctcttttctcttttacttttcattcttatttatgttattactttctattatgtttttttacttatttttttttcccttttctctctttt

SEQ ID NO: 13534 - DNA, 892 bp, Emericella nidulans
tgctctcaggcctgtgtatcctttattctccgtttgttcccttcatcgttcttttctgccacatttttgaggtttcttcttgggaagacctcgaccggctagaggagtttgttgaatcgcttaaaccgtactgttcgctctcaacggcgatcttcaacctccatcggctttgccaggtcctaagtaacgttgctcgactttacgtcgaggccaaagcgcaggcccagacgcaagagaatcagacccttatgtctgtaggccacgaggtcaacacatatcttagtgcgcttggtcttgcgccctccgatgtcggggatgcacgatgggccgtccctgcacccggcaatgcaacaccaggcgagatgagctaccaaacaacacaaagttttggctcaacaggtccccagactcatatgacacaattaggcaactggttttcagggaatcagtacatgatgggattactcgaggaggatctgtcgatttttggcccgtcgaattcaacctaatatctatcactagacgcaatcgtcaattgcaggcttagacgcactttcctccatcaaccagcatctccgtaccattgatgaagctcccctcatcgcttgccaaatacaaacacatattcgcgacatcggcagggtcagtcaaccggcccagaggcacattcccaatgaatttctgccggttctcctccgtgtcctccatgccagtgaacatgctaaacaggcctgtccccgagagaagtggtgacactgtgttgactcggatgttgtgtgggccgtactccgccgcaagaccttttgtagcctgccggtgactgtgagcctttcttttcccttcaagaaacgagagagcaaaattggaaagaaaagatcttacattcgacaca

SEQ ID NO: 13535 - DNA, 565 bp, Emericella nidulans
gcttggtaggtatccttgtaaaacgcgcttaaaacaccttgtccgtaagctttgctatatacggcagaagtctagatctgcatccatgtatacgtattcagagcggcgatcctgaggtctgatgttagctcttcaacatgcagcacttgacgtaagctgtcactatttcttctaccccgcattctgactggccttctcttctcatcccccagctcttgtcttctgtttctgtgaaacacgccccctgtagtcaaggtaatcaagataacaatggcagcctcatcaaaccctcccagccaagttactggcaccgcttttatcactggcggtgctctggtattacattttcctcccctcgtcagtcgaggccacgttgacatatccaggaatcggcaggtcaatcgcccacacctacgcccagaacgggatatccgcccttgctctagcagatatcagtctccccgctctagaagcaacccaggcagagcttctccagagccacccacaccttgctgaccggattgcgatcctagcttggggtctccctatagtgagtggtatatcg

SEQ ID NO: 13536 - DNA, 1185 bp, Emericella nidulans
cgcgtgcagttgctgctcgagcatggtgcaactgttggctgcagggatggcagcagagccacggcgttgtcgctcattgttagtgctgcatgcatctcaagaagtgagtggatcatcaagcttcccgtcaaggcagaagcagatgtaaatgctagggacgaaatgggacatacacagttgtggtatgcagctaagactatgtgaggatgtgagagtatctgcttgagcatggtggggatgctgatttgatggttgatggcgagatgagtcgtcgaagaaactcagcagtctgattatgatgaggattgagtccctattggaggaagagggggcttagttgggaatatgactggtggtgacgcatttctagccatggttgctacttggttgttgaacgtcctgcacgtttgaattagggttttccaaccacgcccgagccatatcgtgccacctgcggtggacatgatctcatttccatttcaaacgtcggtatactccaccctacgtaataaactcaaaagacaaaatactcggagtcgaagctaaagatgtagatcagtttcagagcctatgatctcgccagtgacgtcagaggcaagcctccacataagatatatgatatataaaccgcatgcgcccacctctcctatccacaaaaacaattatttttgccgaatacaaacctacacatacctaccatatactagacaacgaacggataaactcagcgtcatatcaccaaactacaaatctcgcctctattcactacctccacaccacgcgccaatatgcctaacaacaattggtcttccaacacctcctccaacgactccggtgtcacgggcgccgctaaattcgtcacatccacacttggtaacactgtcggcggcgtctccaagaccttggggggcgttacgggcgccgcaactcgcggactgggcgatacagtgaacagtgctaccggtagttcggggaggcctgttggcgatgctctgggaaatgtggggacgggattggaggatggacttaaaaggttgggagggggtcgaggatgcgggacaggggaataaatttcctttaaagaaaggagtcgagggataggtttataggaggccttcatatcggctttgtggccattggtgatacggcaaaaataggttaacatgctcgatcattttggggcta

SEQ ID NO: 13537 - DNA, 619 bp, Emericella nidulans
cccttacggagtactgttaccagatccaatcgcctaggtaattatgcccgaatcatcgtctgccaacgactgggaaaaccccagagtttttcagcgcaatcgcctcaaggcccgcgcgtactggatcccagagacctcgctgctgctgaacggggattgggacttcaactatgtctcttcgccgcttttggctccttcgcctacaccgtcacgcttgagcggtgacggcggcgaggagaaagacgcagaacaggaccaggtcgaatggaagcccatccccgtccctggtcactggcagctgcacgggtacggccggccaaactatacgaacgtcatcttcccgttccccgtggacccgccgcgggtgcccagtgagaatcccacggggacgtacaagcgcagcttccgtgtcccgtcgacgtgggatagagatgcacagctgagactgcgattcgacggagtggacagcgcgtaccatgtctgggtgaacggggtgcaggtcgggtatgcgcaggggagtcgtaaccctgcggagtttgatatctctgatcaggttgaccgcgagaaagagaacgaggtatttgtcagggtataccagcggtgcgatgggagctatatc

SEQ ID NO: 13538 - DNA, 677 bp, Emericella nidulans
ccctatctaacaagatccatatcaatgccagccaattcgtcgccgcgccggccaccttacatgcgttccagcgggctgccaggacttcccgacggccattcgcgatgctgatggcaattggcacggcgtatgcgacagcaagggcgatgactccgacagaagcaaacgcagtaaacgcgctagtatttccaaggtagatcagtccgaggagcatttcgagcacggtgacgagacacaaggctggaagcggcctctcccaaatcgtcttcgaccacaggccggaatatggaatggcattgtcgcgcgacatggcccaggtacaccgggcggttgcagttgtaatactaattgagcatgtgagcgttacgagtaaaacgagggacatgagacctaaagcaccaccgcgggatccagtgacgagagtgaagatatacggcagcgcctgtccgtaaggggcgttcaggagctctgttaggggcggaagagtaaagcaaatgggcaggataaagagcaacgaagcagcgccggaaatgaccggaacgagcaccatggccttcggcatctgcacctctgcgtcgacgcactcttccgacatggaagtgaccattcccagcgcggataaagtaaaggcaggtgggagaaggccgatgaagaagctaaagtcgcccatccagaaa

SEQ ID NO: 13539 - DNA, 569 bp, Emericella nidulans
catacgatttaggtgacactatagaatactaggatcattgtttacctgactggctcaactacctgatgtagttttttctaccgagagctgggccaagtcactacgggcgatgtcagagtgctgctgctcacggaccgggagaggtgtagagacccacatggatgatacctggctacctgtgttcacgctttaaactctcactccaggaagacggtcttgttgcatcatgatagcagccacgcacgctgggcgggggaatgggcaggctcgggaacatggatgacccattctctatatagatcatgcacgcgcatgctcctaattgtgttatggctctaccccttgcactcattctaggtagatgctccagcatgcgccggaacacagtccggaactgaccgggcgctcccatggggactgtggaggtcttttgaggggttgacggctgctcgatcggtgcgctgggggcgggctagtcggcgttccttggaaccctgggggcttcgggccgggtttacacggactggttggcacgggtgggctttgagcgtttggcagagccaagcttt

SEQ ID NO: 13540 - DNA, 575 bp, Emericella nidulans
tatcgaaatcaatacgactcactatagggagacccaagcataggatcctagtggatgcatacaaaacaaggatccggtaagtaagtgagatcttttccggtgtcttttcgttactctattgcctgctgaaagacagtggtttattcactgtactttgtttcatttcatgtatatgttttctttttttttatgtactatcgtctatttctgttattaattcgtgattttgtgattttatttgattttcttcttctcgtattatctttcagcggttttgtttttcacataatactatttttgcattttttaattcttggtgttactctttatgtgtaaaatgtttttttcctgtttttcgttttcagatatttgttatatgttgatttctgttgtttactctttcttatcgcgaattttattatatttcattgaattagtcatcttttatttgttttctgatttgtttttctcttgtttacagtttatttttccatatatggttctttcatttctatttttgtctgattatttttttgtgttttcttttcctttatgttatattaatttcttagttt

SEQ ID NO: 13541 - DNA, 527 bp, Emericella nidulans
aatccaactcatctatagggagacccaagcttaggatcccggcggttggtgtacagagctttggtgacgccacaacccattcagttcgtatgccacttttttcttcacctctgatggatcgacatacttttgtattatatatctactattatcttgatatctgctttttttgtagatcctttattttcattattctttaccttttttttttttgattctgtttccttattttcactatttttcttctatctgtataacttttttactgttagctctttgcttttgaccattatactattttttgtgttcctttttttctttaatttcattgattttctctttgtcttcttacttctttagttgttttatttattccgcttattctatcattattttttttccgtttttttcttcatattattgttgttattttttgtttatatcgttttcattttatttctcactgtataatttatctttttcttttctattgttgtttttactttgtttttgctattggatattac

SEQ ID NO: 13542 - DNA, 1156 bp, Emericella nidulans
cagcatcagaataacaatgcagatgcctaaccacctcataattgtctgctgccacgcaatttacctcggtgggccgagtaaaggtcgcgacgaggaggaatggtcagtaccggaccataattggacgaacgcccattttgcagatgaacaggcaatctacgggaaacgcgtatagctaacaagtcatcgtcaggctaatcgagcggtttcaacatggggaaacaccgacattcacagagcatgtcaaggctgggattcggcttttggcaggggatgagggggcgttgcttgttttttctgggtatgtctaagttactatcaggtttcattcatttgttaggccaaatgattctttgttaagcactgcggcaaggctgaaggtgaaaacgagaaagctgacaatatgcatgggtgtagaggcgcaacgaaacggcctgcgactgaactggcggaaggggagtcgtatttggtatgatcgcccagctgagaaatcttataagccgggatgctacgatgagaaacgtgaattcaactgatcggtcgcagaacctcgcaagagataatgaattttttggttacgcatcaagtatagactcaagcagggtagcagttgaaatgcacgccacggattcgtaccagaacgtgctcttctcgattctccgcttccgcctacacacgggcagatacccagaccaggtaacagtagtgacgcacgagttcaagcgggagcggtttatgagttgccattttcctgctgtggggctggacaagcccgggagtgggaatgttattgggattaacccgccggaggaggtaacaccattgaaagagctgctggacggggaggaaaaaagaggacttgggttgtggaagcgtgatacgtatggtgttggggctgagttgaaggaaaagaggatgaagcgggggtgggttgacggcttggagaaggggctgtgggttggtgtagggttggagcccgtggtggaggaatttggtccattggaatgggggaagtacagggaacgagttgtttcctatataatggaattgccatggtgcagaaacatgaagtactgatgataaggcattatgcatgagacaaagatctgtcatatacccgtaattagcgtagagaatgataagaaaaactcccaac

SEQ ID NO: 13543 - DNA, 454 bp, Emericella nidulans
ggggcaactgttaataatggctggctctatattgagaacgttttgttttataccctccctacgggaacacgaggggggtcttttgaagacgggtgacgtaaccaccccatatataatggacagcaaggtaagattgcaccattagctcaagaaggaacctacggacaaatgctttaacgggggataggactagcgccgtcatgacagctaccgcatctcttaagcactgcattcactagcgcagatgcacttcatcgccgcaaaagatcgaacgagttcatggcagagattatgtaataaacggctcccgaatcttagtgaacccaacatgccaatgatatcgatctacaagccaacgcgggaaccacaataactaccgctaaaacgcgcagtcatgaacagacccacctcgtataagcttggacaggacaaagcatattagttttatggccca

SEQ ID NO: 13544 - DNA, 522 bp, Emericella nidulans
tctatgatataccatacgatttaggtgacactatagaatactaggatcaaattttgcaatgcaagattgtagtcctttacaatatatcaaggtgctgaataaggaagatgagaacattgttacagcttgtagatattgacatgacgtaaatttctactgctggcctaccagacttcaccataagatgtgaattctcatactagctgcttcttggtaagtaaccatctctatacaatatatgcagctaagtgtcctgccaagactgtgtagtctaatatttcataacagaacgcaaaatcgagttggaaaagatgcgataaccaccctctatcgagggagtatacattaatagaacattgttgagaatacaagtgtgggcgataattttgaactgtggcctgaactggtcagtcatgatgcccttaatggacaagacgtgtagtcaaaggcagaacaaagcaagcatcaatcatgtggtttggtgacaatttttgcgtcgccgattgatttctgttctcaaca

SEQ ID NO: 13545 - DNA, 966 bp, Emericella nidulans
gacatgagcacttcgcggccgcataatacgactcactatagggatcactgcagctccatcggtggactacgccttagctgcaatgattttcgctgcagggtccatccaaaatccggattacatccctacacaatggcagacctatcttttaaccgtatttatcttgatagtccacactggtattagcagcatgccaacaaaatgggtagcggttttcaactcttggggttcgactttcaatatgctcgcactggtggctgtcattatcgccattcctgccgggaccactaactctcccaagttcacaccatctagggaggtttgggggaacattacgaacatgaccgactatcctgacggagtagccgtgctcatgacattcgttgctgttatttggaccatgtctggctatgactcgcccttccatctcagtgaagagtgttccaacgcaaatatcgcctccccacgggccattgttatcacctcgggcgttggcggtctcatgggatggttcttgcagctcgtcgtcgcctacaccgtggtagacattgacgcagtattgaactcggatctaggacagccctgggcgtcgtacctcttccaggtgatgtcccgtaagggtgcgcttgccatcctcgcactcaccatcgtctgtggtttctcgatgggccaaggatgtatggtggcggcatctcgagtcacttatgcttacgctcgcgacgactgctttcccttttcgaagcactggaagcgcatcaacaacaccacccaaaccccggtaaatgctgtcatactgaacaccgtccttggaattctgatgtgtctcctcttatttgccggcgacgtcgccatcggtgctttgttctccattggagctattgcgcaattcgtcgccttcataatccctattgcaatccgcgtcttctttgtccgtgaccggtttcgcaaaggaccatggcatctggg

SEQ ID NO: 13546 - DNA, 1606 bp, Emericella nidulans
cggccgataatacgactactatagggatcctgctgctgccatagaaaatgcagcatttcgttcgacctcgtcgactcgtgttcactggctgagcctctacgcagtgaggtgactgttccgacaggcaacgcgtgcccgccttggtccacccttctgtgattggtagcttttcttttgtgtttggggggtaatttgccagtttgcctaccgctctaagctcaccatctggaatccagtctcaccagtgccacttccgcctgttttcatttccagctcgtctgtcgacatcaagaagcgggctctcgttcgtccgaagtaactggtctagtgcctcgcactcgtctcgtcttatggttttgctccttcagtcgagtcagtagcatcccgccatcgtcaccatggccgaacttggcagcgcctatgcggatgccggggtcatatctgatttggatcagttatgcgatgaagagcgagacggggactcttctgttagtactgcctcggcgggcgaggagttccaaacagaggtggttcaatcacattcagaagaggccgcggtgtcgcaacctcatccagatggacccactgtgcccatgaaggaatcaccaccctcaaaggcctttgttgaaaagagatcgctttctatgacgtccgcaacgggccgcgatgcgacgattgtccaagagactaagggaccagcaaggcgtctaaatctcctagatcttcctgtggatctcctgcaagacatcatcaaagaggtatgtgtcttcaaataagtaggctcgtactacattaactgtacttaacgttttctaggttacgcatacgaatgacctgacatctctggcccttacctgttccgcactccattcccttgcagttccccaaatgtactctcgattcgatatcgtctggccagatgccttcccacaatctgatcacccagggggagtagatgctctttcttatggcctggcaacactggtaatgggagaagacatatttcgtgaagttcctactacgaatgcagcacagcggtgtgcccactgcgagtgcaaccgccaacaatcgcagaatcggcaggccagtgggcgaattcgacgtggtaactattttgcacagtatacacgaaagttttcggttggaaacgggccgtcagattgggtccaagaatattcggttactaaagagacgggaaagatgctcggaacactcgttgctttggccgtggctcggatggtcaatctggagacttttatttgggacatgcccactggcgttgttagagacgtatggattgcgctttcatcgctagcagaccgaccgggacatgagtgtcgtttggagaacgtttggatacggtggctcgataacgccgagaatgcggttcgctctttatcaggagtgcccagtgcgtcttcattaactctgcctgagacccaaaatatcctggctccgccgcctgttagcacgtctcttttcaggagatatgggcatgtagagtatccctccctctcgatacccccccctctgaaaagcttgagcgtccttgataaaaaaagccgtcatacttagaggaaatggctgtactcatcaggggcgtcct

SEQ ID NO: 13547 - DNA, 1009 bp, Emericella nidulans
agacaggtagtacctacagaccaggtactgcagactcttacattcaggcggactggccacacgtggcgctttgctgcagattcaaacaccaatttccggctatgttcagaacattgaagagaactccagagctctaccgacgggaagcaggcggcttgatgatgatcgtccgtgcgttgtgttctgaatgctgatatcgagcattccaaggcttccatgtctctcgtacaacttgttattgacgcccggaatcctgcctccctttgggcgccagtaacacccgtcccccagtgcaactaaccaggcggtaaatttcctagagttgcacgttactggatgactcgacttcaagaacgattcaagtcaaaagacggcctctggactgagtaagttctcgtatctttcctttcttaaccgctcgcattctggtgttttggctatctgtggtcgagtcgctgagtagcaccacaacagaaagccaatacgtgtgctgatacccttttcttggaacgctgatcgctacatatgtctcagacggcgccactaccctagatgcgactggtgacgagagagtaagcaccgtcacaccatgcgtgctcccgggacatctgagtcccacttcaagtcaatattaatatcgccgaggaaccgtgcgaccacacctccggtttgatggtggcgccttcacgcgctagtcgtgctgacagtgcatacagattcagtcacctgctcggctagccgctttgggctttcacagctgggtctggactctgttggggatatcgcatttgggcccggtgcttcgctgaccacccccctggtcattgcctatatgaggagcttgcggccggccgggcatagagtcgtcccgcgatctttcgactgatcagtttgcgcacaaacccttgctgtccgcgcgtgtacaaggtacggaagaccaggggtgaagggttccggaagcctcgaccagagcgatcatcccttactcggctctttttccaattctgac

SEQ ID NO: 13548 - DNA, 598 bp, Emericella nidulans
tgataacacatacgatttaggtgacactatagaatactaggatctcatacgagaattgtcgaagccatggaagggaaagcatagacaggccacccagtgaggcagtaccctgtaacctgttagttacgcacttggtgtcgcagagattgcatacaatgagggtaagaggtttgcattgcgcgaagagggctcatcgaccccatacactataagggacagctgcacctcgtaagcgttccgacgagagaggtgaattagacggtgcttccgtagtctccaacagtcttttacttggtcatccgcttgtcgaaggatgtaatgtggaagatggaactgcaggataaatccgcggttctataattgtaagcatttattcaagctttttcaagtgtaggattacctgcgagagtcccatgtatgagtcaaacgccacgtatcgcaagagaaatgatcacatctggggaagatgcatgtagttgacgttagatatcagagcaaggcaagccagaagggttaaatcgaccagataacttgtccattagctacaatagtagggaaaagaggtagacgtacataattccgcgctctgcacgacctg

SEQ ID NO: 13549 - DNA, 561 bp, Emericella nidulans
ttacactgttacgagagccaaccccataccgatcacattggaatacacggtgcattgcattctgaacacttcaggctgcttgatccggatggtcgtgtgggttataagggtgcgctgctgacctattgggaaggtgtgacatgtcattggccaacatatcagggtcaggaccaaaggcgcatccttgagctagggcgaggggtccgagataccgactatataggttggtgtacgcatagtgggagcctatccaatagctgaacaacactgatggaactagtccatatcagctgtgaaccacgggcgccgctcatgacaatacactcattacaggattaccaagtgctgtggatgcaagtgcatatgatggaaatgtggccatccaggccagaccgcaagggttgactgaagacaacgggatgacgccttaacttgcaagcatatcttcttcacaacatggaggaccatcaaacgcgagccttgctagtgacaggagaatgactgatagctcatgctcatagacgggacctgggcttgcagggatgggtgaaagttcacgga

SEQ ID NO: 13550 - DNA, 542 bp, Emericella nidulans
  unsure (1)..(542): unsure at all n locations
atgcatcagcgaccctgaattcctcaaaaggcaggcaatccagcatatccgatctcaagctgcagatcctgacgattctctcatcacggtagagaccgagaaccgccgtcacaatgaagctcgactttgccttccttactttcgccctggcctccgtgcccgccgccaacgcctggcgcgtcaggttctaccagctcgaagatggtaaagggccccagtacacgaatgcaggacccggtggcaccggatggaggtgccatcccaatgttggcagtttagacggcaaggtctcgtccatgcggtactggtcggacaactcagagcacaccacccgctgctgcatttacctctatactggccagaactgcgacggttcgctggataagacgtttggccacttctgcaggaaccagtacctcaattttcacgaatggggccttgcaaacaagatccgttcatacaagaccaattgctacgcgattgaccctgattatgctaagcgccgggcngatggggatgagctggagctcgacctgagtttg

SEQ ID NO: 13551 - DNA, 681 bp, Emericella nidulans
tcaaatttgtcgtagaggactggtggacaaacagttcgaaggaagtggcgtatgatatcgatttcctcgggcaatattctctttgttgtttgacggtgtttttccgctgttgaaagctggccctgatctccctcaggaatcaagtcgacaatctcgtaggagcgaaaatccacatccccgtcactatcaacttcaaaaagcgtatacttgagctgcaactttgcctcgagcgtcaaaagcgacagctcaccactctggacgtacagcaccgcagccacctgcttaggtttcagccactccctgccgtacagaatccaaagaataatctcatttatttcgacgatctcttttgcgttcctcactttgttcaacgactcgatctcggcctgtatttgctgcgaccgttcccttcccgcgttcttaagaacctggtcgatatcattcacataatctagatggcttatccgcttcaaaatcgtattaatacgaaagtagtcaccgcttgtcttaatacgcagcttaacgcgggtttttttgcggggatcctttacaccaaggcgttctttggttcgcaaagcctcgatcatgtccatccgcgaactgatatacatgtctatatcaggtcgaatcctttccctgatgtggattgtcttgaagccgaattccctattgccgctgata

SEQ ID NO: 13552 - DNA, 1415 bp, Emericella nidulans
caagggaaccgccgggtgaacttttgaaaccaattacaaggtttggttccgcggattgtataaagaggtaaaacccttaaacctatcaaagagggggggagttttggtgcctccagtattccatcaacttataagggcatcgagaatactcaatgctggaaagcaacgataacctcttgagccaactacgctgcttggttgaataactgtgataggttgtaggcgtcttctggctgactctctccgcctggatgtcaccagactggagtagcctaccagtgctgcgggggcacatcaaccctgaaaggcaagaacgcagggcacttctgtcaatgaatctcgtgggtgtcacaagactctgtaaaaggtccggcggcagtcgggtcaacgctacgttgtgaggcccagttgtccaaggattccagaatcgcaacaaggcactcgacagcttgatgttttaagatgtattctgagggcacactatgcgtaggtggttgctggttgtttcctatactggcgctcgtcagatttgggggaagggtgccacgctggtgccattcgttcccaacactggaagccttcacatgcaattcgtggtattgttgttgttggagagggttcacgactgtcgggatactagcgtatcgtgataactgttcaatgatactgcgaaatttgtcagattcttcgtcttctcagactgaaatggagaacaaacttttggaaaatattctccagggcagtgcgatcacagtcgtagttgagatacatctcgactaatgcacgaggctcgtctgccagtcgctctaatatctccatgaaatattgcttttgaaaggccggtgcatttcgcttctcgagtatggctagatatatttccttcatgaagacctctaactctttctgctactggttagacataccaaagtcaatttcagaaaccacgaaccttcatcatgactctcatgtgttttaacatgagccaaaatatttcgcagcagacctcgaagactttcggtactgagctggcgccgtttcgactgagacttaaacagagatgaggtctaatcgcttgaaggaaggtcatcgcttccaaattacctgagctgttttttagtgtgagaaggggtgtggtgaagataatgacgtggttattgatgaggtagtggattaggtgcagagatagcaatttggatctcatattctgggacttgaggtcctgttgctgctcgtggctgaggactttatgactcaacttgcaaagagctctgaatacgaggaaagcatctttgacgtaaatctcgtccacatcgtcttcgttacttgaagcatcttcagcctctttctcctccgaggaagtgcctgagtaagactgcgttcttttctgattaatgttggcgcgggtgaccattgtt

SEQ ID NO: 13553 - DNA, 482 bp, Emericella nidulans
atgtaagaactgttccagcatacctggctgggccagcaactgccgctggcgcttgcgctaatactcatattgcagttgccgatgggctccacttccatgaagggggatcctgactggaacgagagggtgccactaacaagctcctgcatactaacactactcatgcctacggcgacatcgaccccgggcttgccgttgggccacaaccggatattaacccatgggcccccatctagggtcctaaatacaataacgtctagccagcttttcacacaatttcctgtctagtggataaagctctcatgctgactcttcgcgcagagatcacaacaccaacccagactcgaccctgacgaaaggctcattaccttgacactgacacctaggcaaccccctacctggacatacgcaagcaccagcataaagctcataattggacagagcatatgtctcatcccatacgcctggtgccacgattcttt

SEQ ID NO: 13554 - DNA, 800 bp, Emericella nidulans
tcagggagtgagactggagaggcagtgatatggttcattgggagttttctacgcctatataacgttggttgaggcggtggctgttctatgcggtttacactacgacgggtactcagaatttctttttacaaaaaaaaaaaaaaaaaaaaaaaaaaaaaaaaaaaaaaagaggcaaacagaaaaagaataagagagagggaaaagagggagggaaaaaaatctagcaggaaagaaggaaaataaagaagggtaccttctaaggaatatttacctcccaatcatcgagtcttctggcctgtatgggtaatcggggatggggaaggatatgctacggataccactgacatattcttcgtttgaagcaatctctgacgctcttacaaccttcattgccgttgaagcagttgaaatttaggatgctgagccttagaagtcccagacaaagcccatcgatactggcaaccaccagcaaaacaggccaataatcccggtgcctcaagacttggacggctgaccgatcaccggcgcgtagatgcatacttccagcctatcactgggcaggatatttgatgaatacgagaggtccaggctagtgctacttagcgttggggccagaccattaccttcccgcgacgaaagcatcccacctcccagtccagcttggaggtatatggtttatcaaaactaagatgagctcaacgagcctagagggctggaccttcaatgataactcccgctcctcctgggatattgtctggacatgtctgactaccatcttcgcgtgcacctggacggttctg

SEQ ID NO: 13555 - DNA, 323 bp, Emericella nidulans
atcaattatacgactcactatagggagacccaagcttaggatcccggtatccccaacctcttcccgcacaaggaaaagatgcttcaagagatcgaggagcgaagacgcatgaaggccgaggaacaagcgcgcattcgtgaggaggctcgtgctaggcgtattgctgctaagcagggcggtgatgctactgcggagtcgaccaaccctataccggtggatcttgagggcgactatcatttggatgatgtgattttctttgtttttctcatctttctcttatatttttttaatctttgttttattttctttctttcctttttttt

SEQ ID NO: 13556 - DNA, 600 bp, Emericella nidulans
  unsure (1)..(600): unsure at all n locations
cgatttaggtgacactatagaatactaggattttatcagatgccatatggctgcagtgcgatctgagccttggtttacacccacagtatgcgacacggtacgacagggagatgttttncacgttgaaaccctcgtccccccttcnngntagttcatttttcttaagattctcntttttgggggggtactaacaattcccagcccgtcatgaggacccaaaaccgtagggtttatttttnttcttttctcgagtgatnttaatttaatcctttttctctttattgttttttttttcttctttntntttcttctcgtcttcttttctntttttnttcntttctctnttttatttttcttcattttactatctattttttttctttttttttatctttttttntttttttttttcgctccgctcttatttccctctcttcctttttnttttctctatttttttttttaaatattttccttttctttttctctctatttttttttcctctttgttaattcttttttccctctttttatttctttttttcttctttttctctttcctattattatttcttataatttatttcccatacccccccc

SEQ ID NO: 13557 - DNA, 613 bp, Emericella nidulans
ttcgcggccgcataatacgactcactatagggatccgagggattgggttggggccgcttaactggccggggccggtcagatcacttctagcccagaaatattcgctatccggccaataggatgggagggatgatcccaggagacttccccttgcagatggattcggggaaatcaccctgagtcagaaaaggctaatccagcttgattccgtccgaactggagtaacaccggcgggttctgcaggctgggcctgatctttggaatctcaagctatccggtgtgcggccgacgggcaagaagggtacccgtaaggtttagtaaagtgtgagagggccagcttcaatgtcgttcagacaaaagtttggcgcaaaacgcgggaaagaaatattcagcaaagacgaagcacgaggtgcagagaggaaccaaaggactggtcgaattaagacccgatcgccggcccgtgtcattggtctccgtcaccttgagctttttcgaacacttcacaactgttcccattactaaaatctaataatatttgaatatattgagttgccctgacctggtcttatgtttccctaatctagcgttcttttagttaaaccccctgcggggt

SEQ ID NO: 13558 - DNA, 942 bp, Emericella nidulans
gactcactatagggagacccacgcttatggatcatactgcaacactggtgtctgtggattgcttctgtcccaccaatcaccccttcccctcaataattcgaagggggtgaattacgtagcgtagaccggattaatctagctgaagttcagttcctgaaccccttcttcactgtggatcccccagctttgacaaggaaatagagattagcaggagcctcggcgtggttgagtcttgacgttccttttgcttagtgacttcgacccctcgtgctcctcccctgttcgtttcccgttatctcttaacatcttcacagttctctcatttcaatctcatacctcttaccattcgtctaggtcttcgttctaggagacttgagctggcctagccgtttggggagtcaaattgacagcaatttttatcaagtggacggtccatcttactctatccttacgcttcattcttattcttcagaacacaaaatcccacgttctttaacagcagaatgcgaacgaaaacgtgatttccctacgactcgtctttaacctatatttccctccgacccaagatgcataagaaggctacactggctctcgccagtgcgatctgtatcacagcagccacaggcctcccaggtccggtcctggacagcgcgccgaaagcgagcgttcacggcagtgttcacggcagcattctaggcaccgccgccgatataaatgatccatcttatttgtggaccatgtatggtctgaacacatcggaggaatacaagtactttcaggagccggggaatgacgagatccacgcccattatgactcgcgtttcttcaaagatccggttcctaaagagcaccgttcgcaagtcttgacacatatcatccattcgtatttcgagttctttaacagccacaacctagagacctggcttgcgcatgggacattgt

SEQ ID NO: 13559 - DNA, 427 bp, Emericella nidulans
ctatcgttctaggaaacagcggggtccattggtcctaccgccggtcatggagcgcagatgcctacttcttacgagccccttcggccgacgagagtgggggcttctatatggcacataccgcatttacctcttgtgtatctgatggggcatttactctggacaagtgctacagtagggatcctacagatagaacgggttcataggagttgtgctgccgacgttaggtcacccatggctttacataggctcagcatacactggtgatgatgccaatcttggctgacacaggactgccctgctaacgggcttgactttcaagagaccagacgccaagaccatgacatggtacctccagaacgtgactaacaacccgtcgaacatgagctacatgtacatgtgctcagacgagtgcaattaacagaccttc

SEQ ID NO: 13560 - DNA, 526 bp, Emericella nidulans
attcgcggccgcaattaaccctcactaaagggatcttgccgaacgtgtatggagcaaccagggtcctgaaggggaagagtctactttcaacacgcttagagaaaacgctctgacacaagactgaggtagacccactgaggactgatgcaatgaagtctatcagaaaacgtcactagtgtgcatgccagctcgaatgcaggcggattcagagaccgctaagagctgatctcgaagaccgggctatgaccagtacttagcgtattatgaatgatgctaagggaaaagactggccgaagcacgtttaccatgcagagaagggcatgacctaagcccatattagggaaaaatacggacaggaccctaccgatatggtgctcgggggaagacatccgctaaagctgctgaggtcttacacgagtgtaccgactgctactcatcacaatgtattagctgtgatatgctgagcgagacgatggcaatcaagggacaagggcatctcctcggtagtagctaggacgctcactga

SEQ ID NO: 13561 - DNA, 1260 bp, Emericella nidulans
ttcgcggccccataatacgactcactatagggatcaaggagtttcagggctattggaaaatgtgagatgtaatactacgaattgagtgtgaggcaaggttacctttagcccattgggaggccttgtgagcatattcctccttggtagactgctcaacctgccatggtccccatacttcgttaccgagggcccaatatttgacctgtgcatattagcaaactgagaaaacgcggggctgggattgcgcacattgtacggttcttctcgtccgttcttgcgtcggagattggcgtagtaggtgtcccgggtaccgttgcaataatcgacccaagccaaagctgtaatcagaagtgtcaaatatgccggcagagagagtggtagtcttgcataccctcatcaagagtacccgtgcccatgttcaggcaaagatagggctcggttcccagcacctcacaccacttcaaaaactcatcagttccaaactggttggtctctgtgcccagccacgcaagttccggcctggaaacaatcagtaacggtctacctaaacaggttaagaatcagagacagacctcgcgggacgttggtctctcggaccaactccatcgatccaatggtatgttgcggtgaagttgccaccagggtaacgaatgacagggaccttgagctccttaagggcttcgaggacgtcctttcgaaatccattctcatcggataatgggttaccgggatcgtagatgcccccgtagatgcatcgacccatgtgcctgggttcacgagtcagcttgatatggtcctaaacttagtcaggccaagagaccggggtccaaagctcactctgcaaacccggcatagatattaggattgatttttgagatgcggcggtctgggtgtatggaaattcccggagcttcctgctcactgagcttcgtgaaggtcgtcatggcggcgcgaatctgacgagctaaaactacaggatcaagccaaagaaccgaagaatcgagtactgattggcagagaaaaaaaaaactcaattatcaaagtattgttgagtacttgaagacccaggcgaggcgactgggcagctaatattaatgttagacgggcttatcgagggatccagcatcaaacaggcaaaaccccggcgggtcaccccatgccagacaagaaataaattggactaactcctgcggagttgacagcaactggcgatgtgtagtgccgttgatctggcgattggagccaagatgtggcttgtag

SEQ ID NO: 13562 - DNA, 691 bp, Emericella nidulans
  unsure (1)..(691): unsure at all n locations
acatgagacttcgccggccgcataatacgactcactatagggatcttctgtaattgtttggaagcttcaggggcggctgggactagttcctccggggcacccgctgattttgacacaacattgtccggcaatggcgggccgcttagaggagcattaaccttcacatttcctttattgatgacttctgtcttgcgtcccgctttggagtcggacacacttgtcgactgttcagcaagtggatcctgaattatggtagtttcagtcgcctgcgcttcttgggttctttcttgcgcagagtctctgaagaagaaagaccaggcagatggcttggtacttgtatttgtactcttcggagtatcagtgccgacctccgttctcgtcctttcagtgtcttcgtccgaccttgatgacgcaacgggggcaggagggtgttgntnctnttcttttnncgtattttctttccctgaacgtctacccccctagtgcccccgctgagttcctctcttgtttgggtttccaccgcccctaggccatttccctacttaccctcattttaacttgtagactctttttccattcggtcttgccatcttaacccttgccccccattccctcccttttcttttgacattccccttttcctttttcccttcttttttttcttttggaaaaacctttacccccccttttt

SEQ ID NO: 13563 - DNA, 1338 bp, Emericella nidulans
tataggctgggatcatcagatactgttcaagagaggttgtccgggattgtcaaatgagatcttttcatgttaattcggcggttcaacaaggtctgcccttacagcttaccgggaaatgaaccttgagaacgagtgctaatgtgttatgcagcaaatatacaacgtcaaagccgttccggacgcaccgctacagggacttgacctcgtccgcgcggaggatgaccatttctcgcccgataagctgcgcgcgacgctagagcggttctataccaccataattattggagtgactgcatttgtgaaacatattgctagattgcgctcctggagggagcctcagcgcacgacatggttttgtgtggtagcttcccttagatctaacgtaccagcacgaggggagagctgatcaggatgtgcaggtctacttcacagcatggctgcgggatctcctgattccgaccattttcaccaccttacttactctagtgctctatcctccgtctcgcaagttcctcttccctcccgccccgatcgccctcgtcgatacgtccacgggcggagtacaaaagcccaaggcgggcgtgctaggatcccacgatagtatgaccggcgccccagaaaagtataagggtgaagccgcagagcaagaagcaagcaatttgatggcgggtattgcaacagtagctgttggtagtgcaaccggtaaacacgaccaggggaaccccgaaggtgccccaatggagtcgaaggtgcctgatgcaacggacatcgtggccaagtcggcggatgcgcaggcggcagccaacggggaggtcccggccgagactcatgagaagacgcccgagccgatgaagccgacggtgctgaatagcacagagcatgccatgagggtcatggctgctgctatcgataccggcaaaagaaccgcaaagcaggccctatattatctacatgaggcctaacgagaatcaggcttattgaccttcgggtgcgctaaagcctacgacctgatcttgaggaggcccctcgttataactctctggtattggcacgtacagctcccgacgaaagcgcccccgcgattgatcctctgcctgggctcctactcgctaggtggcctattcctactccatctcccttgtctttaccattcacacctatactcaccgaagagatatcctctactccattttctctcatgatcctcactctcctccatcaacctccttatgctccttttcctactcatcctccttcacgtacgacactctctcttcctccgcggcttatgctcaccctcacatactcaatcttctcttgtcccttccctccccctta

SEQ ID NO: 13564 - DNA, 789 bp, Emericella nidulans
  unsure (1)..(789): unsure at all n locations
gaaaattttttaaagaaaaaaaaaaaatgtagaaacaataaagggagtaaaaatataaagaaaaaaaataaaaagagaaaaaacacaaagtataataaaataaaaaaaaaggaagaaaaaaaaaaatgaataaaaagaaaaatagtaaagaatgaaagagaaataagaaataataaaaataaaaaaaaagacaaaaaagaagaatagataaaagagaaaaagaaataaagagaaaaagaagacagcaaaaagaaaaaaaaaaaaaaaaaaaaaaaaaagaaaaaaaaaaaaaataaagaaaggaagaaaaaaaaaaaaaagataaaaaagaaagagagaaaaaagagataaaaaaaataaatataaaaaaaaagaaaaataaaaaataaaaaaaaaaataaaaaaaatagaaaaaaagaaaaaaaagaaaagaaagaagaaaatgagatagtagaaatagaaaagcagaataagatataaaagacgaaaaaaaaagaaaaaaataataaataagaatattagaaaaaaaaaagaacataaaaagaaaaataaatataataagaaaaagaataaaagaataaaaataaaaataagaaataaaagaaagagaaaaaaaaaagtaggaaagaaaataataaaaaggaagaagagagagaaagtaagaaaaaaagnacagataaaaataaaaaataaaaaaaaaagaagaaaaaaaaaagaaaagagaagaaaaagaaaagaaaagataaaagatataaaaaaagaaaaaaaaaggaaataaaaaaaataaat

SEQ ID NO: 13565 - DNA, 512 bp, Emericella nidulans
gatccctccgcctcttcccgcccctcgtgagggcgctattaaggacgcactttctttcttaaacactcactcaatgacccagcttgagaacacgaagtagccctcagcgtaactgggagtacaacgctgttgacgaaagtatattcctgtgcatgatagaccggctcactgatcttgatttaatacaatggtggatgcaccacgataagccggacagactttgcgaggttgaacccacgactgaggctcttcgagagtcctgactacaaagactcctacgtttgacgaagatgacatgcatactcccgattattgccacgtgaccaacgtttaaagcataacatgccagtggcatcctacagagctaagaaagggtctgggggcatgtgcggacagcaaaggtgggccatgatgcacagtgattcagctggggtctgatttgcattctgactgatggcaggatctttggatgccagaagatcaggtagtacctagggacataagggatctta

SEQ ID NO: 13566 - DNA, 1611 bp, Emericella nidulans
ggcagatagagggatctcgtctacaaaaagaaaaaaaagaagaaccaaagaagataaaaggaggagatggggatagaagcattagaggaaagataagaaaatataagaagaatatgtatcttccaagaagagagaaaattataaggtaaatgccccgaaaaccttatcacacaaccatgctaatggaagggacttcgggtttggcaccaaggtgatttaaaaaacaacgggaagccagtttcttgaagggcataaaccctggacaaaaaaacgcggtcttattggaaagttgaccaccccgttgatttattcaagttcacagttaggggacaagagtggccagagacgacccggtttaaaattgcaagatacagtctgaatacgccttgacagttcttatcagctcgggtacatcaaatgggtccaacgggtcgtttgcctgttcattgacggacacagcccggtatatcatttcgataccttcggggtcctctccattgcgggccagggaaaaacattcgcccaccgatggcttgaatcttggtaacgccacgttagtcctggtctggggagtgtgtcctcatgccatcaagctgttctccgcatacgatgtaccgctcttaaagaatacggccaacgttaccgcgaacccggaccggtacatcgtccgcgatttacagcaggagcattgttttaaggatcgtcattatgtgacaggctggccgcacatgcgattctacgccgaggtcccgatatatagtccgtctggtcacattctcggtggttattgtgtggtcgacaataagccgcggcaggatttcagcgaggatgaagtgatcgctttgcaggagatctcagatgcgatcgcgcgtcatcttgagaatgtccgaacagtccattaccatcgacggtcggaccgcctcattcaagggctgaccacctttgtcaaggaccgtctccacgaacgaagtccgcttgacgctccagcgccgccgcgcgctgcagaaacaccgtctctggagcgactcggtctagacgaattgccgtcgagtactgaggtaactggaggaacgtcgctgctattttctacccaaaatgctgccagaaaatctactcacgcgacgtcgctatctggcacactgcataaggccgtgagctcgccgctgctgaacgaggttgttaccgatactggcccgtctcaagacactgttcctttgcgtatgaatgacaactcgagtgcaaagagcactccaaagccggtcgcgaaagacaaagttccatttttgaggcgcattgaaaacatttatgcttatgccagctccctaataagggagtcaatggatcttgacggagttatgtttgtagacgcctctcggtgcaattctggaaggtgagatcttcttggtgtcgcgatctgtatcgtagttaacaaaaccagtgtctcgctgaaagcagatatgctgaactgggaaccattacccaaaaacgcggatcctcgaccaagaagtcagtattctaacagtgccgtggcggacgaaaccatatgcgacacacttggccaagccacgaacgagactgacacccaacatgggatacctgactcgcttgtcg

SEQ ID NO: 13567 - DNA, 838 bp, Emericella nidulans
cggcggaagggaaaatgcaggtgagaggagcatgggccacaataggaacctgaagaagggtaactcgtcattggcctgaaaaggagtgaaatgtcggtggaaaaccgctacagagtgaactcttgtaactttgtaatttattatgggcctaaattggcccaacttggtccaaattggtccaataattctgagcaaattgcctgacctcaactacaattatttgctatcgcttcctatcgcttgattggcttgattagcttgattcgcttgctatcgctgcaaacggactcttcctttgcaggagtgttgaccccaacgctggttcaacgcaagtcctgaggtcttacgtatttcgagtgaacgactgacggaagtggatcgcgtatttccagatggagaacgggtccgaccaatcagcgagcccagtgcctgatcttatccccttgggtctgattcgacagcaaaaagcaaggtgctaaactgcagatctgcgggagactcactaagagccaatttagaataacctcggaagtcggtgctcctggcgaatagcggggtagattgtcgccgggcctgcgaggccggagctcagtgaacctgagctagtgtgtctctgtaagatccagactcagccagcgagacgcgcatcaatagtaaatcttggctccatatcgagacccggtgactcggtgagctggattctacaagggttcaaacgatcgcaccagcctatccggcggtccggtgtccacacttttttcttacggttgccggtgagacgacgcttgtttaccagagagtacagcttagtcatgtacatgctagttaggttgtaagt

SEQ ID NO: 13568 - DNA, 1115 bp, Emericella nidulans
aagcgcattgttaagctgattgagaggagaggatgtctgatgtctgacttgatgatgatcgaatttccccagagaaacctcttcttcttatagacatggtccaggggcttccggatcgcgccgcgtaaacgtcgttcagtgacgtttcataaaaaaggaggttgtataagagggtgcgtaattcgagacaagccataggctgtagcttggttgcgatagggctcgacaacgcttcaaccgcttggcgccgcgtatgctttgcgtgacagtgcttggtatgagcttagttgggcccacccgttatggaagagtcgtgagtgtcgaccgaggcccagattcccttgtgctgttcttcgaaatggcacgaactgcgatgatcagctcaaaccacgtgtcttggcaagatgcatttatacttactgtagatcaaggcgatcagctgcctgatatgctgacagtacaatctttcactcaatgagaccgaacactagaacgctgcagttgcagactgatgacgccccagctccattgatcggcaggccaaaagtcccgccccggagcctccatcggatttaccggcatatctcggaaataggtatatataccagagaatgcaccgcctcagaatctaaacacctcctgcctctggctgtgttgccaagacccggctgtgctcttgcaactctcctctcaaacgcaatcaccaacgcgattatagcctgttcagttctctatctgcgaccaccgcaaagtttatcggtaatgcttggaaacaaccatacaccaatctcctcgagttgtgcttcacattacccaggttagcctcgtgactgctagttgacttgacagtaatgccagtcaagtcgctctctgagggaggtgctatcgcacagtaatacctgcctatttcgactcccagcaatgggaggctttcacgcgatcaacaaacccagggatgccgcctctggtttatctctcagttgcatctggtgtatatctggagttcctgcatctttatagccatcgctaccctctatcatggtgcttgttcagcctacacagacgtcgttggatgcaacgtcgtcagatgcaacggaaacaatgaaggagtctac

SEQ ID NO: 13569 - DNA, 655 bp, Emericella nidulans
  unsure (1)..(655): unsure at all n locations
aaaaagggagaaaacaaaggaaagggggggncaaaaaagggaaggaaggaaaaaaaaaaaaatcaaagaaaaggagggataaaggagacaaaaaaaaagaacaaaaatttgggagggagggatgaaaaaaaataaaggagaaaattatggtaaggcaaaaataaaataaggtggaaagaggaaaataaaaaatagggaaaagaaagaaataggaagaataaagaagaagggaatagatagaagaagggaaaaaaaaaaagaaaaaaaagaaaaaaaaaagaaagaaggagaaaaaagagaaaaaaaaaaagagaaaaaagaaagagataaaaagaaaaagtataaagaaaaataataagaataaataaaaaagaaaaaaaaaaaagatgaaataaaagaagaaagaggaaaaattgaatggaaaaagtaagaaaaaaaaaaaaaagagtgaataaaggaaataaaaaaagagagaaagaaggaaatgatagtagagagaagagaaaaaaaaaaaaaagaaagaagtagataaaaaaagtaaaggaaaaatgataagaaaagaaaaaagataaagagaaaaaaaaaaaatagtaagaaagagggaaagaaatagagttaatgaaagagaaaagaaagaaaaatgaaaagaaaggag

SEQ ID NO: 13570 - DNA, 1145 bp, Emericella nidulans
ggctccacggacccagggctatcgctgctggcattcttatttttcctcggctctcgagaaggggcctggattgggtccttctccgccggttctgttgtcggccccgcttctgtatggcctgtggttggattcgtattcttatcctgcagttgttggccgtcggtctgtggtaggggtgggcactgttgttgcggatcggacagatcttgttcctttctcgattcggggtccggcgatttgcgtttgcgggatgcgctgcgggcggaaatagacctagattcagacgctctgcgccatggtttaggtggttttatgcgcgttttcctcaaaaatatttgagattggtcttcgggctcggggatctggagtgtgtttactggtagcattgccggttgagagtcctgaagaagtctttccgaaggtagtgagggcaatttgcctgggacaaatctccgctgatacggtctttcctcgttgagactgctgcgcagcaatagctcttcctcgcccgcgagttctcgcagctctcgctttgcccgttcaagcttatcctccaggttactgactcgcttcaagagcttagcctgccgctgcatgtccttgcgagacttctggcgccgaacttccgggtcacgattatcgatatgttgcaggagagacgacatgccgtcttgtttcttgatcgaagggatcgctagcgatgacttggctttccgtaaatccggtaatatcggacgcagcgagctcccattattagcgtcacgggtggtcgcagtttgactggagctctgtcgaggatgatggccgaagccactgttaccggcgcccccgtactccatcttctcttgaatagacttccacgtctgatccggacagctggctcctcccgttccagtcccaaggctttggagatatctccccttaacagtaccttggtatccagaccgtttgagttcctcgtacgccatctctgcctgtctgagccggtcattcgcacgctcctgcacccggttgtcatcctgagtgtgagagcccttccagaactcggatacgctgccccaaccaccaaacggattgaatgcggacgcaatgctttgccgaagcgaaagattcccgcgccgcgatttgtggacgcacgcgagcgg

SEQ ID NO: 13571 - DNA, 618 bp, Emericella nidulans
  unsure (1)..(618): unsure at all n locations
ttatgtatctaccctacgatttaggtgacactatagaacactaggatcaacctccaggctctggcccgccgcccccgccccccccccccccccgcgccgcccgcccccgccccccccccgcggcccccggctgattcncccccccnccccccccccncntccnntcccccccccccctcctgctcctccccccccccttccttcccctccccccccccctttccccccccctttcccttccccttcccccttccccctcccctttccttccccccttctcccccccctccctccccctcccctntcccccctccccctttttcttccccctcccctcccccccccttccttccccccctcccccctctcctctccccccccccttttttnccccctttcntcccctcccccctctctccccctctntttttccctccccttcccccctccccccctccccttccccttcccccncctccttcttctcccccccccccctcccnttccccttccccccctcctcctccccccccccctcctccctcccctccccccccccctctccttcccccctnnttccccccccccccctttncccctcctctcccttcctccttt

SEQ ID NO: 13572 - DNA, 829 bp, Emericella nidulans
tattggggactggctgttgaagcggtactacctctgccgcaggtcctcgccaaccaccggtctcggtcttgcaagggattccgcttgtccgtggtcgcagcgtggatcctcggcgacattatgaaactgagttacttcttcagcagcgagcaggtaatcccctgggcgtttcgtatgtgtggtatattccagttcatttgcgattctattttgggccttcaattctgggtgtattctcggggcgcgtcgagcgtggctggaaatccacagcaacgccttgagaacgagatcggccttgaagaaaaggacatccgaatgacatgatgaactggcatgaagtatgtacctagaggctgacgaactggtcggccattgcttgatagatgttcgctttttcccttttctatatatttcttccgtgcttggcggttgatttagagccccgcgtttcttaccccaccagcaaagatcatggatgacgactgtatattaatactcctactattctttctaatgaacttgactttcttcaatacttaccttacctactcttgagtataaacattgatcattcagtcatcatggcctcaggacaaactattcgaattggctacgtgcccggtatgtctgttcttcagcccgccacgttaacagctatcagagcggctggacaaacccttcccttcgatatctactaacgtcgcctagaacactacctagccccccttcacctcgccttccgcaatccttctgtctcttccctcccttttaagattgccctcactccattcccttccggaacggggcacatgattacctcgctgcggtc

SEQ ID NO: 13573 - DNA, 553 bp, Emericella nidulans
cctatgttataccatacgatttaggtgacactatagaatactaggatccaaagtccactttttgataacctgagccaagcaggcaaaatgtgccaaagtttagagtgaaccgtgaatatgcataatatgacgagctatcccagtgcaccatgaccggatctgatagcgtgtgccacatcggatgtagatatccagctagaccggcagtcggtgtagtgccacccgagctgtcatgactgtctcacccaaccgaagaggtaatgcccaaccgctgccgatgggtactaactgagcatactgctgagagagcgtaactgacactcggctgctaaccatgttgtcatcctaccaggacgcatgttgacctaatcatggtgtgccgcgtggatcaacggtccacacgtgccaatatgaaacaacactgtggctatctgggcgaccaccagctagctcactgctcgcatacggggcatcacatgcctcaaaataactgcgacggacttatgcacgagagatctgccagcgtcacatatacgctcagctacagtgtagc

SEQ ID NO: 13574 - DNA, 497 bp, Emericella nidulans
  unsure (1)..(497): unsure at all n locations
ttagggaaaaaccacaagaagacacgaaagaagggacgttgacaacacgacagaaanattggcagncgcggaggaacgggagggcgggcaggaataggagccaaaaaggggacnccccacgaaagcgggaagaggacgaggccaaaaggggaggacagcgaagagcggagaggggaaccagacgcaggaaccgaaaggaaaaaaaagagcgggaaacaaaggcaggaaacagaagaagaacagacacaaaggcgaggaaagagagaaaagggaggcaagaaaacagaaaacagagaaagaagaaccaaacgaagaaagagaagaagaggccaagcagaaccaaacacagagcaaggcggaggagaaaacgaagaacaagagaaaaagaaacaacacaaaaaaacggggagaaagaagaagagaaaaaagaacaagaagaaagaaaaagagaaaagagcacacaaaagcaaaaaaaagaggggcaaaaaggaaaccaa

SEQ ID NO: 13575 - DNA, 461 bp, Emericella nidulans
  unsure (1)..(461): unsure at all n locations
aatgttgaactagtgcacattctagtacctccccataggcacagtctacctgcggggattggacatcagagcaccattcccttctgcagcgttaaccctattaattctctctgtttgctnntaccaatatttatttttggtattatgtttttncnttattttttatcaattcgttactttcttttttttttttataaccaattttttttctctcctactctttttttcttcttttttctttctttttttcttcttctctttcttttattttttccttatcttctttttttttctattttattttttattttttttattctttctttcctttttcacattttatttttctctcttttttccttcatttttctttctttattccttttcacttttatttatctctttttttatattttctcttttttatttcttatttttttttttacaatctactctttttt

SEQ ID NO: 13576 - DNA, 994 bp, Emericella nidulans
  unsure (1)..(994): unsure at all n locations
ttcctgtccgtgacatgaattgaactgcccaaggtcgtgacgagtgcctgtgattatcgactgctgccccggcgcaagacatgatcccctttaaggcgatgtcgatgccagcttagaacgcaggccggaccccgtcgactgtcagcagctgctatgcctgttcagcgacgacttcgcaagtcaccgctcgaatgcgcccaatgtgccgagggccagatggaggtatgcttttcatcttgtcttgtctcctcccgtcattattgttccccccgccaggattgctgctaacaccgcccccttccgcgaagtgttccaaggcccgtccccagtgcgacgaatgcaagtcccagcacttgacgtgtcgttatcgtgaccagaaaccagccccctacaggacgaaggccgccgcggccgccgaatctcccgtctactcctccccttctcctactatctatcaccgccagtcgaacgctagttctacgtcaacctcgtcacagtccaccgagtcaaatacttccaccgaatcaaacacctcctccgagtcacggaacgatgagtgcgccgaggcccccgagaagcccgagtcctgccacgtgcaaggctcgggtctgggcgatgtacggctgtgggataattggcgctcctcaaccgagcgatcgctaatacacaataagagcaaagaccagtcatggcaggtgctcatccggcgcgagtcggaccgatacccagcgctgcgccacagcacgctggctctgtccgctatccagcttgcatataccagcgacggcntacggacaagcggaaggcttacttgcaggaggctgatgcgcactacagtcaagctgtggctgcggtcacccggttgccgaaaagccctctgggtctcggtgcaacgcggccttttctaccgccagtattctgctgatgtatgaactggcgtccgttcgctggccgacaggtggataaatcgagtcgcgaaaggatgatgacaagg

SEQ ID NO: 13577 - DNA, 1145 bp, Emericella nidulans
caggccaactataaaaagccaatgaattgctcgtacaatggaccgtagagcattgaatttgaagaaaggttctcttgacttgtggatcattcacatatgccgatcatggccccctctgctgttagctttcccccttccacagaattcgtgatagcccccgaagcctactattcaactggcttgcgtgcgcgcttcctccttgacgcggaccggtccgctgcgaagactcagagtaaacccgcgacttacgctaagattgggtacgaattcgatgaaatagcctataagaagcgcgtccaggctagtctcgcagctggcaacttgcccagaaaagtacctgcgggctggcccactcaattgtctggccccttggtctgggaccggggggactttccggatgaaaatgagtatgtatattacttgaccgacaaggacaagattgagatatccgatgccttggaaactttcaaaggttcgttcccggttatcaatattatggcggcgagaagtcgctttctggttgccttaccacaacagccagaaatgaaagctcactgaagctaacagaacgcgagcaggttttggcctgggtggccatgaagtctcacaggcgacatttcctctcccgtcgcttgggaaagagcttatcaaggtgcgcaacgatgtgtatgagggccgcggatttgcaattgtgcgcggactagacccggatgcgtacaccatggaagaccttacggtggtatacttgggaatatcgagttacatcggcgaacgacgcggaaaacaagatcagcgaggttcaatgttgagtacggttccgtgatgagagttgtcaatgaatggaacattactgacgaaactctcttgtcatcagtgcatgtcatcaaacgaggcgacgaacagcgtgacatccaatacagtgaagacaaggtaggcgctcctgcatataagcatctttcctcttcccgtgactgtaactgaaaaaagagtgcatagcccttccacacggacactgttaccgactgtttgtgcttgtttacccgaagcctctccgaaaaaggtgaacacgtagtattctcgcttccgcctggacggtgtacaacgagattgcagccactcgacaagatataatctgttattccaaa

SEQ ID NO: 13578 - DNA, 1309 bp, Emericella nidulans
aaaccacccccccccttaaaaaaaaaaaacctttgttttttttttttgacaaaaagggggggccccttaaggggttttgtaaccctctctgggggggggggggggaggaggacctcccccggggggtcccaaaaggcccgtctttatcatgttgccaacacggaagcatacgcttatcagtcagtcttgactctaaacaagtagtcctcctttgtttcaggggattttttgaagtgggtttgttgttcaatttgtttgtttagaatgttccacgtccagggcctgtgcgcgtattgcgtcaagtggttcaatgcacgaggaggtggcaaatgtgctaggctatcgtgaaggattcaggtctagagtcatgcctcttgtctgcagaattcttgggttacgtgcttcgaagaaagacaaaatacaatggcgccagagattgatgtttagatcgcgatggtggtagaagtatggaagtgggattcaattggtctcgggtcgtcattttgcgcggctttaccgggcccaaggtcttcgagtcaattttagctgcggacggttgcggcttattgtccgctaaggattcctactactacaggagttgtatcttttgtggatggatttatcttcaagcagccatctacctcagcgataatatcaaattgtttgctttaatacatcatgagtcataaatgagccagaacgtccccgcaagccaaacagagcatggccgaacaagcctcagcaaggtcttaacgtatcgattcatacacggtagaagagagatacatgatcaaatagcaaagggccgagtaagaatggcggaaattctatcttctttatcgatcaggagatcgcttgctatccttcttggcctcgccctggtcggggcttgagcttggacttataaagcttacacgcttctcctctttgccccgactgagcggaacgactgacgacgaaatcgggtactgtcctttctttcgtatgctgccatgtttcaaaggcttagcggcactgcctagccctacgtctgccttagggtttgaatcgctggcagtagtcgaaccattcgtatcgtcgtcctcgacatcaatgaggccgaagtcgtccccatgctctgcatcagatgagcagggcccggggctatcagaatcggacgccacttcatagtcgtcatcatcgctcacaaggctgggggcttgatttgactcaacagtgtttgggctcaaatccagctacacgcaactcgttcacttgagggccggtcggcggataaggagactgataaggcaccgacgagccgggtcgt

SEQ ID NO: 13579 - DNA, 1662 bp, Emericella nidulans
  unsure (1)..(1662): unsure at all n locations
gagactcatggactcacaacatacgggatagagctaatgtgcaggttccgctcaatcgttggtcgccaaaatacgaaagtcgtccatttgatacaaaggtttcagtgtggcgcctagtgctatgccacttatgccggcgccaacgcaagcaatctggctgtaggtgggtagaaattgggcgtcttctgacggcattttgatggctacaggcagttactgtaagtaaaaagtttggattttatggctttacaagatcataggcacagattaagatcatgagagcttccccgcacggccatcgctgttgtctgacgggttggcgacctgccgaggtagcgtgctgagatgcagccaatacgcaagctcataggctgccaagctgcaacaatgcgaagctgtgatgcgaatttcacccatctccagcatgtactctgagtatttcaccagaagaaaaggcataagcagttacatagaaggtgtgacggcttttcgcgccttgctgagcacagccacagtcgttataagtaaacctggattgcccgcgaagccacgtcaatcggtatatctcctccatattggtacaaccattctataacagcttgagtagctgcgttggacaaatcaccaaccatatattgcatagcccggtccaggctctggtgcctgtcgcgtctatgctaaaggctccggagaaggcgggtgggtggttacagctgcactcgcataggtccgcgaatgggcacatcctgccgaatcatttcccaccgtgaatggactagcaacctgatctgcgaccaagtttgctgtctgtaacgcgacgaatataggccaattgcgtccaccaattgacgcgtctcattccaacaaatgctagcggtgtagcgcccagctgcggctcccaggcaattctgtgataaggtaaaaagaattcaaagtttcagccttgtcataaacggctccctgagcgggttataagatccgtcttgcatcgctctacgctcctgactttgtcgaaatctggctcgttgatatgtcgttgagcccatagagttgttgcatgatgactgcggttgaaatgggtacggtcaacagccgtccgctggtccagattttcgaagaaatcggtacgacaacgttcgatccaaatttcagtgatagctgaccgatccgaaaagggcccgaccgttgggaagaccgtgaacctgatttgaatattttggaggtatgtnttcagtnnctgnttacttggttaagctgtcggttgggtagtccaggcctgttggccacttttttcgtgattgccttcttttcctctgggttttcgcgattagccacttaccctctccggtagtcttttttttctacctatattatgtagtttatgcgtaatggaacacatagctctggagttcataaaatcatatttctcttgttcttaacttattggggcctggtgttccttatatcgtccgatctttctttttcgtgtggtccgctcttttcacctctgcattatacatatttcacttcatcactgataaatcctctctcttactatctctcaccctcctcatccttcgttggagtctctcatcctctctctctacattctttttcccggtcgtctctctcatcagtactctactctattagctctcacac

SEQ ID NO: 13580 - DNA, 120 bp, Emericella nidulans
agaacacaattgcttgcaacacaatcaatgacatgctcctcgcagcagactgactcaacctaggcaaattgatggatggtccttatacatcatgaggcagttctgtcgtgaaggttgcag

SEQ ID NO: 13581 - DNA, 1181 bp, Emericella nidulans
gtacgcttcaacacacatttgatctctgtttggaacaaactgtgataaatgagcgctctataaagcttctagaggagacaatcctcaaccgcttgtcgccaaatctacgacctaccgattcaggccctaactcctatttttatagacgccataatgaaaatgaagggtttcagcaagccgttgagggctcaaagcaatgaattcttaatactggtttgcttaccgagcctgaatatccgtctttgcaatgtgagcctggtcgttttatatacatgtatagcttagaggataaagacgagatcaaatgtgactatcaacgtattgctttcggtcacgtaatagtatacaccgtaccaagattaatcgtacagatttgggaaagggcacatctgtttatctattctctagtcgatgtcttctcctctgcatcgccgggcctccagctctgcgcctttggggtctgattttggacctgcccatcacgaaccctatcccgctctcccccacccggcatataccggtctatttcgacaaaaccccgaggccgctcgtctgcacgctctggagaccgcagtcgtcgacgaggagagcgacttcgatggctagtaactgggacgtagcggtcgatgtccagcaagcttggggaacgccgtcgggagcgagagcgatctctgtccctttccttttctctgccgcgatctcgttctcggtctctctcgcggtcatggtcgcaatctttgtccttttctgtaagtctctccctatcccggtcgcgatcgctggctctgtctcttcccctgtctctttcaacagatcgttcacggtcacgaccccgatcgctgttccggtccctttccctgtctaggtctgaatacctatccttatctcgatttcggtcgcggtctttgtcgcggtctctttcatggtcccgctccctatcccgctccctgtcccggtctctgtcccggtctctgtgtctctccctgtcccttgacctatccctatctctggacctgtccctatctctagaacggtccctttccctgcctcgatcccggtcccagtctcgatctcttgacctatcccttccaccgtctccatctcgtttcctatcacgatctcgatccctgtgggatagacgtggtgatggtgacgagaatagtggctgtatcgtcgacggt

SEQ ID NO: 13582 - DNA, 224 bp, Emericella nidulans
gtaaaaaccgccccgggctgtctcgaacaatggatcatgccaatcgggatgcggttttttctccgaccactttcgatatcaggcatgagggcatatttagacctctgtcacgctaatcaggcagggcccacattctcgcattgcatcagatatgtggatagctagaaatctgaacgagccggaattgaccatgctggcaacgcttgtgagatgagccgctgtat

SEQ ID NO: 13583 - DNA, 1567 bp, Emericella nidulans
acctcatggcgagatctctcctcatgcctgggtaggcattgcgcttataagtgggtttattctcatgtaccttatcgtctaaattcccgaatttgcatcgccagcgaaacctcaaagaccgccacatcacatatctttggacaacctgggctctgggcttcgccggaattcatcgccgtcccgggatgggggccttttggctgccgcgcacagccaacgaagcagtcatagctttgcgacgactactggtctagtcattcacgcagcggctgatggtattgctcttggggcatctacttccgacactggacttagtttcatcatctttctagccataatggttcacaaggcccccgcgtcatttgggcttacatcagttcttctcaggcagggcctttcaagccgtgctgccaggacgcatttgtttgtttttagcttggctgcccctgttggcgccttggcgactttcttgtttgtgcatctactagggtcaggaaccactgatgaggcaagtgcacgctggcgtacaggggttttactattgttctcagctggcacattcctgtaagtcaccagctccctattgagtatccccagtaactgactcctgccctgaagatatgttgctatgcacaccatgcaggaaaacagctcaactccttctcgggacttgccagtcaacggttatgatgcgagggaagtagcgaagcctgagaagtccaccagggatctgattgcttctgtgatcggcatgatactaccgctctttctccagatcgggcacgctcattgatctgctcggcactgtttctgcctctgtctgtcttgcagtgtcagacctcctagaatgaattagctagggcagtcgatatgcttgcatttgtctgacaactagaattttctcctttaccggttcttgattacgtccttaggttgtgtaagaatagaagctggacgtggcggcgttctatatccactcctggcataatctgatggctgttgatgaccatatgtggtgtcagtttctgaaagtactacagttttgatcctggaagaccagggtggtgatgaaattatgtggtaaccgtaggaagatcaagttcgttcagctggggcgctgaagcggatgccaagcccagaatacggaggacatccaggcctccacgtcccatagcatgtacggtctttagcattatagagggatcgctgtgtactctgggtatacgcgtgttaaaattacttgagtgacgagtctcatgcctcatgcaatgtaggaatagccttggaacttgattgcaagtgatactcaactccgtaaggcgtctcgactctgtggagcgcctcactggctaatcacagtgaccgttggaaggcccacccagctggagacggccatggccgcgggccagcacctgacttggactctgatgctgctcgatcgagactctttgtaatcaagcctgcgtatccgttgcgtcgactcccctcgtggaatgaatcgctcagtctgccatggttcctgcgtcagaggccctgtgcttgacagtaaagaaaaatcgtagtgcta

SEQ ID NO: 13584 - DNA, 960 bp, Emericella nidulans
gtcaccggatgatccgggatatcctcgggaatgacgcagtggcggattgggcttcagcatagcatttcctggatactttacttcgcttggcgtatagtaacaagtgttcttatatacttttgaagttgacgtggtatgattgatcatatagctcaggaagttccactttgcagaacgttttcaaaggacactgaatcattagaatcatgaggtaaccttgcatcacgcatcggttcttacgttacatccagagatttattacttgatatctcagtgatacatctgcgtctgacaagttaagaatgttcattgtcaagtcctatgtattgttggctcagggctgagtgtccatagcctttcctgcccgtttggtgtcggcagccttctcgaaaatgaaatagatgatggtatatagtttcagtttgaggtgctgttctggcaatctctccttgattgctcagcgtcggaagtggattggaaaatgccttagaatgccctataccatggcagatcccgagggtgcagttacgcgcaggctgttacgtgattttcttctatttcgttgcggcagaacatttgcgtgcggctcacagctataaactagagacagagcttatgggagagaacggtacatatgctctagttggtagagctcctggaatcagatggcatgctgtttccagagaaggatgcaaagattatgtttatcattcatttgggccagtttcacataaccataatacgaaggcttagcggcctgactaaacgaagtatactatgtttcctatgtcaatagcttatgactgaacacgatatatgaagtgaaatagacgctcaagtccgtgacagggagattttcacttgaagggacggctccagtttcgcatgcccacacagcatacttataacacaatgttggctagcacaactaatttagagtgtctaagagatccagtactg

SEQ ID NO: 13585 - DNA, 549 bp, Emericella nidulans
tatgttaacacatacgatttaggtgacactatagaatactaggatctttgacgcaatatattgcatcctccacagcttagtcgtacttagacgaacctgaacacgaccgcctaatacggatcatcaggggacctttcatgacgtctatgctggactcagactcatactcatccatatatgtgcatggctgcagacggagagttccaaacttgacctaggccgcatctgcgatgttagccgctacactgccgtcatagatgcgactgttcactataaggggacatagtcctcactactgcctgcttcaccaagcgccggacctggatctgcgagcatcgctacaccattgactagcgtatgggctcactgtcgatgatcgatctgactggacacatactagcttgcggcgtagccatcatacgctgcaactgtggcctgtgcctgtactgtcgaggccgacatacagacgccttctgtccagcatgcttcgctagatggacgcaatgagggcttgcaagaacgccacatgtcgaaccgagatgactcacg

SEQ ID NO: 13586 - DNA, 542 bp, Emericella nidulans
gtgaaccccggcacgggccctttcaagggggcgcgtactcaggaccatgctctgtttcattttgtccggacatggagctacagtataagcgggaccctgtgcttgtggggcgtttatttaaaataagaaacttttctgcaggtcacatacctcgcgaggtgcagcagatatgtgctgcactataaatcataacttcttaagaacatgcactaagcaccctatactcaccgccactataaccaaaacatgcctacccctgcccaacaaatgctacagatcgaacttaccactgctcggaggatcagtataagcgtagatccacactgaatggacccctgggagatcaatatctgcaatctcaacgactgcacagtgtttcttctctgagcacacctatgcatcttctttctggtgcctccatccagagacgaataggcggccatattcacacatagaccaaagctgctactgacgactggcaaccctacggcgacgctaaccgattatagataacctgggactccaacagatgttgctgcatc

SEQ ID NO: 13587 - DNA, 920 bp, Emericella nidulans
ctaagatccggccgcaattaaccctactaaagggatcaagaggactcttgctacgccggcagtctggctgctcagcctgtacttcttctttttccttggagcagccatcaccgcgggaggtatgcacctctgtcctctacacaagcagccgcattactgactgaacaggctggatcgtcgagtacctgttcacgtacgcaacggtgatctcgacaagatgggctacgtgccggccgggttctacagaggcagttttatcggtcgcctggtgctcgccgagccaacctatcgattcggcgagcgccgaatgattctcctctacgtagggctttgccttgccctggagttggtcttttggctgtgagcgcgagagttcgaacgaggattcgtgcgtagctaactgaggaatagggttcctaatattatcacggaagccgtcgcgatcagtctactgggactcttctctggtccattctttgccacggtaggctcgatcaagctccctcggataggaccggctaacagattagggcatatctgtcgcatcgaagctgttcgcagcagagatccgttcacccgcgctaggtacgttatccttttcctgaagactaggcatgttcagtgccgctgacaacggcagccttcatcttcctcatgggacagattggaggatcgatatttccggccgtcaccggcgttattgctgcgcggtctggagtcaaggtcctgcagcccatgctggtcggtttgcttggagcaacgggagtttcctggttgattataccaaagccgcgtctgcaccacgattaagccatccagtcctagcagtcagcatgctagagagtatgaggtgcaattatatggccaatgtacttatgtaggaaacttcgagctttgcatgcgccatgatcgaagaggtc

SEQ ID NO: 13588 - DNA, 1225 bp, Emericella nidulans
acgatttaggtgacactatagattactaggatcaatgttggcaagacgcgacgatggaaggtcaagggaaatccccatcagtttggcaggtagtacgttagccctggctgaatatttgttgtataagatgttatatatcaagtagtggaaaaaggatggtgcgagttcgacgctcggagagagcacaagaacatgagacaacgtcgggtctctgggataaaaagactcgaccgcacgtaaagaggcctcatgagagctcatctggtgtgactggatcctccggcgaatggtgattttgctagacattccagaaggccacttcattttctcaaggaatcgtagaagttcaaggtcgacttgagaaggaagttcaatagtcaggcctgggctgaacccaagaaaatctgcccgggtgagggaattgatcaatctgataaccgacccagcagactccggcgctgtgtaaatgaggaactcgacgttgatgtcattccactctattgtatccagagctatcagcagagagttcagattacaaatttaggagcgcggcgcgtactttgaagagcatggctgtcaagattagccatccacatcaggtctcttgctgctcgaggaagggcaattgttggcatttcatggtccttagcagttcgcatagctcgcaagaagaattggtcctcgaaggtctccccttgtgtaatcaggacctggggttgaagatacgcccgtatgtacggcaataccgcagctacagcttgctccatgcgactatctgtagaccaacgagcgtagtcaacacgggcatctgtttttagaattgacgtattaacatgggcgggcccaaccacgtgaattgaaggagagggctcttaccatgccaattaagcgggcagatctccctattctggccgttgacccgttggattccctcgatggagacatcgtctcttcccattagtacaaagtgtaccgcgtttttcttctgaagagccatgcgacacgcgaggggcaacaggtcagacacactccccaagcttgcagccgcgaatactgttgcgctgggagggctcttcccgccattgtctgagaagagcttcagcgtaactgccaagttgtaaaattgcaatttcccctcgtagtatagtccgtccttctcgttggaaaaagactcgacgcgtggaggaggttcagactgagttaaccctggcgggacatgcacatc

SEQ ID NO: 13589 - DNA, 891 bp, Emericella nidulans
ctatgtggcaagcccgttccagcttcaccgccgcccctccaaaggattcccttcgagctgacagcccagaccgtgcttcgcctaaaccaacgaacgggatggatcgtgccatcgcggaactcgtcgacatgggcttccccgcggacaaagctagccaggctcttagaatgacttcgtctggtactgatgtgccggctgccgttagtatcctcctcacccaggcgcatgaagagtcccggcaaaaatcccagaacagatcagctcccattgatcgccgttccgatcagtctgcgcagagaccagatcgagatatgccttcctggatgcagcctgagcgctcgcacacacccaaaagccgtaatgaatcccgttcgccttcttctacggacatggatccgtcacagattgctgccaatctcggcaccagtttcctgaagacagcaaattcactttggaaaaccggcagcaagaagatgcagcaagtagtcaacgaactcaactccgatcacgatccgagtcagccgaaatggatgcgagaggcttctaattctgaagctgttcctaggggacgcgctcaacagccagcccgcaatgatctgacggacgaggctcttttgctcgaatcaggcggtccaccgcggccccgccgtaaccctacacgtgtcgacgaggggccagctcctcgtgcagggagcgattctcggcgacaagaaagtggcgagaggcgtatgcaacagcctgccttcatgcggcaacagtctacatcagagcccagagatgtaaagtcacggttgtcaagatttgcagctgaagagcagtccgcacaggcatacgttagtccagcgcgaaggaaacggccagttgctcaatcgtcagccccagcaagcctcc

SEQ ID NO: 13590 - DNA, 607 bp, Emericella nidulans
tacgatttaggtgacactatagaatactaggatcagtcgatctctcagacactcgtgaccttgaatctacctgctttcatggatgcccgaggatcaatgactgcaccaggggacatgcatactaatgcttccagcgtagggagtgtgtgcaggatatcccgcctgccagaggagactgtataccacgcgctggccgatctcgctatgtatagtctgtaggcggctcgtgacggtctgtactatgtactcaagagatgaacgacgcgtctctctgcatgaatgatatctcagcccactcgagatggccagcgagcctgatactaatacacacattttcgttctgaatatcgttgaactgcatctggaaaccagctgcgagaggggccccaacctgttcatctggatgtgcactctttgagtcatagagacaccctggcgctgtcgaagctcatgctgaagtctgtccaggaatgagttacctgagctactatgatgtggcttagatacgacgcttgatcctatcagcagagaccccgactgctctctcgctggacccagttagcactgatcgcagaatcttgccaggcggctcgacatgcgataatca

SEQ ID NO: 13591 - DNA, 480 bp, Emericella nidulans
tatgataacacatacgatttaggtgacactatagaatactaggatcaatgcgcgccatgacaaaactcaggaacgattgaagtacatcaatacattccgtgtcaatcatgaacagcttcaacgcaccattgccaatgtccttggcccgaaaagctattctgccgaagatgctgcagctggagctgcagccgatggtgccgtcattgtcgaggagatcggcgatgttgacgctgttgaggaagttgcgcaagcctacgctgctctgaaaagcgtacatgtgctggatgtttcacccacaggaacccagaactggattacagcagagattgcctataatgagcgcacgtcccgggtggagaattccattattgcccgcctgcgtgaccgtcttgctacggcaaagaatgctaatgagatgctccgggccttctccaacttcagtgcactccttgttccgcccaagatcaggaggaggcattg

SEQ ID NO: 13592 - DNA, 356 bp, Emericella nidulans
cgatttaggtgacactatagactactaggatccaagattgccatgcattctcgtggccgccttagacaatacacccttgcgtctgcgggggcacagagagggagctttgctgcgcgtacaaagggcaacgcccaaacgagcagtggaccctcacgctaaatgaccgtaaagcggggcatcacagacgagctgctggacggcatgttgccagcacaccacagctgacggtcgcaactggcccgacaggactgtgcagtgcgaagctgcatatgggtaggcataaacaagccggagaagatgcacatcgcacgggctagcagggccgacggccagaacacaacacggaggacgaccca

SEQ ID NO: 13593 - DNA, 743 bp, Emericella nidulans
gctaggcttattgacagatatatacgcgacatcgcagtagtcacagggccactgtttatcaggatcagagcattagaaccttgattgacctgaagtaattcgtgtcaccagattactgtccacaaacatgggcaaggtcattttaaccaaataccaattatagatatgtgcgtacagggagcctgaattgatgaactgcaagataactcaaatatggaagtacaaacaaatatatgaatcctcggttgcaatgaaccggaaacacattttcctgcccacaatgagatgtgcgagtaatgctggacatgaatgtcaagttggaaaaatccccagcgccggactaatgctcatagatgatgcaaggttgcggtgatgacaaaagatagaagataaggacagcttgaaggatggtgattggatctaggtctaaatgcaggttttcgtgtgcgaatggccaaaaaaaaaaaaaaaagaaaagtagacgtaggaagtgatattcaaggcgaaatcataagcctgaaaaacgaaaaagcgagtgtaatgtgaatatagaatcgagagcgctcggtaggatgatgcataatgattggtggaaacctcaataatatgtcgcattggtgccgacatggctctgcgggttgtgtgggttggtctggtacatggcagaacttgactgcggaggttgcgaagggtactggctaaaccaagactgacgtcgaggttcttctggtcggtaaggttgg

SEQ ID NO: 13594 - DNA, 1349 bp, Emericella nidulans
caactctcgaaggctttttctgaactaggtattgagtcgttgacgcaaccggcataaatttatcccaaacggcgtcgctcagaagggatccagaaaacatcaactaccatgccttagaaactgaaactctaacccggttggctgaccgagagaactcaattcgagccactgcgctgcttcaaggacttacattggcctacccctacatgaaggaagttcagcgtttaacccatttcctcctcgagctattcgcttaggcatgagcgcacacgagaatccggaagagtacgttgagaagtatatcgggtacaacttcacatccacagcattctcgagtaagctgtgagacagcctgagaatagacgtttgggcatgctcggcgacaaagtaattggaatggtggtcctggacgcctggtatcggacgcccgggctcaactgcggtatggctcgaaggcaacatgattttgttgacaatgtgctgatgaagcttagagcggggaaacaaccaaatgcagttatacggcagcaatcgcgagatggccgaggaagctagacgcgccgggttcgacgatttcgtgcatccggaaatgaatttggtttattccagatactacattcatgaacttgcaaccgaggtcgaggctattgtcggtgctgtatgggttgattcggataggaactgggaaataaccaaagactgctactcgcggattcaatacgatggatggcgaatgaaaggtgcgcactaaactgcacctgcaccaacaattccagtcagacagatggcgcggtgagtgtcgagtgctggatcagcatggttcagtgcttgaccctcctcggattacaagacatctaaaggtaacattagctacctctaaatgtctgtatcgtatcccacgcatctgaaggcgtcggaacattggtatatgatatcaccgttcggacagacttcggagagcatggtctcagaatacacaactatcaacccaaggttggcgctgagaacaaacgatggcatcttcataaccaccgttcgtcggaagcttgagctcttcaattttggagacgaacttgactcaggtaccttaggtatctgagtcatcaggtagtagcgcttataatttccgtctgtctgctctgccgccattatgggcatatcaaaaagtgcttgatagttgttcaattggactgttgatggactagcttacggcaccaacactttagtaaaacgtctgatatgaatttctccgtacaaattgaacctagagtaccataatttcccaatcctgctctatcacctccttccaagcgcgccgatatggctgactacagtgaacctggcgtggg

SEQ ID NO: 13595 - DNA, 557 bp, Emericella nidulans
acggatccaatgcaggactgtcaacaaaatggccctaatactttctaggtgaccgaacgaccaggacagggggatgtccttagcgctgttggttccagatccagcatcagtgcaaactggaaattgaatgcactggcgcctttcattagacagagtcttgaccagtaatacaccaaactatatctaagccatgaagacttctcggcctcctagggaccatacttaggcctggggggcactgaactggctgcacaggcctaaagaccagcgacagagcatatgaactcgatacgctaaaaacggaatgtaaaacacggggtaccaagcgtaccggatccatagcgccgcggaccaaatgcgcctagagaccagaacaaattgactcactgtcctcgggaacaagcacaagatttgagctgctgaacattatgacccactaagtaaacgaccagttttcaccccaatggattccgggtattgaagatactagcttgacgttatgaaaggaggcaaagagagctggagtgtccaccacctgaccagggttctaggcgcac

SEQ ID NO: 13596 - DNA, 348 bp, Emericella nidulans
gggggggacgtatgatatgcacatacgatgtaggtgacactatagaatactaggatcatacttgccggatcctaccggggtacggcctgatttatgccatgacaccgatcctgtgtcccatggcaacagacctgcgaataccatacccactgtgtcgaaagaccagagcggaccacccaaagtgcttacaacggcggagtgctcacagccgaactgattgtagactctgtgcgatcagacagtgggagcctcaccaccagagagcgacgttgcgacacatagatggcctagcatgtctcctgcgctcgtgtgacagacacgcctgcgatggttggatcacactggcac

SEQ ID NO: 13597 - DNA, 533 bp, Emericella nidulans
  unsure (1)..(533): unsure at all n locations
gttataccatacgatttaggtgacactatagaatactaggatccagcggctcgttttccaaaccaagggagccatgattcacacccagaagacgaaccttgccgatcttaccgccaaagtcatcctccaccttactctgccaattctcaaagagttgttttaaccgttctataacctccgcctcgtcacgaagcaagactgcaagagcatcatagcccccagcgcctggaacaacgccaccaaccaccccgtcaacaccggaaatagcgtcaagtaactccgtttgcacctttggttcaatgggaacattggttttgctagtcatgctgcggatgtggctgcgagagcgctggagtaaactgtgaaccttgtcatagcctttgtcggggttctgagacagctgcttgagctcgagaacaagcctnttcattatttgattgaagagcggcccaaagaaggtcggctttctgcttattttgcttccgccactccaacaccttcttgtcccttgaccgggtctgcgaccacattca

SEQ ID NO: 13598 - DNA, 131 bp, Emericella nidulans
  unsure (1)..(131): unsure at all n locations
actactatagggagacccaagcttaggatctgacactctgcagataagacaatgacatcgggcttgggtcncctcngggctgtgactggacctgttatgacgaatacgctcggcgggggtggagatttcgg

SEQ ID NO: 13599 - DNA, 530 bp, Emericella nidulans
ctatgatataccatacgatttaggtgacactatagaatactaggatctcgactgggaagagcagcgccataagatattcaaacactttgggttgtcccaaaaggatgagccagccgaaaatgcagggccgtcatttggacgttcgacaaggccatccaatcagtttgggcctgcggcgactcatggtgtttctcgaaggagcgtcttcggtcgatcaggctttgagaagtcagtcattggaaccccgggaaccggaaaatcgagccatcagcttttcgacgacccgatggagcgtaccgacggccctaacactcagagtctggaccttcgattccttcgtgaaaaaatgggttattatgcggacaaagttcagtcgttgaattccgctaggctccaagcacgtagctttccgatcttccatgagttttccgaggttgaaaaacacgctggcggtgatgtaagtaactatacaccagggtttgatctttcatgaactggctgacttcctcaggttcctcatcagctatatg

SEQ ID NO: 13600 - DNA, 463 bp, Emericella nidulans
acactactatagggagacccaagcttaggatcttgcacatttatctggggcgaacatgtaggagcggcagacccattttattactggcaaggttagtgcgccttaaatagcaacctttgtgaccatggtcccataagtgctcaggggagctacggatatatcaaagacggtatgggatgacgcaccgctcagccagaaaagaccgtcgagctgtgcccaaggacagagggtaccgaccactagatggtgttcaatgcccgttgacctgcaagctctattacgcacccggacggcagggaattctactgagcacagttaacaaactgagcgcactctggattgacgaacagctcgagactgatcgaaggacagacagtcagatgccatacagacgggtccgtagtcaaatgacccaagactcgcaacgatgacacacgaaacatggctacttggatggagatta

SEQ ID NO: 13601 - DNA, 541 bp, Emericella nidulans
gggggctgctcgcggagccgtcggcggtatcgagtgtatcatatttagagtacaggggcgtgctctttttttaccccgagagcgacccctcattgtgacggtggtgggacctcttggggggtgggttctattgaaaggaggttgaaggtgcctactaacaagattagggtcttgcgttgggggttagaagatcaactggataggggtgatattggatttctgggctctcatagtggccagtacccagggggtggtgttgaaggtgattggcctggttcatgatctcgcggctgccaaacacccgtgggccattcataggcgacacgagcttaggtcagcatgattacagctgtttgtgtgagggatatgggtgggatgatcagggggagggcattggacttaggtttttttctagtgcacgggtttagatccttaactgctcaggaaggtagcattctagggccctctttcgtggtcagggtaatccctcccccatagggggttcatgggtctggcggccttttaaacatttggaagtatg

SEQ ID NO: 13602 - DNA, 819 bp, Emericella nidulans
acaacaccgtcgagcaaacctacatcgacagctgcgcactggcagaatgaaaacggcgccaaattcgccgtcttgccatcagccgacacggtactggccaaggcgatcgggcgcggcactgtagccgaaaccaagagcttgtagttgagccatggtccgcggccctcttcgtaggggtcaatcgtcacatactcgtgctccttccattcctcgttcgatgcaccactaccggccttccagtccggatttggtgtcttggtgaaggtcatctgggatctatggtcgaagggagggcgtgccctctcgaccgccccgaagtcggcgtgggggttgcgctggatggcggcttcgtgactcggcgcctcgagctgttcttctggcatcgtaactgtgttttgaagggagaatagttcaatagctgttatccgcccatagatatataatactatcaattgacgccaacgcaatcgtgataaaacggccaccggcagttggccgatctctaggccgagtgggggtgagccgacctcggctgctgataagataacactcggccattagtaagctttgatcaggcacaaatgactcagcaactcccgtgactcttcaacacgtgcctttacgcccgccgtacttcgcatcccgtatttcgtatttctgcaacaagctctgatctcccagcccagtggccctgcctagcatgcctggccgacgccccatactaaatcacgggccgggtgcagcgatgcaaggagaacacgtcaagtgtgatgaggtctgcctacgtgcggtgcgtgcggcagatatggggtacgtgtg

SEQ ID NO: 13603 - DNA, 1242 bp, Emericella nidulans
cgcttatgaatttcctgaattacccgactggcaagtctaacactcaatagccatggagaataacttctgattttagaattgttcacaggatgggtcaccgtgattggatggcaggctgcgttcgcctcggcctcgtttattgccggtacacaaatccagggtgccgtgcttctctctcactccaattacgacgcccagccctggcacggaactctcatcatgtgggcagcagtcgtgctggcattgggagtcaacgtggctggcgggaagcttcttccgcgactcgagaccgtcatcctcgtcatccatattctgggcttcttcggcatcctcattccgttgacctacatggccgatcacaagtccaagcatgacgtgtttctggactttgtcaacgacggcgggtttcccacccaagggctgtcctggttcgtcggcatgacgggctgtgttttcgcttttgctggaggtgatgccgctgtgcatgtatgagcctgaccctcttgctcctcaaggaggatatgataataccagatctgacaaaatgcacccatagatggctgaggaagtgcgcgatgcgtctgtggcaatcccgcgcgcgatcatgctttcggtcctcatcaacggatcgctcggattcggcatgttgatagcagtcctcttctgcctgggcaacctcgaagaggccctaaataccccgaccggctacccatacatggagatcttccgtcaggcgacggattccgtctccggcgccttgggaatgacctcaatcatcctcattatcggcatctgcaccatattcggtcttctcgcagcaacatcccgccagttctggtcgtttgcgcgcgatcgtgctgtccctggttggcgcatctggagcaaggtatctgcctacctacctgactgcttgcttgtttatgacacttaactgcctactaacacgtcgtctcttcattcaggtctcgcccatcaactgcctccctacctactcgatcctcctcacaatgagcgtcacctgcctgctgggcctgatcaacatcggatccagcgtggccctgaatgcggtcgtctctatgaccgtgtcgggtctgtacctatcctacctgaccgtcggcagcctgctgctttggcgccgatgcacgggcgcaatcacgcatttccagaatggcgaagacgaaagtaaataacgtccccggcgcaaagcaggtctggggcccgtttcatatcggcggtatttgg

SEQ ID NO: 13604 - DNA, 554 bp, Emericella nidulans
gaacaaccgaccccgaaccctggatccttagatccgataggatccccaattccatcaccattgctgtcaattctctcgtctaccaacacaagactaaagcacccagacttccgaaggcgcgaaagatgccatttggaggaagcatataggatatgtcttcgcaacctccgctctcccccttagcgacgtggcgtcctggacgagttcgggtgattggctggataatctatagactcatcaactcatactcttcacataccatctcataggcagaaaacatcgtcaaaacgtttaccattactcaatatttctgccccaaaggcgtgcatgacaggtgagtcaacgacgctgcttttgaatggcgaatgccatgttgaaagctccagctgagccgtatggtacaaatactggcactgggcactggtgtatagccacacgccgagacctcgggattgttcaggttcaaaggactgtaacgcacatggaacacgttaaatatgcgcttttcgaagaactaactcgtcatcatggataaaatcagcgttagattggta

SEQ ID NO: 13605 - DNA, 490 bp, Emericella nidulans
tctatgataacacatacgatttaggtgacactatagaatactaggatcgatgctttgaggctaggtaacaatgcatacgttctatagatgggtgtacagagagaactcccaccactcgatatataaatgacatcctaaatggctagcccaaccgacagggctaaatatgcacctcagagatcaaacagtacacaccacccagtcccatccgaaaacacgaacgccttacacaagcgactgttcacacatcatggttagagtattatctaggacgaaccgatgaatcagacaactattggtgaggcgaccctgctggtgcacaaccgaaaacaacatgcacaacgccccaacatgatcaaagagcggcagaagcgactacaccacatggttcaacggctgcgactgggagagattgtcagcgagagactacgaccaagcctctcgagccggacagaacaaactgcgacattgtcgatcacccatgaacaag

SEQ ID NO: 13606 - DNA, 924 bp, Emericella nidulans
ttttctcctcccattctgcacctctgcaacaagcctcttatactttcgctcatattcagcgtccttctccttcttctcccgcaacttctccctggcaatgaagtttgcgtccttgcggagctcgcgcatagcacccttgcgctcacgcttgtactccgccttgagccggttaacctcagcccgctcacggttggggtcgtagtgcttgtcagggttgaacgagtcctcgaacttcggaatcgccgttttgacagcaagtggtctgtggttgtgcaagaggagtggccggcgtgtgaggcgagattgagagaggacagtggagagcttgtcgagggtggattggagcgtgtccagagcggcggcagggatcaagggattctttgccttctttgctttcttgttgacgtcgacgcaggaactcgagacgtgttgaaggacagcctgtgcttggttgaagatctcaactgaggcggacttgctggaccagagatcggatgctgtattgaggagggaggaaagggttgtgatgagggagagtttaaggtcctctggatctatttctgatcgtgcggatacgtccaaaaactggagtttgcggatgtttagaggttttgaaggtctgatacgtaggagttctgtcggttggcggagagggaaggatccgagcttagaggaaggctctccaggactgagaatacacagcgcgttaaggacgtagttcagaaactcgggcatgtagcgcttagagatagtctggtactgcaaggctagactggcagcgtaggtgcccgtgcacaagtcagacagcgagttgacgggcccttgtccgagataccgagcaaggcagagatgcgctggtgtagatacagcgtggaagtggtccgaggttgggaagatagtggcgattccagtgaggatgacacg

SEQ ID NO: 13607 - DNA, 977 bp, Emericella nidulans
gcagtatgttcaagtgttaattttgagaagctgtctactactctgactatctatataacataaatggcaggtattcatgacccgtcgcgccattcaaggtacgagaccagctcgattctaggcattcatcctttgtcccttgacatctgaatagcatcaccgcatcattgatcctcaatcgagctatcatactgcgacctgccgagcgattggagtccacctaattctatcgatgcatcctataccggcccctgcaaccagttatgcttgcaaaaccaccaaacaacgaccgcaacagtggcaacaaacagtgcaacagcgaggcagataatacacccccagagcgcgctcttccgtcgtttccgtcgttggctcgctagccagttatctctgcatgattgaatacattagtcacgatactggactgaaatcttgcgttagctgacgtacgattgctctttctcctcggttgtagaacggatttcctcatcgagatggacggcctgggagaagcgctgccagaagaaagggtcccggactagagccattctggaggtatgtggccagtcattcgtctttgttcagggtgtcgtcaaatttgctgaatggacgatatggatcacgcagtgcgccggcgggttgtatagatgctgcgtgagagactcaagaagcgcttcgtatcgagtaagaaccaagctcagagatggaggtgagtcgcgtctggggaaggaagacaatctagatgaagggagcgtgtagtcgacacgattcagtagttgcttgataatgagctgcaagtcaccaaactgcaccacgcacccatgtctatcccagcctccgtcagatgcggatgagcaagacgcgcgcgcgatgggggcctggcattattatatagacctgcagagtccgagatgcccctacattccagatatcagggcacagtggcgtgcacattctacaggtatctctgaccgtaa

SEQ ID NO: 13608 - DNA, 611 bp, Emericella nidulans
  unsure (1)..(611): unsure at all n locations
atgatgcccgatctgtcgtggtattacttcttttctgctatattgcgagcccttacaatgccacggcccttttgtttttcataaccttcatgtggtacaagatccacctcgggattttgcagtctccaatgagctgaggcattcctaacgtcagtaatctgaagaaaacggccgccagcttcaatgagcttttcaggctcctctcggaatttcatataaatggaagaaggcaagtagcctttacttgcttcccttctcacaaactccatgagtcctgagggccgcttaatcttgtcaatatacaggagatcatgcgagtgctcgtgactgcttcccggagttttggctatggtgactgtcgagtaagccccctcaaatctgatgaccttgatttgaaagttgcaaagccccccttctcgaatctttctctttctagggcgcttgccctctggtaaaagccgtgtcccagagcttcgattcgttccctgcttacgacgaaggcgacagctcanatagtcggtagtgcaatgcccttctttgtagaattgcttctttgttgacgtacacattgtcaatgaaaggccagtaggtttcgactcctgcggctaact

SEQ ID NO: 13609 - DNA, 455 bp, Emericella nidulans
gggcggtgaccagcgctccactggcttcttctgatcgaccttggcttttttcgcctgctctcctaaactgcacctgggggggcttactcagacccatgggttgcatatctccaatccacaacatctatgaatgcgtttgcctgaggcatctgcctcgaatgctgtctaacgccctcgtactggacatggcctctttcacgttgtgtcacctatctggactgagctcactcctgaacaacggctacccgtaaacatgttatctacccacctagttcctcggtcgctctaatgtcaagctggtggaatgatagttgcattctgaccatacctgcggcgcaaaggaggccaatccctgtcgctgccagatcaacccccacagctaggatgagtcacgcattgacttttatggcttactgtccgatctgtacgctgccattggtactcgttcccagatg

SEQ ID NO: 13610 - DNA, 319 bp, Emericella nidulans
atcttacgatttagttgacactatagaatactaggatcaaatgctcggaccgaactgaagcgagcgcgaaggcgatatgacaaaatactccacaaatgatagccaggacctagatggatggacgaggatggatgaacatagtgaccagaccgttaacacacggatattacgtaacagaatgtgtgagacagacaacttaaacaagctgggctccacaacaccgcggtactaacgtgctgctgaccgtacgggacgaaaggaccattcctgctacatgctgacgagcgcgtcaagcgccacttgctatgctaatctgggc

SEQ ID NO: 13611 - DNA, 1742 bp, Emericella nidulans
gaaagaggaagaattcggctattcccccccctaaaaaaacaccccttggggcccaatgtcaaaaaacgcccattaagcccgggttagtaaggccaagagggaaattccgttttcagccaggaaattctccctaaagcccctgagccttcaaaggcccgggcaacaatccccccttaaagcggcctagcaaattcctaaacttcttccaaagaagtttgaagtccagccatgggtaaacttctgagggccgtttttacctggtccgaaggacccaggttcagccttcaagaccgaccgtcgaccaaacgttccgcccagtgcctcagatcaacagtcctggatctcgaagggtcgcctcccgaaaacgcctaaaaccaggccacgttcagcgcctccagcacggtcacacttcaacctttgctgtttcagccccgtgacttggaccatgttgactccctcgctgtcacctttgtctttcattcgccagacaccaggaatcaccgcttcaaggcagcgacaatccgcgcatctatgcggtatcccggctacagcaacagaggcagtgtaagtccccccgggcctcatcgataaccaaaccacccgcacttcctcaaacacgcgccgcactttctccacggctccattgtcccggaaactctgcaatggaactatagtctttcaggctcgttaggcgtcgcacagctcccgcttttcgcatccctctcgccagcagcaggtctgaatgggcgcttcaaccgctatgagatgatgcgtattcagggctctgtgcggagcaaaaacgggatccccgctagtcagatcgtatggactatggaggaaaatactctgcagcgctcgggattaccgcgggaattcacgttcgccatgttgattgcgaacgcgggggctgagagccgggtgcagtttgtgcttgagattgagcccgtgctgcagtgttggatcttgggccagtacccgggctggtgggtgaagctgtggaagagatatcgagccgctagacggaagaggggtgtggattttcgggttagtattgggcagcggtttggagacgagttgaagccgagatcgcacacgtattcggggctgtcgaggagagggttcaattttgcgaagttggttgctgggttggacgagtacgtaacattatcagggggcagggttatggtaagtcccagctgtcttcttgacctggcccaaggagcctaaattggatgctgatactgtgataggcagcggctggagggagtttcattccgcaaaagccagacagcacaatgccactgccgccgccgatagaagacccagcaccggccccaaacccctacccattgccaatgccatatccaggccagcgaccagtagacggagtcccatacccttttccaatgccacctggacaggtttatgagccaggacgagcccctgagcaagaatcacgacaaccccgtcaccaatcccgacgacaacactctacacctcttcgaccccgcgaagagagagcatgggacagagaatcgagtgagttgcatacgatcctaacgaatgcaccgaatgtgcctgccaggaccagcagcagcggaaagggcaatactttgcgcgccaagtcacggcagggatatcggcagcaatagaaatctggcgatgattcctttaaccttaattggctagggggcgtggtattgaaggagggctggataagttgccggtttgtttttacccca

SEQ ID NO: 13612 - DNA, 678 bp, Emericella nidulans
ccctcgcctcagtggatagcgccgacctgggctcgaccagccgtgctctggatatgtccagcttctctatggaaactccggtggacgtgacctccgcccgcgaggctgctcagagcctgtgccaactgtcgggtcagaagtctactggtcaagggcaaaggcggcaatgccgcaaacgtggccggactgggtccgacgacctgctgctacagcaacatgtgcgcagcctcatccgctccgacactctagctgaaggaacagtacttccggatggcaacatggcagagctgcttcggatgtcgcagcctgacaacacttctccctcactcccatcgctgagcgcccttgggttaggtgcgcccttgtctggcccagctggaatgaagcgtgcttgctgcggtagcgaagcaagaaaaattgcactccaccctagcttgcgcgtcgactactgacggactgaggtttctgtcatgaagactctcatttccttatgcccatagcctgtttgaaacgcgtttctttttctgaaaaaaggaaaagttgctattactcctattgctattgcataatttctatttggtgccatctctgtaagtcgtcgacggaattgttcattgaacattttgtcaacggcgcaaagaaagggtcacacggcccggaaaagttctcaagaacttg

SEQ ID NO: 13613 - DNA, 453 bp, Emericella nidulans
tacgatttaggtgacactatagaatactaggatctatatgcggaagttcttactgcgtaggccgctggctatctgcaggctcagcacacgtatccggctccggactaaggcccatgatcctgggtggataaccagccagacagagtaatgctacctgatccgtgagacggagttggatattcaatatgctccgtaccctctgtaggggacaccaaaatggatgcggagggcttctccgacattctgacaatcgttctgccgcaggtgtatgtcggatgatgatgctgcctcgctagccgggtattaacctcgtcagttgcaagagggggacattgagtaggactctcgatgaccctgtctatctttcaagcgccaaatcaatagcacgtggggcttcatgtatgcggataactgcaaacaccagtggatgtaccgagtgctggtatctagaca

SEQ ID NO: 13614 - DNA, 441 bp, Emericella nidulans
catacgatttaggtgacactatagaatactaggatccagcgtatcgtcatcatacttccgcgggagggctcatttgtttacagtcgggaggcgcctgtatcgcttgtcgtgttgtaccggtacctccatgacgggggtacccgtctatatcctgacgtgctccatctagatcatagtggacgtactaggatattttatgagtacaatcggctgggctggaggcatgacgctgaatgagacgctggacataaaatccatcgcgccgtacaagagccttgacgtcgacgctgagacagcccaaggagtacttcagagatcaatggaatctgatactcggattgtagacgcggttccaaatgagatggcctagactgtaacgcttgctcttgccagcggtacgatctgatgccaagacggaccgcgatggagtggcagaaacgt

SEQ ID NO: 13615 - DNA, 889 bp, Emericella nidulans
gctgcagaatggttcccacctgcgattcgccgtcgggtcgccgtggtcgcaaccctcctcacactcttcgtcatctaccacttcacaattggctcggttccgtaccaaccctcttcaagccaatatacgaacagtgcacgcacaagctcagacaagaaacagtcacaatgtctgcctctgccaggtatcgaggacgttctcgtggtcatgaaaactggcgtcacagaagccctcgataaagtgcctgtccacttcaagaccaccctccgctgtatccccaactatgtcatctactctgactttgaggagaaaatcgatggtgtccagatccacgacgccttccgcaacatcgatcccgccgtcaagcaaaacgtcgacgattttcagatctacaaccgcctctccaaacgcgggcgtgagggcttgcagactcaagactttgccgacgaggcgaattcggctattggaaaaccgaacaacccgggctggaagctggacaagtggaagtttctgccgatggtgaaagaggcgcaccagtacaagccagatgccaaatggttcgtgttcatggaggcggacacctactactcatggccgacgctcctcgcgtggctgtcgcactttgacccatctgaaccgcattatattggcacagagacacagattgcggatgtcatctttgcgcacggcggatcaggcttcgtgctttccaacccagccatgaaactcgcggcggacgagtataccgagcgggctgatgaactgcacgagtacacagacgcccattgggctggtgactgcgtgctaggcaaagttctctcaaacgttggcgtcaacctatctttctcgtggccaatcctgcagaattcaaatatttgggagctggatg

SEQ ID NO: 13616 - DNA, 1186 bp, Emericella nidulans
cccgcatgcgttttcggtcatgtgatccgcttccagcctatgaatggcctcaaattcagagactatctctctactttatcgcttctgagccgctgttggcccgttccgccgcttagtgtgcgacttggtgggtggcagggcgccaacctttgtgacctggttggtggacgacgcctgcgacgacaggcaacgaacggccagcagtccagcacttgggcatagagcagggccaaacctgtctgtgctcagcatttgttgggttgggtacaagactagtcgcagagacgtgtaagtctggagcagactgtagcagtctgtctgaacgaaagagtgacgtggtcgacgaggaaaagaagggtcccctgcaaccatgatacaataatatggcgcctcaaatgcctcaagtctacggagcactttgagaggcctcatgttcagttgcacctgccacctggttccccctaaatatacagcatgtctgatacggaatcaatttatattattactttctttgtctacggctttcggatcccgttctttcgcctccgaggggaattaaagtattaaaaattctcttttggggaggaattgggtgctcagcttctgctcccgccctaaccaacctatgctccgtgatctgctacgtcaagcgtctgactatgatcatatttggtcacacaaacgatgtcagcaagtctgtcattttccgtcgcgtgatgtttttccttcgtggcaggctgaaggcagccccgagatgtatgcctgacctaaccctgcttgcttttcgcaaacccatgcattcagcccaccagactctccaggagccccgactgcgtcattgttcctgttgcaacccaagtgcctcctccccagtgcccagcgacgatcttacttccaactgccgccagccagaaaaagcaaacaccactattgccattaagcgttaaaactcaacttgggccggccccaggtccccacagatagtcacagacgatcaggttcaaggatttaggatctcgctgccggtgcgggctgccccggcaccgccacattattgtcgcaactggcaaattctccagcatacagagaatgaattacccggtcatgaaacaacggtcaataattctgattcgtcaacagagttccggaggacctatgtccggcctgtccagacaaagtggcaagg

SEQ ID NO: 13617 - DNA, 781 bp, Emericella nidulans
gccatcgcgagcaatctcagaatgcggcgacgaagacgatgacactctgtggatgatctcgcccaatgcccaggatcgatcgcgcgctgcttcggtcctctcgcggccgatcgcgccctcgcgccaggtccttttcaaatccacagggagaaatgagaactgtctctccgtgtagtcctcaagtcgtccttgaccctcagcaccagacacgccatcatctatgggattcgagtccgggtttatatcaattccaggaatatcatcgtcgtcctgttgcgccgtacttcccgacgtaaccaaccacctcgcccttccgtcccaatctagcgcaggctcacccgtaattctgcttaggagctgcggcgacaacctatttgtcaacgcagtccattccctccgcccttcctcctcctcctcctcctcctcctcttcttcttctaagcccccgttatcacctcgaccggcaccgctgtcaccaccacttctctgcaacgccccggcatccgctgcaatcgctgcagaaggtacccgactccgatatcgccacagcccaccggaaccccaggcactaccaatattagccctatagcgcagcctctcgcccatctgatgggatctcaatggctcaagagcttctgtgttgtcattccatcgccagacaagtatatcttttccaatctctgtttccgtgctgttaccgcggtctacgtaaaaccacccgcccagccgcagactcagccccgccgttgtaccggtgtacacgaaatgccaacctggcggg

SEQ ID NO: 13618 - DNA, 1609 bp, Emericella nidulans
ataaaacaagaaatgaacatgtatacaagaacaaagataacaaagcaaaaaataaaaatattaataagataaacagaagcgtagaagaacttataaaaaacaaagagtacatattaataaaagaaatagaagacaagtaagaatagtgaggaatagaaagtaaaaaggtcaaaagaaaaaacaattccacggttgcctttagcacgcctaaggtcaaccaatcgccgaactcagaacccgcgagggctcaggcaagcagtgacggagaggagcttcatcccgacgcgaaaggtggactcaagccggaatttgagggcgagaagaaccctaagactggcgagattggggggccgaagaatgagccgctgcgatggggtgctggcggagactggagttatggaggtcgtgttacggacttctgattgcatcgggacgggtggtattatgagagatgcgtctgtacattagtggcgttgggatcaattcgatatttttcaagacatatatgtgcagttgcgctgtataactagcctttgctactcaggacgtatttgtcctccggggtagcgtgtatatagatccaagagctctaggagaattgttattctggcggcttactgctcgagatctctgcctaatggcaactaccctccaaatatcaagaacttcaaagtgatatgcactacacagcaaaacgtgccaactatttgttcactccaaataaagaaaaatcgctagcatattcaagtgcattctcagtgattatacctgtgtcctctattttatggtttgcgaatagtcatgactataagcgtaatgtgcatgcgcggcgtgaccatctgagccacagccgcaagtaggtccagtatccggcttcatcgtcaacactgagggcgagtattctataagggcattaagcactacagtctaggataccgctgtgcatagacgtctttacaagcggtgtctgcagggaagctccatattggtgaccttggcggcgcagttggacagccctgattccagcactttctgagagggatgtccaacgttcccaagactgtcaaaagtccatgcatgaggactaagactgccttcttgcaggtcttcctactgaccaggaccagaggtacgtccaggccccgacctgcgaggaccgagaaatttccatcaccagacagcctcacacgggccgcgccaccaattgcggaagagtgatcgtccggtgccttaatggacacgcgggtagtgaaaatctcgtgtttccgaagcgagacgtgggagggcgtggcttagtggactgtgaccaaaagtgttagaaatgtggcggaagaaccagactcccatgagactcacaaggtcctcgaccaacagcaatcagcagatattctttgggcgatccagtccaaagaacggcgcacgtggaccaccgacgaaaaaagagtggggagtcgccatcaagagatcgattccggtacaaagacatttcactaatttaggaggggaatctgctcgtctgaccagcacgatctgaagtcaagacttgcaatctcagtctgagcgtgaagacgtcagtataaaggcgaaggagaaagcaaccgacgttgga

SEQ ID NO: 13619 - DNA, 687 bp, Emericella nidulans
actcactatagggagacccaagcttaggatctttcgcgacgagtatcagtccaaaaagccatgggatgaattgatcgttcaacagccggaaactgtctggcgggcgctgaatttggcccgttatagggcgcaggtaggcggagcggacatgtgttttcagcctcttcccttcccttctttttctttccttttttttctttgattactttttcctcttttttatccgcctccttttgtatttttttccttcttttctctttttatctttttttccttctatctttccttttttcctttctttctttttgatattactttctctcttttctttcatctctttcgttttttcttttaccctttgtttccttttttagtcttttcctacaaggttgtcttcttctgttcttctctttacccctctatttctcctcgtttccgtttcatttccgctatccccctttgttgtgtactctcttttctcttttttctccgtctactcttattattttttgcttttccttttattttcttctatcttgttctttccctgtctagttgtcattcctttactctcacttccatgtcatttctctttcttctttttgtctctacttctcctttattcttatatacatttttttgtactccttattccttttcattttcgttattgcatctcttctttcc

SEQ ID NO: 13620 - DNA, 1130 bp, Emericella nidulans
tcaattgtttgatgccaagaaacagaacacgatcaactttgttctcttgtctctctcgttccggatccaactctcccacgatccatcttgccgggggagtgtattcaaaccatccttccgcagcaaagtttccaactggctacgcaagtacaacccctcataatggggcgggtaatgctcaaaccaagacgaaactgacattagcataagcagtgactgaacggtctccagtatgtcctggctctgattcgcggatactgtcttgcgactcccagtccattggaggtcccgccgcatatgttccaaagtcacggttttagcgacatagaagagactgatgcttgtgtctggttcccggcaatactgggcacctagagctgccatggacaggacaagatgcaacggtgtcttctctatgttcaacgtgggaatatgaagaaacggataatggtcatggtatccagtaacatatcccgtaaggcatcgggagagggcatggcgcgacgggatattttggttgggtatcacattggcatagttgcggagctcgctcaccagccgatcacggcactgtgttgtcacgccgatcgggcccttgagcgggcggttcctggaaggtggtggttgagactcctcgaggtgcagtgatggcaattgcgttccatggcgcggaagcaccgagctatacggtgtcgcagttccgccgtgacctagactcgagggatactctgaaccagaatcgaactgcagcgcaggaaagagcggcagcggctggtaagttggggagtatgggtggctgggcacggggatgctgtcaaggaacgaggtaaaatcatcaccctcgtgaggaaaaggttcagtgaaaggggctggctctgcagctgaagcaatcggaaacgcagcgtgtgttgccggtaagacagcctcgtgcgtgggtgagaatggatgatcggttactgcagaagccagcacattgaggccatcagacaccggctcggctggagctgtggggaccgactcaggggttgcagctgccggagacgaatcgtgggcgaggcgttcatgtcggaccagcaaatccttacgagtaaatgacttagggcatctgtcgcagacaaacggtttttcct

SEQ ID NO: 13621 - DNA, 1454 bp, Emericella nidulans
gagttgtttgggctcgcgcgcactgaaagaactcgatgcttatgtttgctatcctcgccattctgcttccctttccttccctcccacctttgtctgctttaccacgtgtgtcggttcggggaatgactaacaatcgtgacttgcaggctttttgaacgaggagcgaactgtgtcgggttagactttctctcccacccattctgggataaatatattgaatacgaggagcgtgtcgaggggtacgacaagatattcgcaattctagcccgtgtcattgagataccgatgcaccagtatgcccgctactttgagcgctacagacagcttgcgcaaacgcgccctgtagcggagctagcaccccccaatgttatatcgcaattccgcgccgacctcgacgccgcagccggaattgttgctccaggcgcaaaggcagatgctgagattgagcgtgacttgcgtctccgtttggatggatatcacctggaaatattttcaaagacgcagactgagactactaaacgctggacataccgagtcggagatcaagcgaccgtatttccatgtcacggagttagatgaaggccaattggccaactggcgaaagtacctcgacttcgaagaggccgaaggctcctacgctcgaattcagttcttgtatgagagatgtcttgtgacatgcgctcattatgacgagttctggcagcgttacgccaggtggatgtctgctcagcccgggaaagaggaggatgtgcggaatatctaccagcgcgcaagctatctatatgttcccattgccaacccggcaactcgcctacagtatgcgtactttgaggagatgtgcggacgagtcagcgtggcgaaagaaatccacgaagcaattcttatcaatattcccaaccacgttgaaacaattgtctccctggctaacatgtgccgtcgtcacggcggtcttgaagccgccattgaagtgtacaagtcccaacttgactccccgcaatgtgaaatgagcaccaaggccgcccttgtggctgaatgggctcggctattgtggaagatcaagggttcgactgaagaggctcgccagggtcttcaaagaatcagcattctacctggacagtcaggcgtcttggacagttatctaacgtttgaactggatcagcctacagcgctggtacaataggcccagttgatcggttaagcaggttgttaatttccggtcaaaagcctctgtcgcttttctccagggtttttcctaattcatggtttcttttcaacccttcgtatatgttgatagttcagttctgtgagtatttctgtcccttttctcctagctatcttgtccataccttctttacattattttttgtttgcctcatttttttctatttctctctttttatatttttattttcttttattgacttcatctcttttttttctccctcttcccactt

SEQ ID NO: 13622 - DNA, 969 bp, Emericella nidulans
ccttggtaacgttttggcccacttacacagatgtggaaattacctttgtccccttttgtcaagcgagatgccaataccagtttattcctgaacaggattaccgaaacagaaaacctggagagggtagtggtgtgagaggttgaatggagatgaagggacatttgtggctattcatactgatatattattgtcccagtttcaattacggagtagtcaattgctattagtggcgctagtgcaagtcagaaggagtagctttgccatgaaaagtttaaatgtttcggaagacagccggcatgcttactacagaaaggcttgaaaaaggaagatagtagactctccaagcattagtcaatcttttgcagctatgaatgcccgcggggtctgctaattgagctaaggcggcactggatgacctactgcccaaaacccatctaaatgactttcgcaagtttgtagttcagaacaatgagcttcgacaatagaataaagtaagcaaaatcatattctctgaacattggcagtgtcagaaaatgtccttgtatacggagcgcaacgtctcggatagacactgagccaaactgcaggaccgatccttaggctcgctggaaatcctggactagattccggcaacatcccggcactctctaatgatagaatgtgagccgtcatggccaacatcagtacgaggtacagtggcagagagtccggtcatcagccgactcaacggaagaccatgatagaacgatacttgaatctctatttacataactcgctgtttcgtgcaactcgaacatatttgtcgacatatgggcgtactgttggtatcaattgctgcgcgcaccatccttggcagcgcgaagttcatccatcttagcaacgcgcttcttgaattccacatattggcacttttcgtagctgtgtctttcatcctacagcgagaggctgtataacaaaataggggggatt

SEQ ID NO: 13623 - DNA, 238 bp, Emericella nidulans
atacgatttatggtgacactatagaatactagggattcgggaggggctttgacttggtcgcgaggccctttccccggttgaggtggccgccgccaccaaaccaaagggttaatggattaggaatctaaaattcgggatggacccacgcctttgggaggccccttatccatcattccaggaggcccatttcgccggcgggggatgacccgaggctgatatttgggaggggggggtgcca

SEQ ID NO: 13624 - DNA, 1259 bp, Emericella nidulans
ctctacggatttcagagttttcctccggccaattttatagaagtacgcactctgatggtctggaactcagccaagtttttcagcctgcctttgctattgattccaatagacttgagaccgatgcaaagcacctgctcgcgaacagatgtcttttgggatgaaagccataaatcttcaatcgcgaactgggcttttccgagcgttgatcccatatcaagctggattatcactttttcaatcgcgattgtcgtgttccatgggaatgcaggagcagaggccacttgctggtaacgctgaacaatgtaggcttgcgtctctgagggctctgcctcgacttttgcgcctgggtcaggagaatcacttgccggtacccagatctcacgaaacaataagagatcttggacttgtctcgcgttgagcatcacttgcactgggctcacgcgtagagcggccgaaatacctttcgacttgcccaggtgtctgctgttcattaaggacatgacgatcgaattgacctcgaaacttgcagtagactcgtttgagtatacgtgcttcacagacgccgcaaagtcattgaaagacactgaaagtgctaaaaatcgttcatcaccgtctgcttggacagtattgatagcgacataaacactctcaaacccaacggtagctgcgactcgagctatgggttgacagctcaaactgaactcctgcttgcaaatcaagaggccaacgttcagtttgcaccggccgagtactgaggcaggatcgctggtgtcaaggggtgtatcctgcataagtctttgcgactgcagcatcatggtgttggacggtctcctgggctttgattgctctcccatcacttccttcacagtggcggacatctgcctcaccaagggaacaatgcttggaaataggacattggtggatgcatctatcttcaactctgcattcagcgtggagtcctcgtgagcgctatcctcaaactgaacctttaatgcaacaccgggcgcacgtagtgtagcagttgatgtgtcatcctctcggacgaattggccgtacttcgattctttggctactttttgtttcaaggtggcagtaagaaggctttgctggtctttactctgcttcccttgaagggaaacgatagcaccggcgaagtcaacgtcaacgagcacggaacgaaccagtttatttccgaacagagaacgtggcttcgtattgtcgtcagacaatttagacactgtaatagagttggcgttata

SEQ ID NO: 13625 - DNA, 1230 bp, Emericella nidulans
atcaaattataccactcactatagggagacccaagcttaggatccacggttaagcaattcctccagttgctcctccgtcatgccacgagatttggccactgcagccagcgcagggtctcggacagtcggagactggggttttggtgcgggggcttctgccgctaagcctcgtggtgcagaattgggtcgtcgttcaccatcagagctatcttctagctcagtagagtccccgtcataggcgtcctgtcgacgcgggataccacgaacagggcgcatgtcaaaatcgctcatgctcctcgctgaccgatggcccaggcgtggtagtcgtcgattctggacgccatcatcagagtcagagtcagaatccggaaagcgagaagcaaagggcaagttgaaacttttcgcaagctttcctttatgcgccttgcccgcagaaaagattgacggcttctcctttcgcgaggcattgtttcgcaaggtcgtgcgcagagtacctgttcctaaggcggagggcatagtagaagaatcaacatgagcggctgacctcgaaggggaaacaggggccgagctttcttgctggcttccccgtaaggtccgcttcattcccattccacctctgccagctcttcgtgctcgtttgaaactactcgacgagtcacttccatttgacaactggcgtcggggtatgtgggcacctccgctcacttccagctccgcggggccctggcttttcacgtcattctgaacaagtggtgtcaaggcttcgcgggtttggctctgctgctggatttgctgagctccggaaccattggctttcacttgctttgaacgagtgttcacttcttgggggttatcctctcgtaaattagcaatgctatatacttcaaccggctctgttgagcgagtattctttccctgagcagaagctgtctcagctttagactgtacgggaggtgaagagagcggaagcggttcaattagaccgggggagccaggagtcggggccgttaagtcttcccggacaggagtctgcacacgagcgatctggcaggtctctggaacgtccgttgcatagggactatgcgtcagcgagacgtgtctcatcctgcaacgatgtgactgcgactcccggcaccgaagatgccgtttcgtggtcaacaatagcgttgatagatccataaccaccaccagccaagtcctcctcgcatcgctgtatatgctggaactgga

SEQ ID NO: 13626 - DNA, 1032 bp, Emericella nidulans
agacttattggcagcaccctgcagtggagtgaggccttttgcggtaaaggcttcgatattggcgttatgttcaaggagcttagctgcgatggcagggcttgttgctttacgcgcttgctcgtggatgagagattcgccttctttgttccaggcgttaatatccgcaccgccgatgatgaggaggtcgaatgcgacccagtgctcttcgtacgcggctatttggagcgctgtaaggcctgataaagagcgtgcttcaatgttggcgcggcgctgaaggaggacggagatcgcttcgcagttgtcgactttcacggctagctggagaggggtgaatgccgtttcgttagtcatatcaatcgaagcacctttatcgagaaggtataggacaattcgcggtcgtctccattctatagctagatgtagtgccgtatctcctgtgcggatattgcgagtgttcacatctaccttgtcctttataaggagagggacgtggcttcgtctgcttcggtcttcacagctagctggaggcttgtcgcgccctcaagattggctatttgagcattaaccggtcgatgaagtaagagtttcatgacttttcgttggccatattgcgtggctaggtgtaaggccgtactgccgtcgcgagcaatggcgtttccatctgcaccgttatcaagaagaaactctaccatgtctgagtgtcccctgctagccgcgcaatgcaaaggcgtgagtcggaaagaattgtcacctgcgtcaattcttccaccttgtgcgatgaggcgcctgcatctgctcacaattccgaaataagcaagaatatgaagagctgtccaatcttgggggtatttgcccagacccagctcagacggaatcataggctcgttcgtcaggacctgcaggggaggtcgcctccaaagcagtttattaaggaatgtcttaatgagcacctggatagtttgctcgtcttcgtgcacctcgcgtgcgtggaagccccagtacatcgcagcgtagcttaggaacccactgccg

SEQ ID NO: 13627 - DNA, 999 bp, Emericella nidulans
tacccagattatccaggtcccaaactaatgttaccaaggccagtttgcccgatttccagacccagatggccacgtgcgttgtggaatgtgacggggaaagcgctcaaccgatgcatctccatacctccacgcgagcctcgagcctcgtgtctccgtgacctttgtccgcaatcgtcaataatctatcacgagaccacctattgccgactgacactactgctctgactgcgatgagtatgtgccaatatttttgtttccggagatggagaggaattaggacacagccttcaaagactggaatgtggaatctggaagagaacaggaggctaggagtattggctgaataactatgcttgcagcccgatctgaaagaagaactgggcggctcagtttctcgatgattaatctacctcagattcctcgagaggtcaggccaaggagctcaggaccgggcctagcacctcgtctcgcgctttgaacaatcaattcgaccttgcaaactctattgtcctcgaaagcgaagaagacattccccgctctagggtggtacaaccacagatgggacgcaagcaaagaagcgatctgagtctaccgaggctataatcgtgccctcgagaactcgattccagcttagggcactctcctctataggagacaggatcctgccccgagtagcacgttgagtaaccttcgatcaagctgctcttagcgcacgctggactgtggccttagctgctgctacgctctgagacggacttaaccatcgtcatgtcttgtccttcaatggttccagacttgcataatcgtaacgcagggtagccaccacagccctcgcctgcaatggccccaaatcacagataaacggccaacggccgttgtttttctcggttgattatgcggaattgcttgcttccttgcgggaaaggcaaaagcttcgatatagtggtgaaattgcctctgattaaagtatcctagcagtgacctggcacgagggttgtg

SEQ ID NO: 13628 - DNA, 152 bp, Emericella nidulans
atcacatacgatttaggtgacactatagaatactaggatcatggaccttcccaacttgttgcgatgcgaagggtttaatccatggcgacaaatgtgaagaagccaaccatgttaccgaggccaagcaggaggttccggtttggttccaccat

SEQ ID NO: 13629 - DNA, 534 bp, Emericella nidulans
tacgatttagttgacactatagaacactaggatcataaccgtgttgactattccatttacacacgccggtattccaaacgaacgtgagaacccgaccctcggaccgtctatgaggggaccatacaggaccaccatcgtggctactttctaccgctcatcctcctcgctgcaaggctatacaccgagaaatacttggcacagccaagccgcctctgcttcgacgactccgacactcgctcatgagcaaaggtgaaccaaagggactcgccccctgttctgcccggctgaacatgcgcgagaacatcagcttcagcgatcgctaagccacttccaagcgtcttggctaacgcctgaagaaagaactgaccagacatgtgactgcttctgccgtactaagcagctggcgcaacactggcccgtgcagggctgagcatgaccgctgatgcaagggccgcttacttggggaccttgctagcctcatgcaaaaattccctggcagaacgccatatgtaggcccgagatctctaactgatt

SEQ ID NO: 13630 - DNA, 953 bp, Emericella nidulans
agcagttagatggagtacaggctttttgttcaaattagactccgatgaccctgaacctctcttctcggccctctctttagcagctctcttaaacagccgtgaaccagtacgcccacaaccagtccgcgcacccagcagacccaggggatcacgaattagcctaccgcgcccacatctctcctcaacatgaactcgaccccaatgatccaaacgcggaactcaagaaaccacgggcctgcgagtcctgccgacaattgaaagtccgatgcgagcccgatcccaacccagacaagccgtgcaagcggtgcgcgaaagccggccggtcatgcgtcgtgacggtcccgaaccggaagcgccagaagaagaccgattgcagggtaaccgagcttgaacgcaagatcgaagtgttgacggccacgctgcgtgccacacagaaaatcgactcactcctaccgtcgaagaacaccgcccagacttcgtcgtctttatcttcgagagacgaggagagtggagggcgccgctggttggttccagggcagagtgacccggaccgttcgaatgctgttcccgcaagaccaggtccgttggggactaagcggcatcacagcggggatgtcaaggatcggaatacggtggctacgcaggcgaccccgtcgcaagctagtaatctcagcccggcgacggataatacagaaagctcggggagacaatggccaatcccattggcaagctggtctactccgaaatccagcagtaaagagaaagctcgcgttcctgatattatcgacaaggggcttgtgagttatgccgtcgcatcagatgcctttacgcgctatgtcgatgacatgtgccaccatgtgccgatggtcattttgccgcctggtacacagatgagcgacgttcgaaagaacaagccagtcctgcttcatgccattgttgctgttgcgatgggt

SEQ ID NO: 13631 - DNA, 361 bp, Emericella nidulans
atatcacatacgatttaggtgacactatagaatactaggatcttgcgtcctgatacccctcagctgggcggttactctgcccgttttatgtccgtgcccggtggttacacacctggatcataccatgcctgaggctctaccatggtagaaactgtatctacgacggatctggtctcacgtgatgccaatccctgtcggcgcgcatccgtaccgatgtcattagctgagctctgctacttgcctcgcaatgagaagccagaggcactgcgctgcgatgctgcttgtcaaccgatagccttgatgaggacgcgccaccgaacatcacgcgttataatgtcgcgagcaacatcatgctgtctta

SEQ ID NO: 13632 - DNA, 561 bp, Emericella nidulans
attacatccagtttttgatgatcatgaggacaggattagaaaaacatgtttcgagtgtcgaatactgttcgtgcttccgtcgacatgggaggaatttgactaagaactaaatccctataaatatttagtatctgtgctgccactggattgatcacttgatcttcgcgcagggtctactgtgtatactcgaaaaagaaggataacatccattgcgctttaatagaccatatacttactcattagaaggcatgaccgcaatgaatcaattgatccgagctgtttcaatcacttcaggtctagcgggttgtctggccgtgagcatcccgatcttgaggagtcggtacaaactaatagtctaaccagagtatagaagaccggcacaggctaattggcttcctcagagacgcagggagatttctgctctgttgggcctattattggccttttctcaacctatcgtaacaaacagcgggtttcgtattatgttgggcggttgttgtgggctttcttagcacagaactttcacacagagttacatcctaatatccttaatgtgttctc

SEQ ID NO: 13633 - DNA, 571 bp, Emericella nidulans
atctcatttccagcccagattgcaggagactgaccatcactagacgacctttgcggtccctatgacctgcgatggctgcgtgaaggatatctcgcaggcactgcacaaggttgaaggtaagattcatcgcttgtgcgtctacacggtgctaaacgactggttgctattccaggaatcaccaaagttgaggcgaatctcaaagaccaacttgtattcattgaaggcaccgcgccacccagctccatcgtcacagcaatccaaaatactggtcgcgatgcgattctacgaggcaccggcgcttccaacagtacgtttcattccgctctactggcttacgcacgtaacgtttcagtccttggacgttagctgatggtgaccggtcgatagactccgcggtctgcattcttgaaacacacgcaacttccgtccccaataagatccgagggctggcgcgcatggttcaggtatcatcaaatatgacgctggttgatctgacgatcaacggactggcgccgggtaagtactgggcgactgtacgagaggcaggagacatctccaagggggctgagtc

SEQ ID NO: 13634 - DNA, 1075 bp, Emericella nidulans
ccgcgatggatggactccatggctgtcggtgttgcggagttttcttgcgactgtgctatcccgtttgtatttgtcccatttgcattaaaagactgggtttgaggtaattgtaaggttccaaagctcggcgaggcgtaaggtgactgacccaactgaggttgaggtgagaggctttgtctattgtttggtggtggaacactgccattcatcggcgagggtgcgggagagggtgaggaaccctgaggggagaaagattgctgaaactgctgtgtctgcgccatttttacagcggttcccggcccgtgagcagattatatggtattatgcgatggttttcgatcaaagtttgccctgcatccgcgaacagagtgaatactttgcgcgtgaatcgaatcgtgaagcggactgctgaaaaccgccgccgccgccacctgtgaccatctcaagacatcgggtccaatatccagttgtgatatattgtcgaaagaagcagcggacgcaggaaatatgctgttacgcggcggaaatttggtgttggtcgggatgctggcacggaaagggacgaggaggtttgcttcccactccgcgacgagcaagccacgtgactgacttatgtaagtgtagctccctcatcgaacctgcacctccctcatcgaatgattgcacttatatgatcccggacgacaaagacagacatcgactctcgttcgactatttttggacggccgtccttatcgcctttttcgccgtctactctatcgtatgagatttattccgcatttgcagcgcatcaatggctggcgaacacagcgcgaactgagtcgcttcatttaagctttgtctaggaattgtcctattatctaggtacttatttcgctttacctatagcgctaggtcgcttgtattggtgttagataccgaacgcgtctctttatggcggcaaagcgaaaagccgcggcgatgaacgccgtcgatgacgagcccgtcgatccgtcggatgaactggcgttttactgcttaggtggtggtaatgaagttggaagatcatgccatatcatccagtataaagggaaaa

SEQ ID NO: 13635 - DNA, 618 bp, Emericella nidulans
tttggatggcttgggactgaggtggcctcggctccccttgttaactctcctgagccgcgaaatttttttaaagacaggcttgttctgacccgcgccgggcgtaattgagccactgtggggattcaccatatgcccgctaatcaagaacggtgtatgttacctgcaatcaaaccgccaatacctaagatactgacagcaaaatcctcagtgctagttcatagctttgagttcagtgctgaggaattggcaaaccttataataaagggactacggctcgatcaatcgagaaaaattgttacgacctattcaatattgaccgtatctacagtacgcgatgttacccttttttcgccaaatcagcacctttgattcacggaagcctcattataccacggtgcgacgcgcgaccttacccctaaactactacatagagccagaatgagtccttaattcaaagctttgtcgatggagttgtcgaatacggatcccagatgattcagcaagagcgatcataacctgttgattcttatattctccatggacagcgcaagtagatcataccttgttatgaactgccagacttttacatgtttgtacccaatgaatactgggggcttc

SEQ ID NO: 13636 - DNA, 530 bp, Emericella nidulans
cgacgagtccatactctacggcgttttcctgacagctaacggtgcccttttcctctttctctcgcatcacgactctatcgatccttcttcacattaaggtctgatctggtcaatactacactctaaaaatatggaagcccggatgagtctgagcttttgactgtgtcccgtccctgacgcggaacacatactgcacaacacggtcagggctcaattcttacataacgccgtttcccgtacgacggtgtaggattctcctggcgcgtcaagctatggggctaggtcgctctgccctgagtctacagagtagccggatcatagctttactcagattgtagtgttctcctgatgctgctgcacgtcaatggctctgtggatcttgaaccatgatcgtcatctatgaccaatgcgcgatgccagctattcataggaattcgaacagacgatcctgcagggcagaggctttgataagcagatggtgcaataataatgcagtggttgttgtgctgcaaacctcacttactctgcaa

SEQ ID NO: 13637 - DNA, 448 bp, Emericella nidulans
gacgacggtagggcacagcccgggggcgcacggacccgcacgaactcaccactccccgggcggccgtctggaagcccccacagcccaccaccgggggggccattaaaacacgggggcggtaaaaaacccccagcaaaggacaggcctgatcaagacacaaacccccggacggacagggcacccgaggagaaccaacaggggccgaccaaacgcaacgaggagacaaaacgacaaacatgacttgcagaccaaaccccgaacaaggccgcctgggaagctcccgaccagaacaggcctggccctcaaaaggccggagccccgcgctccagccccaagccggaccatggaagcccccccaagaagaggggctgcagaggagcacgctagagaaacgagagctgctgaacggaacactccccacttcaacggccagagcggcggacacccg

SEQ ID NO: 13638 - DNA, 454 bp, Emericella nidulans
acacatacgatttaggtgatcactatagagtactaggatccacaagtgtagaaccactccactgcaggtcgataatggggattcctccttaagacccgatcataccgggatgcaggcacatactctgcaggatcctccatagatgctgcttttagtggtcagaggggcctggctgagatgcatacgaatacgctgtcatgcgagagctggcacaatgactgtctatccatgaacgggtaggtttctgcacgagatggaatatcctaaaggtgctacggtacaagtgttagcgtgacttctatactagccgcctccatgtcttcctatggaggaaggcgtctaccacgatattctagactctcagattacccggtttttttcctgtgggctgataagaaacatcccaaccaatatcaattctagtctacagatgggaactttggatgacagagat

SEQ ID NO: 13639 - DNA, 119 bp, Emericella nidulans
  unsure (1)..(119): unsure at all n locations
tcgattatacgactactatagggagacccaagcttaggatcaagtacttgaatctgatcgtcccggttgtcttgtccttgcggctccatgccgcanaaactggacggcccaggtttgtt

SEQ ID NO: 13640 - DNA, 409 bp, Emericella nidulans
aacagtaactacaaagaggtagtagcattgatggagagagttggagaggtgtccaccaaaagcagtgttcacaggcactaccttcggatatcccaagtctggaaggaggaaatgaataggtgctaggcctcccattcactgggtttggagattctaatgctcggcaacatgaagaatacaatgacaaatgcttgaaacaactctaaggctcaaaaaaaaaaaaaaaaaaaaaaaaaaaaaaaaaaaaaaaaaaaaaaaaaaaaaaaaaaaagcggcgagtttttaccctggggtttttttacggattgggggaattccccttttcttggggaaaccccctgggtttgggccaaccccttttaaagttccaaagggtcaggggggcccccttccaaaaatttgcggggtt

SEQ ID NO: 13641 - DNA, 677 bp, Emericella nidulans
ccaggcagatccccgctgaggcccgtttaatcgagaaaggcgaggtttagttcgatggagcgttcaaggtgggctttgtggagcaacctggtgcaccgtgctgcatggaagcctaacgaaacgttggaaaatcaagagattagatgaattgaacatgtagagttgatgaatttgggatgaaccgttgactatgaagttgcatagaccatacaaaggacagttggccgatgattgtttgctggtgaagttgtgtttgtctttacgcttgttgccttcgttgccttttttagatcctgaggcatcaaagctagtgtcagtgccttaggcacaaatactctatatagtatgacgagacaggatttttctaacgatacaaggtacaatactcagaagaatgccagagactagctatcattgaatatccccaggggtaattgttcaccgtacagatcccgcagcccatagtaagcaaagccgtgccaggtcagtctacccccgcttgaccggcgacgtttcaagaacccagttaccctcctcaatgtgagcggttgtaccacgcctcgcagcgcgcatgaccttctcgctcgcttttacagtgtgccctgtttcccggtcccagataagcccctccttcaaccacatccacgtcaaataagcgcgaagtttcttatcctgcg

SEQ ID NO: 13642 - DNA, 927 bp, Emericella nidulans
cgacatcgggtcggcccggaccatggtgggcgaagatgtccgcgacaaagtgcagcgacgaagactggaggtgggcaggattggaaagcgagatatcgcgcggcgcgacagggagattgtgcgacggatgagcatcgccgtccattgacaggaagcgggcaggatcggtctgagcgggcggttgctgaggagtgggaggctgggcggtcgacggagcgcgcggcttattctgcgccggagtcgcagtcgcagctgttccattcgtattatgtcctttggcgtgacggctcaacacatcgctgttgggatagcgatcagcgtcgcagttggtgcaggttggagttaactcacctgcgggaaaatcgcttatggcagacactacactcgtaaggcttttccttggtgtctagagcatgtcagtaaagatacttctcagcagaatcactgcactgacgtgatcgttcatggcgcttgaaatgctccgtcttcttaaaccgacggtcacagatgttgcactttctgatgaccatgatgacgtgcgggacgaggacgataatatggatccacttagaaacctggatgcatgtcgtagcgcgcgtagccgggggtcatttggcgactgcaagtctcgagatgttgacgagtgccagaattcgattgttgtcaacggtgaagtcgaatagcaggagagccggcagctggtgaggggaatgcccggccagcgtaattaattcgtactgagccggtaaagtacctggggaaactaagagcttagctgaggatctggggtatcgtaccgtatccggggagaacttggggttttcagtcgagccaatcaaactggggttcaaaaggattcaataattgttgcccagtagcagaataagacaaatctgtaaaaaatacagagcagcgtggttttctttg

SEQ ID NO: 13643 - DNA, 642 bp, Emericella nidulans
  unsure (1)..(642): unsure at all n locations
tatgataacacatacgatttaggtgacactatagaatactaagattttaacttgtgcctcagaacgggccctaatgtctccttgtgttttcagacaccactcttggagatctctgttgggggggcctttctcatnnnnaagccccctctttccccaacattacctttttacaccagtccctttcttgtgggggggtnttttttattttcttcactttttnntngtatttaattttctttttttctnttttttttcttttcttttttttccctacttttctacttgtnctttcgttttattttttctccctcgccccccttttctttattttctttcttttctattttttcntcttttttttcttcttttttttatttttttcttctctcttctctcttctttctttgtgttcttcttcttctctttctctcttttccttctctctttttttctactcctttcctctctttgtcttctcctttcattctttctccactttctcttcatttctctcttttttagacttttcttgtcgacgctgcttgctttttatgttccttctgtttatatattacttctctnntttttctctttctgttcttcaatttgtccagtttccgtctaccttttccttcatttttt

SEQ ID NO: 13644 - DNA, 289 bp, Emericella nidulans
ataatacgactcactatagggagacccaagcttaggatcaaatgcctccaacacgagagacacacacatctggctctgcattggaagaacgctttcgacgtaccgagtttgctggtactctgcaatcctgtcgtccgtcatgttcttggtctcattgaatgccttcatgaccgtctcaaaggggagatttaactccgtgccctctttccctagaaactcgcgcatagacttgtccatgtcgagagcttcctcgcctggagtgctaggagtggtataattcgtggattta

SEQ ID NO: 13645 - DNA, 1253 bp, Emericella nidulans
gactggatacaatgcactggctgaatagtttgttcgggctacggcatacacagctggaatggcatagcttagtcattataacggcacggcctgcacaatctagtggacaaatctcgacgtcaactccagctccgcgccaactctactatctgccatccatctatggctaaaaaattggcggcccagcgcatctggggctatgagtcgcgaaaatatatcttgggacattccagaaggtcactgcaccgtgtcagcgacaccggtttcaacgccagcaaccatcctctctccctagtccaaaaaaggatccgcgtcggtgcctgtaatggacatctacgtgagcgccagcagcagcatctcctaacaggcttgagacgccgggacttattcacctgggccacttccattcccaccatcctcatccccccggcaatcttcctcggcctgcttctatccctttggacgtggaaatgcttctggatcgttcttttccaggataaactactctacctctcttggctcccgcccttatcccgctctgagaagatagaggactacgcgcgtgagtttcgcggggtccagtggtctgaaactttcatcatgagctcggacgggacgaagctggctgtttgtgaagggcggttaccagcactctttagaagagatagaaatgtaaaggagaataacaagaaaagggtccgagtggtcatttgctatttccagggaaacggtggatccgcgccgctgcgcctgccgctgctttcactgtatatgaagtcgttagtggaatcctcttcctctttattcttccatgcatttaaccgttgcgaattattatggcgagtacgagcacattatatcagcaactctgccaccgtggttactgcatattctaatcatgtgcaacgctacgtagtgtttttactcgtcgccaatccgttacttattatgtctatgacgtctaacttgtcttgccagtagtcttggcttattttccggccacatatattcttttgctattatatgtttttcatcatgccttttttcccttactcctttccccgcttttactcgccctgtttaccatgcttctctcttcacgtcaactcgttacatttttcattggctcctttttattccatttttggttccttatctttctctctcctactcatacctcttctgtttctcttttttcgctatctacttctttcttctattcgttcttctcttctttcctatttcttaatttt

SEQ ID NO: 13646 - DNA, 990 bp, Emericella nidulans
atttcttccccgctggctccgaaggaatgcatctaatcgtcgacgagaagggtgttttccgagaggagaacttccagaaggcaatgagctccatcgcagacaagaaaggtgatgatccagcggatgcgcttgccaaacggaaaggcaaaggcaaagacaaaaaactcaacaaaggcggaactcaggagaaagatgatatatataaaattgtcaagatgattatgttgaagagtctgaatcctgttatcgtcttcagtttcagcaagcgcgagtgtgaattctacgctctgaagatgaagagcctggccttcaatgacgactcggaaaaggagatggtatcaaaggtcttcaacagtgcaattgaaatgctatctgaagaagatcgcaatctacctcagattcaaaacatcctgccccttctacggagaggtattggtgtccatcactccggactgcttcccatcctcaaggagaccatcgaaattctgttccaagaagggcttatcaaggtcctgttcgccactgaaacattctctatcggtcttaacatgccagcaaagaccgtcgtctttaccagcgttcgaaagttcgacggcttcagccagcgctgggtcactccatctgagtttgtgcagatgtctggccgtgccggacgtagaggtctcgacgaccgtggtattgttatcatgatgataggggaagaaatggatcctgccgtggccaaggaaattgtgcgtggagaacaggaccgtctaaattccgctttccatctgggctacaacatgattctgaatctcatgcgtgtagagggtatatcgcctgagttcatgcttgaaaggtgtttctatcaattccagaacactgcaggcctggccgggcctgaaaagggaatcaatactcttacccggtgtttgaatatactactgacaattggcagaactggttaacctgaagaaaaagagccacatgccatttcgatgaagaaccatc

SEQ ID NO: 13647 - DNA, 1232 bp, Emericella nidulans
tggcgaattggcgatcgggatagcatcatcaatctgaacggcagtcttagccttctccacagcttcctttgcggcccgtttcttgcttcgacctgaaccatggccctgaaggccttgcgcgtgtcttcaaggaaagttgtctccagctcctttctttcagagaattcagcaagggaacggacacaggtcataatacggtcaacggaatcctcgtcaatcggagcggcgacgaatggcgattgacccacgcggataatggagatcatgatcaacatggcttcagcgcgcagagcattggtccgagcagaatcctccgagacttcggaatgtcgcattaccaacttggtcaatgttgaagaaagaacagtagcaagatagtaatcgccgtccaaaataagttgacgcagagggggtttctgggccgccttgaccgcttgtagacgagcagcagccgcggactgactggttagggcactttcggtcgcataagtaccgtccgccagaacctttggggccgacttgccgtggccattgatctgttccttaggcagagtatcctcaggtacttcttcaaggagccgctgttctgaagccagaatgggaatctctccaaggcttgctctaatcttcttccaagcctcacgaatgtcactttcctcaagcgaatactcaccaacaacccacagaactccacggtaaacctttcctgcccggacctcgctcagggttgagaccaagcggttcacgatagacggacgaagcttggggaatttctcgacaacttctttgacaaatgaaataacgtcaacagcggaattgttgttgaagtcggcgatgaagtccattagcaaatcggcaacactagcggccatctgctgagaattttatggcgcagttgtggattgattggatgaggagttgtcggtattctctaatctgcatgggatgagtacgataatcaggcaaggagtctgtaagcctaccttctcatattgttcgtccacagtcttggaaagctccttcttcagaagcatcacaatttcctcaacattcttacttgagaccatctctaaggcaattccaagagctttccgtcgcacatcgatgtcagggctagagagaacccggaggatttccattgtgaggtcatcgagaacacccacattgccaatccgtaattggtcgacacgatccaggacgatcagcttaacgttgttgacggcctctttaat

SEQ ID NO: 13648 - DNA, 561 bp, Emericella nidulans
  unsure (1)..(561): unsure at all n locations
tatacaccgatttaggtgacactatagaatactaggatcctaaactataattaaaacaaacaaaaaaaaaaacagctaagaactatcaagaaactaatttaaatatcaatattactataagtatagaagctaccaggttttgctagataatttcaaagagaaaatagtatagcgttcattgtcttaataatataatatattattatgattgattttagagctctaaagacctctatagaaaataaaaaaaaaaataggataatataaattaaatcgtcttactataatccaataatataacaaatattctttaggaaaaaaaaaaaataccccttattataagggggaattttaatccctagaattaaatttgatgggagctaaaaacttctaactattttttttttattataagattattggtaggtgggcaaacccctgagatttttttattggggggctcttcttcggggggcacaagccaagantgatctttcccttttcttttttttcgacttgccttttagggtgtttttttattttccttcgttttggtttttt

SEQ ID NO: 13649 - DNA, 711 bp, Emericella nidulans
  unsure (1)..(711): unsure at all n locations
tacgatttaggtgacactatagaatactaggatcatagtgtcgatcttgtcgggagagaatttgagcctatggcctggttcataaaaggaaaaaagccccacaaacatgggggacatttttttgtctcatacccccccaacccccccaattttcttacaggttattactctaatttcacctgggaggttacccccttcttaacttcatttttttcttattccccttttctctgacttttcttcttttttttctcccactttttcactcttctttaccttcttttttaaaatacgtctttcctttttcaattttttcccttcttctttttttcttttcctctctctctctttttcccatcctttctctttcatcttcttttcctctttccttccttctccttttttctattttagcccaatctttctttccccccccaatatatttctccctttcttctcatctctgacatacttcttctcctttcttatttttcctttacttttctccctttccaattttatcattttttcacccccttttcctttcctcccttctttcctcttacttttcctcccctctctctcatcactatttcttttcttattccctgcattccattttccttctctctctctttttattccttctctatttttatcttttttttcctcctccncctttcttatcctcttttcatcccttacttcatc

SEQ ID NO: 13650 - DNA, 970 bp, Emericella nidulans
cggttttcatggctcgatctcccgctcagcgacagtttcagccaggtcggcggtgtctgggtatatcttgatgacggacctgccgagcagcgacatgttcatcgcgacgggctgcgagctgagcatgcgctcgcctagagcaccgccgagagaggatgcggacgtctggcatgtttatgcccgccattcaagacaaggcgacaaagcgatcatgacggacctgtttgtatttgatgcggtaagcggccagctcgtggagatcatgctgggcgtgcagtatatgcgtgtcgcaaaggcgtcgatgagcatgatgctcgcacggatgaccaaggacgactcggtcctgagaacgaaagcgctggtgccaggaccaacaccagcggcagccttccaggctgctctaaagactgctcctgaggtaagagctagctctgaacctggggcgaaggtaaaggccagcaagacctcgaagaaagagaagaaagagaagaagcccgttacgaaggccaaatccaagtccagcaagccctctggttggcgagatattaccgaggaagtgcgcaaccttgtggctacagtctctggcattgatgccagcgagctcgagctggacgccgagatggcggactttggcatcgatagtctgatgggcatggaactgggcaaggaggtcgaggccgcgttcaagtgcactctcgaccagaacgagcagatggaagcaaccagtttacgcaagttcgtgcagtgcgtctcgaatgcgctctttggtccaaacgcaggtcctgcggaggcagaagatgacgaagacgaagagaagagcgacaactcgtccagcgagtctgcctctgagagcgacgacgccggctccgaaagctcagacacgggcatcctcacgcccactggcgaagaggagcagcctttgcctctcaaggcagtggccattcacaagtctgctgggctcgcagcgatt

SEQ ID NO: 13651 - DNA, 611 bp, Emericella nidulans
gttttgatatcttcgcactccacactgcatcaatcaattttaacgcccaaggagcgagctcagaaggttacggacattatttgcgacgagatcttcagttgactggtaagatttttcgtcgtcgatgcttagttgcgtacgcactattgatgtcagcccgccttcaaatagattaaagctgattagctgccacagctgggcaacggagatgctcggtggtgccatgagatgaaggatcaggattcagatcgagatctcgcatctgccgtatcaggaaaatggactggcacggcacggcataacagtcaacgccagagccgccctacctgtcgtctgtcggcaataatcatcacggtttacggatgaaactggcactgacagcctcggtcttcattacggcagtcagccaggtacggaggacctggatctgactggagcctaggctgagttgacactgagttgacacctcatgcttctgaatgaactatcgcttcaaaaagtcatctgcctggctgtgcgaccgtgccgctgccatgcgacgggtacttcagttggatccagcctcgtgggacagcgggcaatcgaaacggacgtacagcgtacatacatgc

SEQ ID NO: 13652 - DNA, 962 bp, Emericella nidulans
gaaggcagctcttgatcgccttcaatggaaaataagaagcccagccctcccggtcaacgcaagcccaacgtcaagttcttcgaggaccgtggcagccaccgagggaatgccggcacttggcagggcagcaaccgaggcggtagcaacacatcacaacgcggtggttaccagagtggaggggctagcgacagtgaaaccggtcgcggacgaggctttggcgggcgaggcggcggccgtgggcgcggtgaccgcggacgcggtggacgaggaggccgcggcgggttcagcaagggcccgtcggattcgtccgctccatcaacgtccacaccatccggtgacaagccagctgcatctggcgacgcctaaggcatgactttgacctattagcctgtttttgtctctagtactttgtattcccacttcgcttcagtgtcatctacccccttttctcgaccatattggtcttctacctttccacgtcgtgatgtgttaaaaccaattccacggttcccagaatcctaagttcattcgtgtgtaataaaattatttcactcatgcttgattagacttctgagttggagtctttgcccaccgtcttcacccctgttggtgatcctcctacatctgcatacccgtagctttagaatcccggacgtccttaattgaatgttgttatgttttcctacaaactccatactcacagggtttacgtagttctattcgtttatttgaagtttgattcttcccgtaggcttgtccgcctttttccaggtcgatggacaaactcaccttgagctatttgaatatgacgataatgtaggcggggctcactcttcccgactgggcttcgatcaagcatagacctatgcggctcgttagtcaaactatcctaacatactcaatccagaccctagagcaggctctcaccagttatcgtgtacagtccttattaatccactcaa

SEQ ID NO: 13653 - DNA, 633 bp, Emericella nidulans
ctcactatagggagacccaagctctaggatctattccgaggccgtcaccgacaagtatgcaaagactctgtatattttttttaacgcaagcaaaaacacgcaggctgggggggttattgtatgaaatgatcccccccttaccgcctgcctaagcccacaaaccgttctagaggtgtgtgtgatcacctcgcaagccataaatacatttcttaagtgtcttcattatcatttttccactaataacacattaaaccatttctcttctattaaggaaaaatcctctgcattattataattatttgtttcagtttaaattttctaattttttattttactattctaaccatattattaacatttctaacatcattctttttacctctatatctcactctcgaaaatttaaaactctatttctagattaattatatcacttctacctctactactatatataatactatcaattactaaataatattttcttcatataaactctctaatctctctctatataaaccttgttattatcctcccatcctaggtcttcccttttcctaactctacaatattccaattcatctgtatactcttgtcatactcttattccttttctctaatatcatatcttaa

SEQ ID NO: 13654 - DNA, 1026 bp, Emericella nidulans
tctccagtctactatacctagtctcaggcccaactctgcaaatgccgggcggttgcaaattgtacctagcctgatgccttggcaggtagtccactgggaatgcactgggcgggagagtcatcgacatagtaagagcattgttaatgcggtgtcaaagctatctagcatatttgatacagctgactttttcaaacattggaaattacgcaggttctttatgattacgaggcttcagtggtcgattatagtaaatgtccgctatatatattctataaccatgataaacatccagtacgaaccatgaatgagcagttaacctctaaggagcagtcatcagtatcgaaaatacttacctaggatagacaagttgatgcaactactactgaatgtatagagccagaaacgatagaatgacagatataatagcctcaggcagaaaagaaccacgtgattcggagatagaggtggcccgtatatccgtctgccggccttccgcgacttcaagacacagtccaaccctttcattccagacaactcgttactggcgaggagtggcctagtccagacttatttccgaaacatacttgcagatggccgacaccgagcctgggccacctcccaattggcgcatccccaaggcgtgccaagagtgcagacagcgcaagatcaagtgcagcggcgagagtccatgcaaaacctgccgactgcgacggacaccctgtctttatcgagaggttacccgacagcgcaagagaaagcatgaaacaactcaggctgatagccgctctggagagggactgtcggatgggcctccatcctctcgccgcgagcccggccagtcaggactccaccgagaggaactgcctctgggcttcaataatagtgtctcagccacgcatatgacttctccgtccaacaaggtccagctatactatgggtcgacttctcattttgctctcatgcacgagatataccgggatctgacatccaacccggcagtgcacccagagcagggggcccacggcc

SEQ ID NO: 13655 - DNA, 1145 bp, Emericella nidulans
tcagacatggattgtttgattcccgccttacgacccttgttggttttggcgagagtatcctgttccttattaagtatgtaaagtgcagcctaataatactggccagcttcaagacatattttctaattaatagtattttgtaggatgaacagggcatgattaggagttgcaccggttaagactattaaagtattcttcgagctgaccaagattctcaactgaaggcacatcttgtaataaaacagggcgtggaattgtactggtagatatgccagtaataacagctgccaggagcttattcctttctttctgcgacacagaggcgcgcataaaattctcgggctcagtgtgatgaatgccattcctgaactcttcttttaaagaagccacataaccctagttactgtcagccttgaatccaaccaagttagatctgaaacccataccttatcaggttcatgattgatgatctcgtcgctccattttggatccagaagacaaacattgataacaaccacaccaagttgagcatctgcccagatttacgggaaggggttatcacgctctattagaatgtcgtcctcctcggatccagacacagtctctcccttctgcccccttaccttctccatagttttatcattctccttagaccccttgcccttcgcgccagctgctccattgctgccattgccgcttccacgcgccattttccagctttctaaccaagttagtttgcgaaatgtagatcaccaagggggaagttagcccataccagccttgaagaaagacagctggcttcgagagctgctacaaccacagagagatactgacaagatttcaatgtagatgtgtgctcaggatctaacctggttgatgcttgttagattgattgatgaacggaatatttaggaagttaagcgacctagtcgcttcgtgccagaactaattgctggcttcccttgcgagtcgccagtgacgttaagataggattgtgcgtcacatggctcggcggccaggacccggctgcgctgcctcaggacgcagctagctccagcttgtactgtcttgaggacgcgatgtgtcttcgtcgctatatcactgcgctgcctccgcatagtctaacaattatcaaagtaaatagt

SEQ ID NO: 13656 - DNA, 504 bp, Emericella nidulans
actgattgtttgcaagcactgctcgctaaatgcacgggctagcgctgcttctgcactggtgcggcggtctttgggaaggccaaaaagatcaccaaccacagggccaattgtacgggggacccctagccattaattggctgggcttatcccttagcgagactcattctggtggatggacaaggcaattgttgattaccgggagtggctgcacactttctacgccgtagccacgcgcagaacctgcatgtgaagacgagcctgactggatagtccagcgaatggctcgaaatgaggataggagaatttatgagacggcctgagctggctagtcttgtatatggaggatcataaaagcacatacagggcagcgatctgcggattggccgctagtcatgtgccagctgctcttgagaggacaaaaattaccggctcaatgagttgcagagatagtgacggagcagtttgaacgatcgtacgcaaatactccaagggttgtatcaggtt

SEQ ID NO: 13657 - DNA, 589 bp, Emericella nidulans
  unsure (1)..(589): unsure at all n locations
ctcactatagggagacccagcttaggatcttctctctcgtttcgagcgagacggagcgaaagtcgatcccgatctctgctttatcagagatgacgttctccgtctgcccagcctgcagacttcccacggtaaggacgcccacgtcgtcggggtcaagctctctcgagatgacgccttgcaatcggaccacgatatgcgctgcaaggagcaccgggtcgacagttgtgtgcgggagggagccatggtccnntnggncgaaaacggtgatcttcatgctatcggcggcggtcatgtnnnttccagttttgcaattaacggacgggatggtgctctccnattacattcttgacccgttatctatttcttgaatccggtatttttttatattttttttantttttattactaattttctactctttctgttttcttttttttctttaatctgtcttgtntacttcgtctctttccttttcttttttttatttatatctatattttctcttattannttgttttttttctttatctatttctttcaatctttacatctctcttctttaatttgttaccctcttattgctctttc

SEQ ID NO: 13658 - DNA, 667 bp, Emericella nidulans
tgatgtcttcggatggatttgagtaagaccgtcccattagttttatttataaaaaataaaataatttatatttagtggataatttataataattttaaaaaatttctctaataaatatataatattttttaataaaattaataaaatttttaatttatatatattatattaattaaataatttataaatataaaataatataataataaatttataaaaaattataaaaaaaataataaaaattttataatttatataaaacaaattaatttatattttaaataattaaattatttaatataattattaaagaattgcttattacatatatatataatataaatattatacatatatattatttataaatatatcatttttataataaattattttatattatattattatataatattaaaatataacttattaattatttttataaaaaatattattataatattttatcattaataatgtataaataataaaataattaaactaatataatttataaaaatttaaatttattttaaataattatttttaattaaaattataatataataatacaatattatatatttaataataaattaagtatgtaataactataaatattaaataaaaattagaaattataattttattattaaataattaa

SEQ ID NO: 13659 - DNA, 526 bp, Emericella nidulans
tcgataactgatgttttcttcactcaagggtatggtaagcgtcgcagtagctagtaaggcgattcctaggatacacccgaggaataaatacatgctgaacttgtgcttcctccagcggcggaggacttctgccatggacccagcagggagcggcatggcaggtgttataagtggagaggttgtcgatcctgcttagcatcgactatgcttcgtcatcgctgtggttctggtgcgtaacggaaatccagttagagattctgtttcacaaatgagctagaatagagtacctggagggtgcgagatggcatagagtatggaaatactgacacaagagtgatggtgagtcgggtacatctgggagacgggatgcgtgcggggaaatataattaactgcatgcgccatctaccccatatcagccaacagtgctggattggtctattcttaccgcgcttgccttgtttcaaattagagtattctctatgttgtcctccactcacgaatggactccctactagacgagagagt

SEQ ID NO: 13660 - DNA, 540 bp, Emericella nidulans
ttctgtgtacgcacataggacggtcatactgtgtccatctgcctcacacagccatattacgactttcttggctctagggtaaatgtgcccgataacgcctcctcgaagactacacttcctgatggttgtctgctcagtgcaaactgcatatgaccacaggcatgcggcattcccctcctgttggcgcgggtggcatatagctggaaccccattacgcgtactgccaacccaggtggccccaactagctgtcttgtatctaatgggcttggatatctcacatgatgaacaggcctatcttacctggcctcactttgaggacgaggatggactgcctgacagcactctgcctatctggactacaagcattacgagcatcaacccgcgtgcagagcgcacgacccggtgtccaaatattgaggcttcaatcacatgatcaaggctcctcgtatatcgacagtgtgctttgctgattttctggaggcaccgtgcttggagggtgctcaggccacaatgggactatgtaggggatgccctggatc

SEQ ID NO: 13661 - DNA, 459 bp, Emericella nidulans
gctgattctagtcgaggacccatcaacggcccagagcgctgggaacaagggcacgggggattttttttgtgttgctacttgttatcaacaaatacaggggctaatttagcagggcaccgtatggtaacagcctccccgtaggcgtcctcaataattctgacattgctcctaggagacgataatttttaattcacgctagtggctacgaaaacaatacctgggcaagggcaccagtagacactgagttgccgcaccacgaaataatggccaggcctctgattgcgttttgattaacagtacacctcctcagcgatgacacaagcaatgtggcttcattagcattgtgtgagaacccacgactgtctggggtccatgtcactacattgtagagcaatgtatctccgtatcggaagtgcctaacactgcgactaatgtatatgccgatactagggtacaccg

SEQ ID NO: 13662 - DNA, 702 bp, Emericella nidulans
cctttttctcaatttggtcggcttcccgatcgtttgaagaagaggttttgtgttctggaatttctatactatgtacatttctcgcggcgttactgagcgctttctgtaatctagcaatatgagtattcttaatgcaagacaatcgaatgggccctgaactatccttagcgtaggtctaatcactaggtcactagtttacaatccaagataggcatctctctgggtcaacatccatgtcaaactgccggatgcgaccagcaacggaaacacaaaccggcccttgagctgcgcactcccatatcccagccattccacaacaaagtgtaccaaggcgatcccaaacgtccacgccgcaaggtcgtacactacaggagtcgtgatattgtaggctgcagagaagcgaatgacagcagagaggaacgtccaggtgccgaagagtcgggacgagtgcgcgttggtgtgcgggctaccatccgctaggcggccattgtaaagctcagacgtgtaggagctggagaagtaggcttggacactgttcgcagcggagacgacagacacctaggcgttgttagatttgcttgatctgatacggaaagaatgccgtctaccaaagcaagccacttgggaagcaagccatcaaacggggggaggtatgataaaagctgttccatggcgaatctttttttattgtggtatcggtat

SEQ ID NO: 13663 - DNA, 988 bp, Emericella nidulans
aaaaaaagaacgcaaacaggagaagatgtgtaactgagaataaaccatatcgactaaaaaaacagcaaaagaggaaagaccagtaaggacacaaaatcaagaataagtattgcccgagaaagaatgcgtagtaatagaagaagataagattggagtaaccaggcctaccccgacacaaagtaaaaagcaagaccataaagctaaggataaaccaagcacaaacacggaatcgtggcaacccacaaaatagaccagggcagacacacgaattaggccaatccgattgcaaagacctctggcccataagggagaatgctgctaaggaaccaagagacgctacggcaaacggatttatgccttcaacaaccgccaccccgacgacagccgctgcgcagacagctaagtccgcctctgcgccttcgtctgcggccactggttctgtccctgctgcccctacaactgcaactgtcagcacaacgacatccattgccaccagcgtcggtaccaccctcacccgcacgaccctggccaccacgactacggccgcagccgctgagccttctgcgtcggctcctgcgcccagcggcaacagtgctagtggttctaaccccttgtacgctcagtgcggcggcctcaacttcaagggagcgtctggatgcgtcgccggtgctacctgcaagaagatgaacccctactactcgcagtgtgtctctgcgtaggcagctaagtatagtgggtatcataacgctgcttgtgaaaagacacctgtgtattatcaaacactctcttgaatgtggatcacatttttttggcttcatatttttagatctcaaatgtgtatattgtagttgaagtaagccgatcttagggtaacacaagtatacctcaccgtagcatggatgatatataaaactgcatgtctgtccaaactgatctatcataccgcaattggccagtcgtcggtcgacggaatggaagagacgatgaa

SEQ ID NO: 13664 - DNA, 526 bp, Emericella nidulans
gctgattgttagggaacctgcccggtaaatgcactggcaagcgcggattcggcactcgcggggcgtttttttgcaagctcctagaggggaccaccgggggcgcgtaatgaacgcgggtccttttgggaacaactagcatggaaccgcccttagcaatacttaaacatcgagacgtacaaggtaagtttatatatccaacagtgcctgaataactttaatgatgtatcagtagactagtcaattggtgaagaccagcctcattataatggcatgctaattgcatgaatcgagaaaagcattgattattatgtggcaggagtcaccgagactagcctttttggtattaagggagcacatataacgtgaaggtattcggtttgacttcaaagaatagggagcttgctaacgactagctaaaacttgcatctacagcaggagcggtcttttatacaaaactgagaaagcgatcgaacagaataacgttttcatacataccatgctccaaccattatgagagttgcactac

SEQ ID NO: 13665 - DNA, 419 bp, Emericella nidulans
ccggatggttcgctaagctggtcctacttcggccgggctcgcgctgcgtgtacacgggctcggctcttttttttttgggcaaaggggtgaccctcaccatatcgggtttttcaggactccttgaggaccgaactgggtttgctctgacaggttcatgtcaaaaaccaggggaaggatgagccaactgtttattaacatcagctggtctgggaagtatacgatggggcgcttggaaagagttccagtgcagcctagcttccctgaattctccagagtacggggtgagacgacgggagcactacggcttctaaaggcggggacatcgaggatttggcaggtcgcttgaaaattgccccttcttcgagaaggacggttgctatactcccaggtacctttcttgcttgcgtggaagatcttaa

SEQ ID NO: 13666 - DNA, 907 bp, Emericella nidulans
  unsure (1)..(907): unsure at all n locations
gattccgccgcaattaaccctactaaagggatcggttagttgcaggcaaaagaggaactaatgattgatagcctgggctggtaaacgtagaaggggagaagctgtcagtggaaggaataattttttcttcttctggtagtcccttcgggtcgtgaggatggcgatgatcagtactaattcgccgcaaaaggcacgaacgagcagcgacagcaacaaccacggactccagcaacagacagtcgacgctgttgatgggcagaacgagcgtgggcgttgatcgtagttgggagggggtggatgacgacagggatgtttggattttgaggtgagggtgtttttattgtctcgattatttagatatacgtttactatttcctcgatcttttatgcttctttacttctttgctttcataacnnacgatttctcttaatcctcccgttcctgtttttttcaataaaatatcaaaacgttaacactagtcctctttatattacttgcgtttcttttattttttagtttttcatcctcatctatccttaatctatttttattttatttgtttcccttatttttcttattaatatcatttattcttgtatatttttttttagttataatatcatatttccttttacttattttttatctcctttatttttatttttctctatattattttctttctcattttatttctttaacttatatcatcttatatttactttctttttttctatttttattccttcattttctttttatcttctattaccttttatcactattttcttatccctctatcttattttatcattttaatatatcttctaattttcttctattattttatttttctaatattttttctttattattcccaattattacttctcctatctactattt

SEQ ID NO: 13667 - DNA, 578 bp, Emericella nidulans
tagatcggcccgaattaaccctactaaagggatccgtcctgactggattagcccttggtgctgcatgggtatggtgcccattgacagctagtagtcgtgacagtccgggcgagccaggctacgttggctccatgaaatgttctggaccgcatgatgggctaagccaatttgaacctcatacgcttggactgatcgagaaagggccttcgggcgggaggcgcacccaaccatgcttggatataccgcccgccctgaaggacacattgttcagagacgtgctcattccgaaacactgattgacttaatcgcagtcactcattcacggcttcatgcctgaaccacaggctttctgccacatgattttgacttgctgaataaagcttgaagtgcacaaactggcctagccaggccagtctgagcaacaactactacacgcacggttgattcacagtcgactggacgtgatacgccggaactgaacacatgcatgaggatctgacagttctcttgctaagcaaaccgcttgtggtacgcacaagctagctacactatatctgcttgagaactggcatactatt

SEQ ID NO: 13668 - DNA, 980 bp, Emericella nidulans
  unsure (1)..(980): unsure at all n locations
cattctttttcagtatgatttatccgcgtatccagattgccgcgatggcgaggccaatcgtccgtcttaccgagaaggaccctgatccctcgaccctggagaaggtcaacggcgatctgaagaagctagaagtgacaaatgagaagccagcgagtcatagtcgcagtgcgcggtttctgatatggacgattcttaatgtcacttcgactgtggggattgtgagcgattccgcaattatagtgtctgatcgaccgcgctaaccgtccccaggtattcacgaacaaatcggtcatgtcgaatccttccttcagtaaccgacaagtctccctggcctgttaccatttctttatcaccggcgctacactctgggcggcgtcgcatcgcttcttcggcgcgttcgtccccaaacccatcggcctcaagcaaatgaccccgatcgccgccgccatggccatccaggttgtccttcagaacttgtcgctcgcacattcctcagtcatgttccaccagctggcgcgtcttctcctgacaccagcagttgcgttactgaactacgtcctttttcgaatcaagactccccgcgcggcgcttatgccgttggctcttttgtgctctggggtcggagtcgttacatactacgactcgctcccgtctgcagatagcgggagctcgacgtctgctcgcggtgtgatttttgcgctgacggccgtctgcgccagctcgatctatacggtctggatcgggtactaccataaacggtatgaactgagcagcatgcagctgctcttgaaccaagcgcccatcagtgcgtgcttgctcttgtgcgctataccctgggccgagacgacccctgccgtgtcgtccgtaccgacctacatgtggagcatggtactgctggtatttnggacgttctcgggcactcttacagcgctaactggagatagagcgggctcactgcatgcatggagaacctttcccag

SEQ ID NO: 13669 - DNA, 961 bp, Emericella nidulans
  unsure (1)..(961): unsure at all n locations
aaaaaaaaaaaaaaaaaataantaaaaaaaaaaaanctcaataaaaaaaaaaaaaaaaaaaaaaaggggagaggtaaattaaaaaaaaaaacaaaagagaacaaaaaaaagagaagaaagaaaaagaaaagagaaaaaaaaagagaagaaaaaaaaaaagaaaaaaaagaaaaaaaaaaaaagaagaaaaagaaaagaaaaaaagaggaaaagaaaaaaaaaaaaaaaaagaaaaaagaaaaagaaaaaagaaaaaaacacaaaaaaaaaaaaaaaaaaaaaaagagaaaagaaaaaaaaaaaaaaaaaaaaaagaaaaaagaagaaaaagaaagaaaaaaagaaaaaaaaaaaaaaaagacaaaaaaaaagaaaaaaaaaaaaaaaaaacaaaaaaagaaggagaaaaaaaaagaagcaaaagaaaagaaagaaagaagaaaagaaaaaaaaaaaaaaacaagaaagagaaagaaaagaaaagaaaaaaaaaagagaaaggaaaaagaaaagaaaaaagaaaaaaaagaagagaggaaaaaaaaacgaaaaggaaaagagaggaaaagagaaaggaaaagaaaaaaagagaaaaaaagaaaaaaaaaaagaaaaacaagaaacacaagaagaaagaaaaaaaaaaagagaagaaaaagcaccgaaaaaaaggaaaaagaaaaaaaaaaaggaaaaaaacaagagaaagaaaaaaaaaaaggaaaaaaaaaaataaaaaaaagaagaaggaaaaaaaacagaaaagaaaaaacggagaaaagaagaagaaaaagagaaaaacaaaaaaaaaagaacacgaagataaaaaaaaaaaaacagaacaaaacaaaagaaaatnntattaaatagtaaaagaccaggagaaaggaaaaaaaaagcaagaaaaaagaatcaaaaactcaagaaaaaaaaaaaataaagaaacaccaaaaaaaaaaaa

SEQ ID NO: 13670 - DNA, 1025 bp, Emericella nidulans
atcaggtaagcacgatttttagacacattatgtcttcctcgacactcaaacctagtgcaatttgtgatgtcaaatgattactgtattgacctaggctgattgtcgatgataatctctaataagagcggttaattcatcaggctaattaagcaatgcgacatcaatggataaagcccagagaaaccaaagatacggtctatgtatcattaatcatggagctacctgtgcatccctatgggcccttgccataatgtgtggtataccaagccagggaggactgcctggattcctacctgcttgtactacatgacaacggcccgaagagttacgcaaaccataggtagcccaatgaaacttttaatgtttaaagtctccgcggagctactgcttgcgtcaaatatacgcactatctacgacggcactataatcaaactatccttgtctctgggtatcctttgcagctgcaagataatgtatccgaacaccagctttgcttaacgtaagaaatctagagagccataggtcctatacgtcacgtttggcatatctggaacagtggctcgagtagaatacagggctagaacttatggtagatatattaaaaaggcagggaagcccaataaaaagcaattcaacactttagggtacctctatactgttcaagctcatatgcacaaccattctatcattgcacactgaactctgagcagcaaaattcattgtcatgtccaaaattcgcgcacctaaatttgtgtcggaggtgattcataggcgagcagatggctattggattgacaagttctattatcataaagacgacaaagcccctggattaattgtgtatgcccgtaactccaatcccttgccccttgatatgttgcaagtcagttctaacaatcgatattggtgttcaggtccggcctggaagggaaaatcgaatatcatgaggatcctaaaaggacttgtcagtgttccagtggagctgaatctcattggatccctttagtagaggttaattggggcta

SEQ ID NO: 13671 - DNA, 499 bp, Emericella nidulans
gctggtggtttggggacggattgttccttcagcctgcatgtacgcctgctgcacaggtctgggatttttttgtaagggccatgggccataaatcattggctcctgaagtacacggggcctttaggcaacaacttgcttggacttgcccttatccagacatagactcgtggatggatatgccaagtgtgtattacttgcagtggctatggaatttgtatgccgttgcgcatggaaaagttatttgtgctgacgggctgctgtgttgaccccacacaaatccttgaaatgaggggaggactatatctgagaaggatggtgctacctggggtgtagtctcgcgtgtgattggagcacatgaaaggatgcgaccttttgtttgtattctagggacattccatgtgctttttgaagagcctcagccatgcgtgctattacttgcggagatgcttaagaatcctgtcaggcgattgaactgaatacccttgggtttaggggtagc

SEQ ID NO: 13672 - DNA, 1595 bp, Emericella nidulans
tcatgaacatcattcttctcaccctcctcctcctcctcctcctcctcctcctcctcctcttcctctttttcttcttcttgttgttgttcttcttcatcttcttcctcttcttcatcttcttcatcttcttcctcttcttcctcttcttcttcttcctcctcttcttcatcatcgtctccatcggttgttgggcccctaggactagtcaaatctaccgttctttgtgcataataaacagctctatcgatatcagctgggtcccctagtctctcgaaccgtcgctcgtagcaaatgcccaggtttcccaggaacatcacgaggtgcgccttgtcctcagccgtctctactgcctcatgtgccatctgcattgcagtctccaggtcatccaaatcacccagcctggtatagcgatacccataaagcagacagagactatttttacactctgcctggttacctggactgcagagatcgagtgcctggcgtgcagccgtgatgccgcgttccagatcgttgatatcctgattccactcaaatcgatcgcttagaaaggtagccaagttattgagcactataacatgtagtgaacgctcgctaacggtctgctgcgacagcgtgacgagattaattgcctcggagatatcctcgacattgcggcacgcctcgaaccgctctcgaagtcggtttccaaggtcgttcaggtagatgaatcgctcgtgaggtagtgacagctctagcgcctgtcgggcgtgagctatcgatgcatcgagatagtccgtctcgcctgtccggtagtaattctctagtaacgctcgtccttgcaaacccagctgcgcagctacgcgggagccatccatcgtggcaatatggtatatttaggtaaggaaagatgtctgagtagcccgagctgggctaaatagacggtccaggggcagactactacgttaagcgcctggcggcgtactggcacaccccctgcaggaagctaaggtgagtagcgctgctctatggcacatcgtgctagtccttgtttgatcctgtcaagcgctatacacgcaaaagaggggtaatgcacacgcaatcaacccgtcgaacatattccaggacttaagtcttcaatttaagaaatcgcgtcctgtttctttctcttagggacggccaaatctggatccgctcacatcctcgggcattcattttttcttcaaggatggcctcttgccggctgtcctcacataaagacttgacttgtacttgttaaacagtatctttacaggggccggttcctctgggatcgtgacttccatgcggtttggtgtcaaatgaacaaatcatggtgttttttatggccgtgcatataatcctcataaatacccttgctggggaggtttccttcatcactttgtcgctttaaaaaatttcgccttttgatactcgtgaaatggtatttttcgtcccctctacctattgttgttcgccccgaataggctttcattcttcttattttaattcctttctttagctctcttcttgatttttttttttttatatgttttttttgtgtatttattgttatttgttacaccacctcccccccg

SEQ ID NO: 13673 - DNA, 1001 bp, Emericella nidulans
atattgtgtgcagattgttgatgcccgaaaccttcttctcttccgctcagaggatctcgaaacctacgtcaaggaaatcgaccccaagaagcgaaacctactactagtcaacaaggctgatatgttgactgacaacaagcgcgaaatgtgggccgactactttgagcgcaaccagattgaattccgtttcttttccgcacagatggctaaagaggctaatgaagcccgcgagaatgaaggcgaggatgaagataccaagtcgctgacagaaggtacggagaatttgaatctacaggagtccaaggagaaggaagccgacggaggcgtcgatcttcccagcggcacaaaagccccttctcccaagcgaaccaacatactagatgtggatgagcttgaggaacttttcctttcaaacgcgccagatgcaacaaaagacgatgaagatgaacaagatggtgattccaaacctagaaagacagtcattggtctagtcggatatcccaacgtcggaaaatctagcacaatcaacgccctgcttggtgcaaaaaaggtctccgtttcgtccactccgggtaaaacgaagcactttcaaaccctctacctctcacccgaaatcatgctctgcgattgtcccggtttagtcttccccaatttcgcctccaccaaagccgagctcgtcgtcaacggcgtcctccccatcgaccagcaacgcgagttcaccggcccagccgcactcgtcgccaagcgcattcccaaacacttcctcgaggacgtgtacggcgttaccatccatactcgcccgatcgaggaaggtggcacgggtgagccaaccgcccacgaccttctccgcgcctacgcccgcgcccgcggcttcgctacaacaggacaaggtcaacccgatgaatcccgcgcagccgttacatattaaaggattatgtcaatggcaaacttcttttctgccacccgcctcctgccaatgaagcagagggcgaagaacaaat

SEQ ID NO: 13674 - DNA, 873 bp, Emericella nidulans
  unsure (1)..(873): unsure at all n locations
gggggccgggggggggggggttntgttgggnntggggggggtggggggggggggtgtttttttaggtggtggggtttttttgtggggggggattttatagatgggggattggatgttccctttgtggtttttttatttttgattgtgtggtttatattaggattctttattagattaaattttgttttttagatttggttttgggtttttttttttgttttttttattattttttagtgtttatagttattttttttatttttattataaatggcttttattttgttctttatttatattgttttgtgttattctttttgggtttttttattttgttattatttttttttgttttgttgtttaatattacttttttttttttttgttgtgattatatttttttgttttattttattttttttataacttgttgtgttttaattnttttttgcttttaattttgtgtattagtttgggtttgatatttttgttgtaatattttttgtttttgtataggttaatttaatttttttatttttattttttttttttttgttttgtatttttatttatttgtttgttttttggtggtttattttcttcattatattaattttacttttattttattttannnggcggggttatttgtttagtgtgtatgttttatttattggttatattcttattatattttttttattttatcttttttggttttttttcttttgaattttattatttttattttttgtgcttgattatatttgttaaataggttttcttgattnttttttnnttttttattttgttttttttattgtttatgtagatagtgttagttnttatgttattttttatatttttatattt

SEQ ID NO: 13675 - DNA, 879 bp, Emericella nidulans
  unsure (1)..(879): unsure at all n locations
agctagactcccctacatgaggccatagtcaaagaggcgctagatggctccctgtgcgccaatgggcattccgcacatgagcacggaaggcgatatctacgagggatacctgattccaaaaaactcgctgatcatgccgaatatctgggcttttacacacgacgcctctcactataaagacccggcgaccttcaatccgtctcgcttcctaggcgacactcccgagccagatccgtctactctgacgttcgggttcggacgaaggatttgtccgggccggctcctcgctgattcgagtattttcttgaccattgcgcaatcgttggctgtcttcgagatatcgagtgctggagaggacgcagcgaaggcggagtttctgccgggcgtcatcagccatcccgtgccatacaggctggatatccggcctcggagtaaagggcacgaggatctggtcaagagaatcgcggcggagagtccgtttggagaaggaggtgcaaaggagctggaagagattgttgtgtagcataagggcaatggtatgggcaatgaattcctcaacgaagcgctagtcggtttcttacagggtagagaacgagagatcttttcaagagtataagaaatcgccatctatttgttcaagccaaccgcacagcaaactaggatcagggaccctatcaactggccctgattataatctaagaacgaagatagatcgtctggactcaggacctcaatacgaacttctcctatcaatcaggtgcatctaagcctggacacactggtggtagtaagggttccactgcttgcaggtcaggccagagcactacgggtnggcaaccttgtagttcattccaccgcactgctggtagatttggatgg

SEQ ID NO: 13676 - DNA, 831 bp, Emericella nidulans
gcccgtgccaacggtcgcatcgatgatcttggtgagggattttctgcttgcccagccttatcctcctctagacgaaggatggaataatccgtggtcgcccttgaatcagcctggatcgcgtacggcgtcaactcaagatcctctcgtggctttgaccttggcttcatcgccatgcgattgccttctgcctagagatagcagatcaagatgcttcaagagtacgcaattgtctataaaaaaagaagcttgccaagaggtgcgcgcaggaggttacgtgctgtcggtaggcaacttcaattgagtgaggcgcaagcctcgagaccacaaacccttaccccatgattcgtgacatcgtcttggagattggacggcttcaatttcacccccacgatggtacggtctagtgtctgctggcgggatgcgtatagcgctggcggacggccccgtcccagcctcccaacccggttgtctccttagttctcgaccaaaagagttaacttcgaggcaactagaagacgggacggcgcagaccagaaacaactcatcataacttggggttttatgcgtgagtcttttttgtcgttcgaggttgaccgttgatgtccccgcgatatcttcgaacacgagctacttcgttttcgtatccgctcccggggaccccgagcgtcgacgccgactttggcggtccttttagcaagaatccggccttcgaaggaacagtagactgcaaataatgccgctgatgatcaccaactggggaaagaggtcgatttgacgccttggcggatctctccgtgcgttctttgcgttctttgaccttctacttcgggt

SEQ ID NO: 13677 - DNA, 414 bp, Emericella nidulans
ctaagattccggccgcaattaaccctactaaagggatcaaagagacaagagagcaagagagagatcatttggagttggaggttccagagccggagctgaagggagacctagtcctaattggggatagcccgtcttgactacagctgattatgtgatagcttagcggtcacgtgacaccagggcagccattgtttactgtgcaggcagattccgtcacttcaggtaagttcaggctgcccatggacatttatttcggggcaatcaactatgggagtacgaaatgtcagtatgctacaatagacacatttacgtacacggagggctaccacttacattcggttgtcgcggcatccaagcgcacatatatttttaatccggtcgattggttaaaggatttcattcctcctgggaaaa

SEQ ID NO: 13678 - DNA, 516 bp, Emericella nidulans
actacagcaggcctgttctcgaaatgctccacaatgggcggggcaggcccggactatccacttgtacggccgcgttttttttgtcccttcaagttaacatcgactgaggggcatcttgacgagtccatggggtaaacaaaccataggatcagccagggtcacaccagacttacctgcacggatgaaccattggtctagaaacaccaggggcttctgaaactgtactttgcgtacgcatgaaatacctttttgttgaccaactggtgcggtaattatctacatacatgttgggaattgttggttgccaataaacatgagaccgccgggggcccccgtgtcaaaacacaaaggggaattgaaactgagcactactagtgaacctgagacgactacatttctcctatgagaccaaatacggctccagatagcactaaacggacgatggcgccacattatctttgatggatatctccggacctcccactttgagggataaaacgcaaatactttctaccc

SEQ ID NO: 13679 - DNA, 1009 bp, Emericella nidulans
  unsure (1)..(1009): unsure at all n locations
tgcatctaaaaagtctacggcagcccgcgacgactcactgaacggatcctggtattttccattaggcgtaaacccacctaatgaattcccgggccgggcgtcgctgcgaggttgcgtagctcgtgaaggatggcccatggggatgggcgaaacgttccgagacggtcgaggcgagggtgtcgcgccacgcgagcgaagggtcggcagctccgaagagcccgttgtagagatcccggaggacgaaggctgtcgtccattgttatctctgacatcatctaacgagatcagacggcggggtcgaaggttggaatcggatcgttgagtgaaggtatcggcggagccgcttcgggaactcattcctggcgagaatggatagagggatattgtaaagagagacagtgcctttagcactcgggaaaggcgtttatcgctgtgtcagagactgccggggcacggtttgccatcggacgcccctataatagaccattcgtcatgcggtgtctgtatcgcatccgtgtcctctatcggcttggtttccgcccgtgaaagcggaggccaggattgttgcgtctgtggtagctgaggaaggaaatgaccgagatattagcctctataagcagatagggagcgtttgagagcaccaggaaggtaagcagcagacggtgggttggagtttggnnnagcnggaatgcgcaggagtggtttttgcggtagctcctggagatgatacacttccaaactcgttaactctggcggggcccgggtttaaacaacatcgcttaatgggttgagttcgacacctagtgcaatttttatttgaggccatcttgatgtgcaaacttattttttttgtgcccctttggccttgcccctttaccaagggatttcccttattagctcccttaaggaaattttatgctgcttaggttccaaattatggtgggcagctttaaaaaccgggtttttcccaccctttttttttttcaccctggttccgtctaaatctttt

SEQ ID NO: 13680 - DNA, 1089 bp, Emericella nidulans
caacatgagaattcgcggccgcataatacgactcactatagggatccccgcatgacggtatgctttcgataagcccacgacgttggcatagacacggatcctgatatccgcacgtctgcctgcggcagggtcgatattgtcaatgtatttgcgcacatccttgacaaagcgttcagctaacctagcaccaccgcgccggccctgtgttacatactccgggttaaactgcgcgtgggatctggtcagcatgattaggccatctctttcgaaggggtaagcccacattcatggcatcgccatctaccagaacgaggatatagctgcacgatgcctatttaacatgagcggcgatcatctcacaaggaagcggaaaggcaggagcctcgacctgagctagttgtacagccgccgctctgaagtcgccgcgtgacttcggaaacgcagatgccgtgccactttggaagcttgggttatcgattttgtcttcctcgcctgaaatgaacaggacatttgtccgatcatttgtctcgttgatcgactcctgcaatctcatcaactcctccaatttcatctccagttcattggagctgatggagattttctacggcaccaccacatttatcaggtctaggtccgaaagaagggaaggaatcaacgaactgacaagacagcatttgtgctgtcttcaacagcgcgcgtcacggcatgcgccacatctttgatatcgaccttggtagccgggggttccacggagtgtaggaaccgctgttggaacttgattatgtcccgcaagcccttaatctcctggactggatcactgttcaagtgatctgaattcccataattatctggcttaggactgtgagttgtagcacgaagcgcttgaggttgacttgcatgccgattcctagaaggttgagctcgagttgcaggaaaagttggttgcaaggcctcaggctgacctggagtatatgaaagggggtttcggtctccagcctcgagcagcacgggatactcccctcatcgtgggccaggcaatgggaaatcaacattcacgactctgggtgttttttgggagagggagggaca

SEQ ID NO: 13681 - DNA, 122 bp, Emericella nidulans
ttttctccgtatattgcgcaagatatcttataagggactaaagtacagttggcatcgagcttgtaagtcgcccacacgttgacgaagcgctttgactgctcgagacggtttacgtgctggcc

SEQ ID NO: 13682 - DNA, 1360 bp, Emericella nidulans
ttagggttcaaactcgactgaatgtgtcattgttgcaaccattgtacatttcttgaaactctttcctaccttatagtgaacataatatattctctttagtcactacccagtacaacattttttggccctgtactgctggagcacattgcatatataaggatgtcgaagattttcagggtttacaccaagcgcgcttgagttagcaaactgggttgttccgggcactcttaccctgattttcgagctgtttggcaagatgacggtaattgcgcctcggaatttgtctactatgcattgcaaggtcagcggcaaatgcagctttccctcccaaggtagtcttttcaatcaattgcttctgtgctccagcccttctgccccttcatccgcttccacctcctctgcgcattctctttcccacttcaatagaactgtgaagcacagatctgcctggggagcggagggcacttgctagctcattatcattatcttttttattctttcacagtggacagtttacaccagaaacgacggcttcagaagtactctacatatacgtggcatcaggtcgcagcgcagttattctggcagagatcctccggaattctcaaatcatatacaatcatcggcctttgtccacttcgtccacggcaaggtaaagaattatccattaccccccattttaacagtgataggatagtgccgcaggccccaaatagtactgttacagctattcttttgccgattgacaatctatgtttccactgcctttcttcgcttgagtcagcagcagggctggacctgatgggatatataagtataggcttaggggcacaatgcagtaccattgtggctcttacaagactttgagcaagagatccacttcgagcttttagtgaggtactgacagtttcatatacctcgatttgtcctaagtcagggtacaacggatctcaaactggcgctaacagacgcttgccagccgctattctcgcttctgcaagcctgcaatccaaagtttttaacttgaatatgcaatgaactatccataatatatagttcaagaaggttcgaacaaggctgcaaggccgtcggcgcctctctctccttgtatgtctagtcaacagaccccgactcaacaaagaccaaatgctacaggaccccctgagtcctcccctttattgatacccagagccaaagccattccagcacctgaaacaacaacatcctattggcctcgccatatccttcacagaagcatccctatgccaacctattacctcgccgcactgggatgagatgggaatacaggaagaatactaagatgatgcggtttagggcggcggtgcacgtgagatgaatg

SEQ ID NO: 13683 - DNA, 484 bp, Emericella nidulans
gggcactacaggcggagtgttagccaccagcccaccaaatgaaggggcaggcacaagatggccacacgaaaggcggccttttaatggaccgcagagccgaccagccggggcgggggtggaacacggccccagcggacaaaaaggggatcggcatagcccccagcaaggctcgaacccggaggagcacaggggggggggcatgaacccaggcgggccaagacatggagaaggacgagcgaaatagggacacctaggggggcacggaggtcacaggctaggccagccaccaggaatgaatgggaccagggggatgaagaaacacgcaatgtgtgccccgcaactagcaaggaaaacgagcctggggccacgctcgaaaaatgcggagggaccgcaaaccggcccggcaaaaaacaggggctcaaaaggggaaaggagaaggcgactaaagaaccccgaaccggcttaaaggggatgaacgcccaaa

SEQ ID NO: 13684 - DNA, 1120 bp, Emericella nidulans
tcctttcttatggtaggcttgaccaatcgactgactgacacggctcaacaaatcggatttcaagccctagcgtatccacctactgtactccacaactacgtacatgcttgctacgccctttcgtgaatcgtagcactactacaatcccatcaggctcctcatggaggtctttataaatgtagaactggactacgtaaccatgattaggtgacctccatcctttcctcttttcctacctacatatgtagacagaccaagcgcacccataatctaagttaagactccagccaggaaaccaggcgctaacccgcttaccaatgactaaggtctgtctgtctttttgcacctctgccgtttaccgggtgagcatgaaatgcctgccaaaaggtctgaacacttccaccgccacaagttaggaaatggacatgaaaattggccgatcactaagagcacactgcacacttacttacctgcacatcccgcctacgaatcacctgcatacgtaagtcggacaggcgtgcgaccataaaacaaacctgaaagcgagctaaagcgagctaacctcgccaccagcttgagccttttgaggtgttatgttcaactggaattcttaccaagtcggattattttcccaaacggtattctattccttaacgaagtagatagactggatggtagaaatagaacaggctaaaccctagagcactgtcgccataacacccatcctaaacgcctcatgcaatccaacatgtctttggctccacataaccttgaggtaccgctccgcagttcgattgtattctcggccccggttgtcgaacagtgcgggctttacgctccagctgcgaatgagccgattgcagttgcagtttgttcccgtctctgagcccgtccttgtccccgggatttcggctgcctttggcacagtagagatgggggtgccgaggctagagtagcgaatatcaggggtatccttccacgcatcccaatactcgtcaaggggatcggaaaagacacaatttcccgtgcctgtgcttttgcttgcactcgtaaaaagacatcggcatagtggctatagtggcagcattcatcctccggcgtaaggaggagaattgaaggc

SEQ ID NO: 13685 - DNA, 733 bp, Emericella nidulans
ttcgcggccgcataatatcgactcactatagggatcttgaaccgttcctcttggggatcggtttcccacccgagagggtgcatgtggtagacttgctcggagggcattgcaatcgacagcaatgatgacggagaggagggagtccaaccaacagtgtgacaaggcgaagagcagaaagggggcgccttagagtatttctgtcctctccagtggcctcggaccgttgactaactggcctccaaactccaagccactaccatctcactagcacagtagcgtaaggcgcaaatagcctagaattaccactaacggcaagtgttccgcattaataacgccgtctcgagccagccgttgcgatggattcgaatccctgtccgaacaaggcctacgcaatgaactgacaaccgactagaaaagggtagggcattcatcgcggtcaggactccgccgccaagcaatatgtgtcggcgagggcttgctcttacaggactctcctggcctttcacgaatagataggagggcctgttctttctggggctaaagctggcttcacagaatctgcatacttgactgaatcgccataggaccaagaccggttaagcttttttcgccacccataagggcattaacgccttcagatttggacaaatttcgcccgaaaccaaaaaaggggcccttggcaaatagggggtgaacctttttaaaacccctgagggcgcggtttttttttggt

SEQ ID NO: 13686 - DNA, 580 bp, Emericella nidulans
agttacgcaatgacaattggccttcctgcacaaccttgtcattaagtctccagcttataatttcctgaggtggcctgatatggatgctttcatcaagatccatggcgaatctcacattttcattggttcgcggccaggggacgccgttgaatcgctgaagcggcttgagttggtcactggcatctcttctgttgccaattttgcccgagattccaggagcagaagatttcataaccccaatggcaagcatgcccgctcgctcaagccgaccaccacagtcgcgaacctgtttttcaccaagtatgttgagggtaccgaggaaggtgctggaattgtagactttgacagggtcctggacgaactttcgcagaaatcgaagcttggagcatcaactgagggcattcagagagccgatccgcaatccatcatcacccgaaagtggtctaatacccacaatattgacacacttcagcttcttgcctttctgaaggccaagctattcgaaagagagcctatcattctgtacaactactttggcatgcacaaacgctctggtcagttacttagactaataccagac

SEQ ID NO: 13687 - DNA, 726 bp, Emericella nidulans
ttagagtgtgcgtttcagaaaaggcagccagtgcattacggtaaatcgcctgtaaagatatcctccagtagctcattggagctaaacatggacagtgcgctgacgagccgctggcattcttcgaaccttgctatcgcagcgttgacatcgctgcgataggtgtcggagttggtatcggggcgcgcttctagtgctgtcttttgtcgcttcgcgtcggtgaacacggttcgaagagtttggggctcgtccattgagaaaatggattgcagaagggttggaaacgtttgagaaaagtacaaataagcttcccctcagacgacgatcaagattccatcggggcgaacatggagcccttaaaatcgaaggctgccccgcactagttagctcccccgccactcggcatacttctacaatatagagcttctggatgatctggtttatactcggtagcctatcctctcccgactctacgacaaactaactgagatataaaattgctctgttgagtttcagatgactcactgtaatgactaacgcatggttcctgggttcacctcgaagattgctggcccaaggtgaaactatatattttggtcagagtgagtatggctcttttttgacaattagatttaggtgtgaataccatgatctgcttgcactcatctcggtgttcgcattgctggccttggttgtacaaccttgagaagggctggggtaacctgcggc

SEQ ID NO: 13688 - DNA, 1124 bp, Emericella nidulans
gtgtgcgtaacgacgatgctgtaagtcgaccgctccatgcgcgtgcggcctgatcaaaccgtggctgattgagtaatagtcctgcgagagaatccgtctttcactggagaactgcgaagtcgagaaagatatcatccacttcattaaggaaagaggcacgggtcaggaaatacccgctgccccaaagttcatcaacttctctcgaggagacgtgaacgatgccagctccgatgtgtccgaggaagaaggctattctgtagctcaattccagcgcactatcaaccctgcattccgcagctcctcaccgcagccatctacttacgagtctcatcatgaagcgccgcctgtggacctggctcagaacggtccttcaacaccttcgagcagagagcctaccgttcctttgcagaagccaacgcagccaccgatgcagccacctacgcaggcaccaatgcaggcaccaatgcaatcgccaatacagcagcagccccctcctctagatttccgccgaggaggccaccttccgccaaattacgatcccaaccagcacggtgagatttcggctgtgccacacaatgcgtatccaaccgatggtatgacaatgttttgccgaaccggtcctccatccgaacgcagctcaggaacaactagggggtaccgcccattcagccaagacttccatagtgaaggtttcaacgccactttgatatctagccaggagcccttcaacgccagaacagtctccgaccaagccaatatatggcgtggctttgccaggtattagtaggggtgagggtacgccggcgcaaaaaagaaaattttaataacaggtccgttcgacccagggcccccatgacaaaaaccgcaatttggaccctttagtttctaggccaagaactggaatttctttcaaacaaacattcttttaaagttcaatcctaaaagcttaaacctttcccctttttaaggggggttgtattgtcatattgtgtcttaacggttgacaaggtttttttataaggggaacaacggtgtgtgttctccaaaaccaaacccaagggggccccaaaagggaggacctcctatttgcttacggtttaagtggtaaatactccttttacata

SEQ ID NO: 13689 - DNA, 1369 bp, Emericella nidulans
aagggtttattaatgtaacctgccaattttgttgtcaaacccccccttttgccgggaaaggcataccgggggccaaggggttcttcttcaattccctcccccaattgtttggcattcccttccccaaaaaaggcccatttagatcattaaagggtggggggcccccgccccaaaaaaaaaagactcaaaaggggtctttcatggaaagagaaaaagggggggacaacagtacaatctggtaaggtaccaaaaccccgtgccccctccgggttccgggggctttaaacctatcaacaagatatgaaagtgtctatttgggccctgctacatttgatatctcagaggacaccctgaatgattgcagtcaacctcgagcacctcggctacgatctgagtgcacctgtgagacgctcctaataacataaatgccgaaccgaatgtgcgtgtggtctgccatcatatttcagatgcgcttccatggtatgtgatcgatgaattgggggcaatacatcctctattcgcctgtgttctctacaagggatacatctcgatatgcagctatcgcgaggcgcaagagagctcgataatcctcttctggcaactgctggagctacagccaatcctggagtcgatcttcgaccggaatcatacgtcacgttcaataaattccataggcatgacgataaaatcatggagggtacaagataatgggccaaaagactgagccgaaattgcacaagcccagggcctctgctcgatccatcaagggacgagggtgagcagccgaatcattgattaaccacctatccctgctgcgaagattaggcgaaatgcatgggaagctagtggatgtgtacaagtacacttggcacccgacagtaggtctcaggttcagtgctgcttcaggcacaaagtcgtcccatgaactgaaatttgtcgcggtatggtaggttgttgcgcattagtatgtacgtactggctaagggacgacaaggcgagatttaaactatccaagaacaccctatcagtcttagagcgcatcaggttaacgcaaataaggtgtataatgcgaagtaaccgtaatcttccgtgtagttggctacgaagaaaatccagcctttcgtaagacctttataatatattccctccggcttttccccttgatagacggcgttagtttgctccaagggcaacccgaacccaccgagctcattactgtactaaggctggccagacatattgctttgctcaaatgccgttggaactggcgaagttgtgcatgtgattgcttattattaccagtcttctctggtagaatacctactatctgggtacaatcactatgaaagtattatatgggttcaatatt

SEQ ID NO: 13690 - DNA, 439 bp, Emericella nidulans
gccggcgggttcgcttgctgctctctctctgctcaggcttgtgctgttagcgcaccggcccgacttccttttttttgctcaccgagctcatcacaaggctgtcggcatgttgactatgccttttgggcccaacttgctggggaccgcccttaacatgactccttcccgtggacggagaaggtacttgggtacaaacgccagagagggccggaagtttgcgagggggtgcctggacaagtcttttgtgctcaccactgttcattaggggcttctagcgctatctttgggattactgtaagtcagaaggtctctgtccgacggtgctaagcggggttgacaagagcaggcctctggtgactactacatggaaccgggaggacgattgtctccttttgacctggactgagcgcactggccaacaagattacacgtttcctcc

SEQ ID NO: 13691 - DNA, 551 bp, Emericella nidulans
gcggggtctccactagctatcataggggatagggacactggaactggtttggcggggtgtgaggtggtttgcgttgaatctagcggggagaacgcagaactcggccgtgaagactctctggcgcacatctaaagtggctgtatgaccgcaggggcacacaatcaatggacggtgatgtattaccagagcacctgtcgggttgcgttatatataacacacgaatcatggccatctctgagtcataaagtgcgcctggtgaaacgggagcatgccctagaggcttcttcatgatacagctgtgtggaatagggactgctggatgagacaggcatggagcactaataccctcacctgccagaccactgatatactataggttgaatctaatcacccctgtgaatccataccgagcctatgtactgaaggagcgggaacctacaatggtgggacctgttacgcgtgaggctcagatatacagctcgggtggtggtggttatatgagagagcgtgctggatagacactaatgggctaactgaacgtacattgagca

SEQ ID NO: 13692 - DNA, 1372 bp, Emericella nidulans
actcgtgtcctcgttgtcgatccggatcagaagaatgagagtcggactatccagtggctgcaccaagtgccttatgacgatctcccggtcttcatatggggtcgcatagtaaacggtacccttgcctgcaaggtttttgatcaaagaagccataattcgtcatgatttgcgggttctggttgaaaacagggaactcggtacgtcacggtggggtcccaaatctcgaaggcgatcggccgaggctatcttgaagagcagaggcgatcatggactgcccaggacctgggagagacgagaggttatctactctgctgagatcctgtgattcgcctactgaaaccggaaccggtatttgtcacgaggaaacggagttggatatcgaaggcaccggagaagctagccgggctattgaggcatgccttacggagtcgggagctggagaccgtgaacggtgtgcggaggttgctatcggagatgacccaagcttgggagttgacgaaccctccccgttgtcgtaccttccgggagacgccatattgagaacaaagagagtttataaagcgactgatagaaataagcgcgacaaaccgcgcagctgttttgtcgagcgatctgaagctctagcagagtagatagaagagatgttggtaggatagcttacgatcacgtgcaatcgaggtgcgcggtaggggactgaatcatccgattgataacgtaagctacagtacgttagaatgatcttcttctaccgatgcagcatttacagactcttaattcgattatcatattaccgcctaatacggaccgtggtgcctattggtcatgtcatgcagagcatccatttggatctcatacgccccaaaatggcgaaacggcttatttcggcacaaattgaagacttcagctttcagtccagaaggtaagggaagtcgttagcaatagaccgtggcacataatactctataaccatttctgatgctactaaagattgtttcaagcaagaacctcaatataaaggtttgaacggggcaaatgatgtctagctagtattttttagctgggcatgtccaagctaggtggaatattcagcactggggtcaaatgactgacgctgtctgccaattaccgagtagaggcgccaaagtcggataaaatccaccagagacagttccttgcccgcagggcttatgcaactcgctatagacagggtgtactgtaacgtcatggatagggcgggtgccgtatagtaacccgcggaacagtcacttgcaatgttcctcttgaatcaagatataactagtgtttcagacttggcagttgttggcaatgactacggaatagggccccatgccgaacttgttacctgacaaga

SEQ ID NO: 13693 - DNA, 1290 bp, Emericella nidulans
ctgatcttctgccgtcggcaagaatgcagcctcagggtaatcatcccgagacaggaaaaggcagtagatggaaacatcacaagtgaccttgagacccttctccttgctaagggcgatcaggcccaatatcctccttagacgtgacgctcataacgtggatgttgcggctgtggaggcttgccagaagcaagaccgacgcgagatccgtcgacttagcatctgtaatgataggcttgctcgaaggccatgcgccaaagtggctggtaacagcggcaaccttgctgatgtttccagaaagatggttgaatgggatgaacaaagagccaacctcgccagtcaactgtccaacttcagcagagttggaggaagttgcgacaaccgagaagttgtaatcgcagaaagaggccttgccggcgttctgctggacaagtttcagggtgcgagcatccgtgatggaggagtcgacgccaactggcatcacccggatcatgctgaaaccagctgcgatagaagccttggtcacagcctcaaaatccttggagtctgcacttccaaggccagggacgaaagcgccaacgttaattagaccagggaggataatcgaccggtggctggtctgatagtcgatagtctgcacattgagtgcgtagtggcgagcaatagcctcgatcaaaatcttcgcgttcttgacattggtcaccaacggcgtctggtagtctacagccatacgacgggtgcggtaacccttgctcatgtagttggcgggtcgtcggaaccggttgctagacggcaagttgatatagagatcgatgaggttgtttgccagatgctgagtgagggagtactcggacttgatatcctcatcctcaccaggcagaatctccaagtacttcaccggaacaccgttctccttcaagaaatccgcagtaccagaggttgcaaacagctcgaaaccgacatcacgcaacttgatgattgaaggcagcatctccatcttttccttgtaggaaccaatggagagcaggatgttgcgcttcggaagcttgaatccagtggacaggagtgccttcaggtaggcctcgtacttgtcacgaccgaacgaagcgacctctccggtggacgccatctccacgcccaagacagggtcggctccagcaagtcgagagaatgagaattgtggaaccttcacaccacctaggccttgggaatggtgaccgggggatactcagcgaaagaagcaccatcaatgccttagtcgccatctaataggtcaacacccataccttagac

SEQ ID NO: 13694 - DNA, 885 bp, Emericella nidulans
cagcgccatgagtgggtaaattttgcacagccataacattgatgggatcagttctcttctatagactgcatcgatttccttcataaatgtgacttcaaggaaaagcgggtggtagttcccaataaaccgtcgaggcgacattccagcaataagccttaacaggcatgcgttgaggtaactctgcaccttggtgcattggcactcgctcccgcgtattcaggcgatggtagttggataagcccgtcgtagatggggtgtatgtatcgtcgaggcatgataggagtcggttgctgaaagcagcgcacgatgcttctccaatgaatccaggctccagagaccgttcgtggactgggttctccgagtgtctgtcaaagagaggattaaacaagttactctcctctttggacagcggcggagattcgtcttgatcttcgctatctgtggtgactcgctcgtttcccaatgccgggctccgggcagcgagggctcgcaaacgcctgttctcttcttcgagtttattgagataactggcggcttgtcaaccttgatcacgctggttcttctctctgctgacctttcatctactcgaatctttcgctctttggcagggaactgacattcctcagcccgaccgctagataaacatccgtcacacggccgtttgccggagcatttggtcttttgggaatggcatctatgacaactacataactgtattagaatattatcacgcatgtggtcctgaagtgccacgctgccagaagccgctcgcgcgtgttggtcccgactactcatcgagtacacctttaggtagtgggttctttctctgccgtcggtaaactagtgcagtaatagtctgcgagtcttggtctcatggaatagagt

SEQ ID NO: 13695 - DNA, 716 bp, Emericella nidulans
acatgagattcgcggccgcataatacgactactatagggatccacgggtttccatgtccaagatgcgctccatgcttcctcccgaactgtgctctagatgcacaatgggacatttagtatcacagaggataacccttatcaccccccggagccacctgtgcattaatgatgaccagcgctctgatgcgagcgtgaaggtcaatccatacctccattgccatatagggaagcgggtggcggacatactgccggcctgtgcgagagatcctgctagcggagagcctgccagtgcggctggctgtcagatcggacggactcgttgcgaaacccgccgatatctacttacagttctttctcagagaaaattccgacagatgcgggccgcatgaaagctccctaaacatctggcgcttcggtggaaccctggcttccccagctatggcttactactttgcatgggctatttgcgcccctcttttctctctgattatgttcaggcccatccttccaaattacccctttccgcgttctcggtcctcatttctggctgtcccactacacctttctaatcatttcgccattttatctctttttatccctaccccaatagactttggccccccgggggacccctctagagcctccatacccccttcttaaaccacacgcgtcacaccctctatcgctttccttcctccactttggcctctccacaa

SEQ ID NO: 13696 - DNA, 483 bp, Emericella nidulans
ccggatggttagggagaagaccgacagatgaccgggcaagcgcggagggagcacgggcggggcacccttttttaaggccgacgagcggaacaacaacagggcgagatctacacgggcccaggagggaccaaccggataggcacagcccggaacaagacagaaacaacgggatggagaaggcacgggggcaaaaaaatcagaggctgctgaaccagaacgcgggggcggaaggaaaagcgccaagtgcacacgaacctcatagggggggcaagctagagatcggagatgaggggagcagaggttatcaatgggaagaagacccccattttggcgcaaagggaatcaataacggccatacaaggcggtggtatactggttaaaaccaagggacgtagcaaaagcacttgactgaagggcacataacgccgcctggcctagcggggagtcgaaagaaacagcttaaacgatggaacccgaaaacat

SEQ ID NO: 13697 - DNA, 150 bp, Emericella nidulans
tccaacatgagaattcgcggccgcataatacgactcactattgggaaccagggtcaccaaaaatagatcggggaccgtatttgccgttcccagcttgggggagaaccgtttggaaggacccccccgggtggatttcttaacctcttttgg

SEQ ID NO: 13698 - DNA, 1235 bp, Emericella nidulans
gtcacgcttcctgcataaagtaaggcacccttatcaagacatcgccgttacaaataagccagtaaggcacactcgtcctttgatgaagcggtcttatgaaactcaagcataccagtgctcacctgtagttgcgttagtgccaacctgatgcatgaagtggtaaattgccaagttacaggcactactgggcctgttccagcattccgatcctcttatcttgctggagtcactgccggaagtatatttatctctcaatctcatgtagtgtatatcgtggggatgtcgctgactcgcgacacttccggtcaataggctgattggaccggttactcagtgatcattgagaccttctgcagctcactttagctcagcagagttgccgtatccacaggcttttcttcttttttcgccaacggctcctctgatcacaacgcttaatggcgcaatgcttgtcgaatttataaaataatcacagggtcaggcctttgcaccgaagtaggccgaggcggctgtaaacctgcgccggcggtctttcatagagactcggtcatcctgcgtatcaagcactatagagtgcattctggtcctgataccatgtaaggtttcacttgttcccacagtgtgaggccctgcaaacaaatagccaactagcaccggcagaccgattcccttgacttggaactgtttttgtctcccagcgttgatgtcattccttctccaagaaatatatccactcgctcgctgtggaagggtggtggaagggcgagatcactgcgacacacgatgcacaccctgatgaaactacgaaggtgcgcattatacaacgttttgaaccagcttcaaaggccctcgcatctccatctttgcaacgaatatccccaccgccagtattgtccagcattgcataaacgactctaatggcaaagctctcgcggggaggggcacgtactagctgagctcggtataatatgaccaactagctttgcatgacggacagcatagataggtaggttattcaactctttaagtagcttcaggcgcaacagcgcaagtactgggtaggctgatgtactttttaccaaactgaggactatatacaattcatctattgagcattctctgccgttatacctcatagcattcctcggccctaaaaatcgttattcatagagaatttctgatgcttctgctaattatggctgctgagttgatgccaatttgcagcttcaggtcaa

SEQ ID NO: 13699 - DNA, 965 bp, Emericella nidulans
tatcgctgccgcaattaaccctcactaaagggatcgagaggacggcgcaaagttcccagaggaggatatgttcctgttaggatgagcagatccaaatggctatcatgagggattaggatggatgcggcttggtccctcttctttgcttaatgcaacccacctctccgagtgagccatgatcgaaccacactttcaattttcataactgttacctgcgcggcagtattgcccgacaagcacccgccgcgacaaagcgaggaaccgtgcacgccgcgttctcccccccgctgggagcgccatccattcacaaaagaataacccctatgcaccaaacccccacttagctatatccattcattcgcgccactcgccccccccagcacctctcacaaggcaccaccctcccccccacccctcgcccccgccctcacgcccactcctgggggcaagcccccttatccctcccaccctgcctccccaccctgccatcccccctcctactcttccccctcttaccccccccccgtctttaacccccccaccctaccccctccccctcgcccctcgcctctccttacccccacccctcccccccccccgccttcccccacctcccccccctcccgccttcccacccctcccccccccccgtagccatcatcgcccccccaccccccctccccaccttccgcctcccctcccctctcctcactcgcctcccatccacctccctcatcccttgcgcgccctcctactcttaccccctacgccctggccgccgcttcctcatcccacccactcgccctccccacccccctcatctccccttacctcccctccctctttctcccccactcccctcctccagccctctcctcctcctttcgcctcccacctcccccccctcccccccatcccccgccaccctcctttccccacccccccctccccctcccagccccctc

SEQ ID NO: 13700 - DNA, 381 bp, Emericella nidulans
gctctcagcgccttgtttacacagccatcggtggtcgggctagcgcttattccgccctcacgaggctcccttttttttggtcctcgagctgatcacctacggggggggttttacacgattccggtgggaacaaacctcattacaacaggccttatcatgactcctacccctgcacggatatgctacgtgactaataccgtcggtggctgcgcaatctctacgccggggccatcggcaaacttccacgtataacccgttttttttgcattcgccaaaaaaccatttgagatgtggataccctcattgaccaagaggacgacgcacaggtcagaaggcgcattcagtgatgagggaagcactctacaatgcgcctagggacga

SEQ ID NO: 13701 - DNA, 1629 bp, Emericella nidulans
tggtagagtttccactggcactggtagattggttgagatcgttgaggaaataccgttctctggccctgtcgacagcggtaatttttacttcgcatacaaccccctccttgaggccccagaacttcgtctattcttcacggatacctcatcatcaagcaaactccgacaagaatacggattaatccagccgagctatctactggatggataattgtatcttggcacatctgggaccatataagatgaaacgcatcgactcatagaaattgatatggaagcggcacgagctctggtatgatccgggacatcatttcaaagcacaccatagaatcgtcccagcatccttgctgaagacgcacatgagctatactcatagacgtcaatgagccacgacttggtgtcgtccaggcgtagtcgcttcgtttcatctcagagatccctgcttggaaggagaggcaaaagcctccagcctttgcttaatttaagcaaggaaactgaagcgctctggtagaaacataggctgctggctatcctcagacattctgctgtcacaggtcattgtttagctcccttgacatggaatggaggagggtccgagctagctacaggacttcgccctatctgagagtttgattagttagctgtagcaaaaaatgcgaaaatacttgtcctggatgttttcgcataggaacaatttccagcaaggacgaaaagtgttgttgaaatgaaggtgaagcaaaggcaagctgctgaggttatgctggtaaatcacgtgacccaataccctgtcgaaatggagctcctcgtcgagttaagtgtcaccacccatctccggttccctccacctcgaaccgctgccgcacgggatcatttgagggccatccggagtgctaacaaaccgcgacaaattatggctaccgacccctcgctccaggacccccttctggcgctgcgccgcgccattgcggctggcagcttgcctaccgcgacgacatcttccgaactctcgacggagaacgcaacagatgacctggccaaggccacacatctttatttccagcatcccttaccgcaatcactcgcgctcaattcgccgacccgattcaactccagctcctccggactctcccgtggatctcccacagtatcttcttcgcgtaccagaagaaggatgttgcgattccggagtatatcgcttcagtacaggagctgaacgaggcgctaaagaagaaggagcgcgccgatggagccccagaagaacaggcgcaaaatctgacgttcgtcgagcgattggaccttatcacgtggttagagggtgcttcggatgatagtgaatatatcaagccgcttgagggcgctgggggcgttccctcatcggcgactcaagcccagacatctgctagtgctggcaccggtgcggctggtgcatctactgggcccagtgctgctcctgctgcgggggctgcaggaggaagggctggaaaggtcattgatcccagacttcaggagatctacaatggggaacggaaaatgggagaccgcaacagtgttctacgcggcattaaacagacggtaagaagaattgctaaatcgatggcattatttcctaattcctatatcaggacttct

SEQ ID NO: 13702 - DNA, 598 bp, Emericella nidulans
gctatcgaaataatacgactcactatagggagacccaagcttaggatctccacatgcacgccttggacatagtgctgccccttaatagcatgtagctagaggacttgcatacacacggtaactggactatgcataaatcagactgaatattgataacatgaccagagtctcatcctgatatggaaccaccatctcttgttataaaagctgcaaagatcgcgcatgataactaagtgtactacactaatgatgagtaacaccatggcattgcacattgtgcgttactggaatcggttgacattatacaaccgtcgctatacgccaacgcacttgtgctgcactcatgcagcgtggacataccgatccatagccacccgccaggagagtcacacgcgcatgcctggacttactatgagcacatgtactgtaacgcgagccagaactacgatgaataggcgacgcatcggaagcggccaaacaaggattgcggagcgcattgacaactgcgatcacagtgatatatcagactgagtgaggacgagatcaacccaactctgccaagtgtgatatcgctgaactccatttggcactgactact

SEQ ID NO: 13703 - DNA, 454 bp, Emericella nidulans
tggacgattgttccacagacacacgagcgagcaacattcaccccatctatggtggtgcgtcgatcgcttttttgaaaccgatctggaagtgatttgcaggggacgttctcacttatatgaagccttatttgctggattgcacggctactaccagcgactggcatgcggggggaacacggcgagtattcctacctctggacacatagatagacactggggagtgacgcgcctgtttcaacctgtgaaggtacacgtcctaggctggcaaaatgcccccaatccgggggggatgcaaaagtcgactgtgggaaacgggctgggaccctagagattttgcgaaatatggagcaatgcagccgaaagcgagatggatctgttgccggatacgcaagtgaacaaggctcaatctacggggcacctttctagcgggagggcctcgcttgaagctcaggtg

SEQ ID NO: 13704 - DNA, 403 bp, Emericella nidulans
acgtcgtccgaataagccgttgcgggtgggcgttgcagaaattacgcccacctgcagatgctctacgctgttttctggaaccctgcacaattcgggaacggggggcaatgatttaacggtttggccgataaaacacttttacttcaagaagatggactccacatgtacggcctgctattgagctgcaaacttcttattatggtgtactcatatctaacccgttgactagcctaggatcctgaacagcctccggtactctcaagtctaagtggtgatatagccacagatctgcgattactggaggttcatctcggccttatgcctaaatggttaaaatactgtttgcgtcttaaatgtcccaaccagagccttttgaaatctatcccctaaggcatcgacacgt

SEQ ID NO: 13705 - DNA, 690 bp, Emericella nidulans
gtatgacgaagatgggtatctaatgctagaaagaatagcggaagaaccaaaaaaaaatcgaaatagcctagtccaatgttcctcaacgagctcgagctctgttataggcttccatgtcatgcggcaggatatttgttatccctcgctccaaaagcttttccacatccttctctttcatggtcacatgctcgaggtaatcgggaatgcgaagtccctccctaaaacgtgttaatcaatgagtgcgcgttatatcataaggcgatacacaccgataataagagatcttcatattccgagctcgatccttaaaggccacctggcgcggccttcaattcgcacttcgccctcttcagccggctgtgcaatgttctgcctttctatcagtgaccacttgtgaccgtgatccttcatcaagcgtataagcctgttatcttcagcttccgtccagctattcctgggctttgctgtgtattgcccgacggagcgctgggagctgatcgaggcaggctgcgctgttctctggcgcgctgggcgagagggttcctctacaacagtttcttggtgggtgtcagtgctggtatccagccttcgtgactccgcctcttccagtcgtggtcgcttctttctttctggctgcggctttttcgctcgttggctctcgatatccggcgagcgatcatcatgatcaaa

SEQ ID NO: 13706 - DNA, 1255 bp, Emericella nidulans
gatcacgttctcatggtttgtcacccagtatgtgcttgcgttgcgctccttgatttgggcttgggtgtgaaaggtatgattatgataagagtcatccgtgttggctcgcttcgacgacggtataggtgggtacagattcgtaggccgcgcgaaattcagaagcagctctgcatcggttttcatactatcagaaatcgcaggagggcgcgcaatcgagaaagcatttgatcggtgttgagtatatgaggattcgtccctttccgatcgcggtcgctttgctgggcgctctaccggttctgtttcgggaggaaacattgataacgtggtgttggacttgtccgaaggagggcggtgtgtgaggggtgtgaatgtaggactcgtagctagcgcgatcgttgcgagtgtgtcgatggttgagctggaccgaccatgacccgaccgatgcgatgccggaacatcggccggggacggccttttatcagttggcgtggaacggacatgatcagaggtagcagatgctgaaatttcgcgactagcccggtatgtgcgatagtccgcggtcgagcacggcgagataggttcaacggcgcgtcgcggaggggaaggggttcgatatcgcggcggccggctgccgatggcggttacgaaagaagtagcacttatcatctcgaatcgaaactagataagagcgcggagagagagacaatggtatggaggaggaaatggccgcggaggtgacgaggcttgcttgcggcaagcagatgcaaagcggaggggtagtcgaccacacgggctaagagaggaccaccgcaggtgaatggaaagtcattcctggcaggatgacgagcgcacagtagacaatgagatgaaaaccgattcaaaagcgaaggagaggcgccgggaaggggggcggagaggttgacggagagtcgcacggcggacggctgaagttgaggggggaagaagttccagtctctccctctgccggatagacgcagcaccgaggacgcggcggacacagaccagagggagaaaggtatagaagtaccggacctcaaaaactcgacgaatctcacgatgacaaagccaccgattgcacgcgagcagggagagatgtgcagaggacgtgaattggagaggggacagcacaaggagcagcaaagagaagagaggtcaatttatgcctcaggcaccaatattgcttgcggtcggccagaaagagcctgatcttctgtagtacactgggaggacatgt

SEQ ID NO: 13707 - DNA, 631 bp, Emericella nidulans
  unsure (1)..(631): unsure at all n locations
ctcctatagtgagacccaagctcaggatcttgtgcggtatatagtcgcgtttcagaagggcggataggagtggcacgcgcagagggcgtcaggctcgagggctgctaggatcaacacgggtggagagaggggcccccnncncctnttcccctttccccctccctcccttttccccctccccccctcctcttccccttccctccttctccctcctcttctcctctcccttcctctccctccccttcttccccccccccctttttcctccccctttccccctctccccctccctctttccccccccccccccttctccctcctccctcctcctcccctctccccccccctctctctcccctccctttcccctctccccccttctttctcctctccctttctttcccctcttctctccccctcctctttcccccctccctcttctctcctctccttcctccctccctcctctcctcttttcctccctcctcccttctccctttccttccccttccctcttctcttccccccccctccttcttctctttcccctctcctcctccctcctctctctcctctccctccctctccctctttctttcttccctcctctcctcccctcttctctctcccc

SEQ ID NO: 13708 - DNA, 608 bp, Emericella nidulans
aacggggcggtgcttgtacacgactgcctggcttggggagatgggttaaccaccctcgatctgccctgttttttttccgggttagaactctgtggtggaaggggtggccggcgacctgagtctatgatttaaacccgacttggaatacaagagcggcgatggaggcgaagggtagggcattagccgacttacgggacactggaatctcttgcattggtgaggaaaatatcagtagagttggcgaacccaacgttttaccagagtgctgcttgctaggggaccatgatcacactcgttctgagggtggtacccaagctccatagaagcccgtggctgaaatcccagaagggacgggcagtagggatagccgggaaggataaggggacacatacatgttttaacagcaggttgcagagggatcggcagccggttagaacttcgaacaagactgttcgcttggtaggagccatttgggtgtcacctggtgtctggcactatgaggaccatgagaccggggttcggacagggcatgccggctgggatattagatcgtgctacacgcatgtgttgacttttgaagaggctcttgaccgctggcaaagggctgt

SEQ ID NO: 13709 - DNA, 691 bp, Emericella nidulans
  unsure (1)..(691): unsure at all n locations
accactcactatagggagacccaagcttaggatcactttatctcaggcactaccacaagagcgcgagtgnttcctttcttttttttcccgcccaaaaaagaaggctttttttgggggtttttttaatactcccccccctcccgattccctcacccaatctatatacattcactctttggtatcttcttctttaccttcttcactatctctctagctctgttctttcatgttatgctcccccatatttatttctttttctccggagcaatttgcccccccccccccgaatatctttcctttttccccgccaaagttttggcccctgtcttttttcaaattccccatattatagtatttttgttctctttcttttatttctctattcccgtctcttctatcgttctttttctctttccttttttctctccatctttctctatctctatactctgtttcttttgtacattaatatatcttctttccccttctttttccattttcttaacttaattcattgtttatacaattctcatacatcttnttttctcggtccctttccacgaaaaacctatctctccgtcttctctctttatcctgcttcccgcatattctcccttaaaccttttaaggttcccgttcctctctcctcctttcatttaaactttttctcatatgttcgctcttctcactt

SEQ ID NO: 13710 - DNA, 647 bp, Emericella nidulans
ctctacggggcagtccttctaccacaatcggccgggatgaaataatttctcaatacctctcataatccactactacttttccaaatgataactttctaatttcagggggggcttaaaatataactcgggggtttaaaccctactttatttaaaattacttctcgatctccgaaacgtttcaatttctctgactctcgtaacattattatcacttactatttaacgcccaacatacatcaacctgcccaacccaacttaataccagagcccctcttgctaggatacaaaaacttcactgcaacataagatcctatcctcgtccttagctgcctatagcatacatcccccaagtgaccggaccaatgccctacctctgacggctttcctctctaagcccctcttattacacaaaatctcttccttttcacccttccgatagcacctatcccttcctatcactccttctttcctccttgcctttcaccttggtttctcccttccctttcctcccagccctctttagctcctctatcccttcccctttctctctaccccctcctcctcattctttactctcgttactctccttttctactttaagttttctgtctattcttctcttagatttattcttactcaatttcctc

SEQ ID NO: 13711 - DNA, 467 bp, Emericella nidulans
atgtatatccacctacgatttaggtgacactatagaatactaggagtcttgctgcgaccgcttatttcgctgagacttttcatgcacatctctgggaggcacgtaaaatttcatgcataggccgcgtacagtggcactgcctggttcgcgcatatgaggaacggacccacagcttgggtaccagtacagagagaccccatacgctgctctcatataggactgtggcccccgtagatcctgcaggacatcgaacaagtcagcggacatggacgttagtggtaattggcggaccggggactggaggcactgacttgactgcttggagagatctcctgatgattcagacatctagggttacaacagtaacgctgggtccaacagcgagaacgcacattacggctgtgatcctagccgatacagagacgcacctctaccgaggtatgcaggctatggctcgaccagagcct

SEQ ID NO: 13712 - DNA, 622 bp, Emericella nidulans
  unsure (1)..(622): unsure at all n locations
acgatttaggtgacactatagaatactaggatctcggtgatcaggaaggattttggaccgcaggtgaacccagattttgtaaggcaacctgggtttgcggccccaggtggacctttggaggttaatgccccaggcccggattgggttcctcagtgcttcttttcgacccacccataggttggggctctggccaggtgcccaattgcttaccggaccgtccaccaatccttgaagaatcttaatgagggccctattaaatacttttttggttttcanaaagttattggggtcccatgtttcgtggacccccacccttatatatttcggtctaattttttggttcgtccacttccctcttttgtgtttcggttgaagaattcacccttcccttttttaatctctcttcctaggggtcctgagccctttcttttgcccttatgcggtttacccttcctccttgtttctccttcctattgctttttagcttattccttttttcctctttcttctgtttttcttttaccttttctctttctctctcgtttttctcttcttctcttctctttattattttttcttatctcttgcttcattttcacttttctcattttattttctcccc

SEQ ID NO: 13713 - DNA, 837 bp, Emericella nidulans
agcaacaacagacctgcgtctccatcttcccttagtcaggccaactcctcaccaagtcgaccctcgcagccttcatctcctcttcttgttcagtttagcaccggtcataaccatgagcgcagaaagacctcaggatcgtcctcaacaacagcttcacaccagtcgagcggatcgttccagcctgcttctgctgatcaaactcgcgtggcaaacagcaataaatttggctctgcctcatcgtcgcccatcaaacccaaccgggttggaacacattctcctgataaatcaggtccaggtccacaccgtcatgggagtgctccgtcaacaaggacacggtcacaaactattggttcacaggatggcgagctctcttcatccctagccagagaaacctacgtccctggtcaccacaaacgccgaagccaattgtttgacgtctcgccttcttcatcagacaatgaggatcctcgagcgaaagctttactaaaagtgcaacgacgccgccagagctcaaggcgactttcgcagatcaattttgctgatggtccgttcttcaggcccttggacatcctcatttgtgaggatcatccaatctcgcgcttagtcatggagcgtctttttgagaaacttcgttgccgcactatcacagttgccaatggggcagaagcagtacgctatgcgctcagcgaggttcaattcgatatcatcatgacagagtttaagctcccgcaagttaacggggccgacgtagcgcggatggtcagagaaacccgtagtgccaatcgacatacgccaatcatcgcggttaccagttatctcaaagatctcccagaaaca

SEQ ID NO: 13714 - DNA, 671 bp, Emericella nidulans
gccgcataatacgactcactatagggatcttctaacaggcgcagacacgttgcttagccggtgtcgcgtagattttgctcttgagagctcgggctattgcgaggcatattcgttctttgccgatgctgtaggttccaatgacgacaagtaaccggcctttcggttcgggttgagtcgaaggtttcacggcagcagtggcagccgacatgaatttgcttatcgggttcttcgatttcgtggtgggagtcgcggtctgaaaaggcatgtggccaagactgtcgtattgaccctgatcaatgcgcacacaaagctccgcacacgcgttaatgacgtccgactgtctcgggaacgcgtacttcggacttagataagtggtatcaagatagcaagcatcaatcctttgctgccatctcttacccgtctttggatcaaccacgtcagggcgtaaaagagcatgctgcacatgctggggagatgctcggaagtcaccgcagtgcagtactcgttggatccgcgtagaagccccagagctcacagccttcttgaatagaaagatagcacttccagggcaatgattgccctcgatcatggcacctgcaccccgcttgtccaggcacctctggcttcttttcaaaatccaagtctactacccattgggatcaccttggagt

SEQ ID NO: 13715 - DNA, 441 bp, Emericella nidulans
gatggccgataatacgactcactatagggatctggacaagactaggtatttgagtggataataactagactgtaggattctaaaacggcaatagaatagacaggcatacctgacagccatcaacttgacgtaccatgccactgtaccctgacaacgagtatctcgggcacttaagcttcccagaccaggagaccaaggaagtgcggacccgaagcaatgcgcaaggctataccttcgattactagataaggtatctgcacttataggttgcacaggcgcattgctgagttcgctggtttggattaataatgccaagggaaaattgcaagctacaactgaccgaataactggatcctggcgaatccgaaatagagaccctatgtcgctatgttagtgttaggccagtcactatttgttagagccaaaagctgcacgtgcaca

SEQ ID NO: 13716 - DNA, 682 bp, Emericella nidulans
  unsure (1)..(682): unsure at all n locations
cccccccacgtgaatgattccaacttcatcaatttattctacccttatcacttaattaaactcgcctttcatattatctatcaatctaacatatancagcnatgggtgactcctaacggggcagtgcctaaccaccccctggggggggggggccaaaatccaccatacccgcaaacacacacacgttttgtcccgacccgaacactaaaacatcagggggggacctctagaaacagctgggggggaaacaaaaccccaaacacaggaactgctaactaggcacaccgcatcgcacaatcccactatagccactgcagcaaatgggcagggggagtcacaaccacagacgaagaggccgcacccaacaaaactcccacgcgccgatggcgaccaaacaaaagcctcagccccacagaaagacctaggatagcgaaaagcacggcaaactctcaatcccccaaaagaccggacacaacccccccacccctgaacgttgtaatagacggaaacccttgtcggcacacaaaatctctaccggaacgaaggctcgagagacccgggagcagaccacaccaaccggtgccccacttacgctccaacctgagttcgggtccctatatcgccgcaggagactccggtgaggtacaaggcaaaacgggacaagcaggagactcggaaaaca

SEQ ID NO: 13717 - DNA, 1062 bp, Emericella nidulans
ctggatcccgggaagggtcttctcgttggccggttccaggcatccaaaatgctttagcaagaaatagagcgcgaaaacgacgaacgaccggctcagtctcgaaggtgagaacattcggagggttggaacggtggtgtccgcactgttcaggttgtctgttgtcattttcaataatggccgtatttattatagataagaagcaaatggactggatcgtgaggtgaagtattatttttcgatcttatctgcgtagataataattttttggcggggtggcggggcccaaacctacggctaggcctgctttttcttataatgatccgtgtcgaacgatacctaggtttttggcttcccgttcttggcagatacattggggattgattgggctgtttattcttattcttaagactaattttctaggggcatgctatcaataagcccactacgtaggtatcactacatggctgtcactgtaccgaaccgtatagtcctagcataaacttagatgtgggaagtttcataccattaactaggcaaacagactgcactgactgctgactgctgactgctggcggtcctgtcaatgccagagtactacctgtaactcaatacaagaggcctggatgaagggcctgcgagcttatattggaacgcaggcttcagttccgggcctggtctcagcatgtgtctccagggttattcacctcttcgactaaatggctctgaaggtgagtgacgtcccttggttcatctagctgaagggacaactatgttgggtaatagagatactgtgaaagcatatctgccacgctgtcatgtcaatacccactaaccttttttttttcagaataaatcctaggaacctgcgaacacaagttatcaaatcattatcaatacctgttttgacattatggtatatggctctttcagagggagtaactacgtccaggtgcgtagtaaagctgcgccaaaaagaatcaagggatcaatgccatcatgataaaacggcacgttagctgaacctttggagcttgtcacgagtctgcaggattactgggcatc

SEQ ID NO: 13718 - DNA, 874 bp, Emericella nidulans
  unsure (1)..(874): unsure at all n locations
ccctgggttcattggtacgtcttcctggaagctgatacgtacatagtttggcgaaatatggtccgttgggtgacacaactggaccagaggaaggcattatgtcttggggctcccatgcaaatgggaagtcagatatttgcctacggtggcgcaggaatagtgctctctagaactgccatgcggttaatatctcagtatcgtgcccagaacttcacggtcgttgagcagatgaccgcggatgattgggctggagaccacgtgctgggccgaatccttggtgacatcggtgtaccacttatctggtcatggcctctgctggttccatctagcatatgggagtttgagtactttaccaaggcttatggtcgtcagccctggtgctatccagccgtctcattccaccatatgtctacgcaagatatctgggatatgtggttgcttgagcagcagtggttcaaatacgtaagtcaccatgataaggtctccttgcatctattaacaattagaccacatatagcaggtagacgtgccgttgttgcacaaggatatattcaactggaaattatacgatgcgataagctccatgaaggacgattgggacaatatctcctcagatcaacaaccacggaatatcagtgattcaccaactaccagtgaagaatgtaaacaaagatgctctctgatcacagactgtcttcaattttcgttctcgcatgaagggtgccggacctctaaaaaagttgtcgggggtgttcctcggccaggatttcattctggctgggtggccacgcgaataaaggcgctcataaaaaatgcagggagatgttcaaaggacnagtacatcactaaataggaaacgtatatttgttctgga

SEQ ID NO: 13719 - DNA, 1562 bp, Emericella nidulans
ccgccgataattcactactataccgatcattagggctgtgtgacactgcatggagcccagtgcatgacgtcgaccggcgactaaggcgagttctgttgtcccaagaacagtgcatcttattgaatgtatctctggagttgctggtcaagaatgctggtaatagctacccagatgactatgagaactgctcctggtctatcgacgattgcaatccagaacaatgtgccaaagactaactacaagtcacaactgcgcagatgccctcctggatatatgataatactatgtacacaacgaaccaatgctatggattccaaatcccggagacgatgagtccgtatttcaagctttgctgtgatcctccctcgcgatacaatgaggaatggcctgtcgagcccaatcacctctggagccactattacgacgacgctgatgacgacgtcacttgggagttcaggacagtttcggcaacaacaacaaagacaacaggccgaatgatatagaagatgatccgggcactgatccctacgggttcgtcatgctggatggacccccaggctcgatcgacaatgcctttgatgctcagtacaccatcgtgacccgcgatgaagaatcatggatggccacagataacgaggatccaggaaacggggactctaataacaagggttctgagtgactgcgagacacaagagcttatggggtatatggagggttcacactttggcatgtgaacaatttctaatgatgatatactgcactctccgtacatgtttttttatctctgtaccaaaggtttaaattggttctatgagtagcttgggtaagatcaacggctagtgcaccataattctgtaagatcaacggctagtgcaccataattctggatagaataagggaaaagaccgggtttaaccgggacaaatgatattaatagcaaggttaaagtcatgcaatatacagacatagtcgtagaggcaaagaatcatttatctgaaacagccaccgaagtaccagctcttgctaaagtgttaagatctttacggtatcacaggagcatatccagcaacgtgcccgcagagctcggccctgggtgttccagcccgattaagttaacatgatgtatggggtatacccatttcagcgcctattactccttgaactcaactagagtcgcctatggacaacttgcaaatcaccaggatcttctttgttgacttccctagattatatcactaacatgtgcgcctattacccaatgcccatgccaaatatagatgctttcgagtcgccagaattcagcacactctcctaacttgctagtcctcatgcaatccaatctccatatagcaccaacctgcagatgcatctaacactccacagatgccctcgcatgctcgtgcgtaatcctactttgtctctcctcaatctcggccttgacaagcatctgacagaaccgactgcttttttcactaacccaccctttcaaagcagtacataccggtttgggacccagggcagactcacgaattccacgagagaggttggccagcccacaccca

SEQ ID NO: 13720 - DNA, 484 bp, Emericella nidulans
gaatccgcccgcaattaaccctactaaagggatcttgcgggagagaggcacgacgacatcgacatagcctgtgaggattgacgtgccagtaccattcgagaaagtgaccgagcagacgggtcctgccacaccatggacccttaactgaagtatgagttgcgcggataacgatccgcataccataatgaggcttgagggggtgtactaaatgcttgtggaaacgtcttgagttagtcatcgacgactgagcaagacttgggaggcggaccaagaagctatgtgaaggtgtgactaggatgtaatttgaagggtgcttgcatagagcaggcgcgagatctctaatccattgttctacggactatgctagatagatatcaggactgggcactaatgcgcatttatctctagacagagttgctaatccgagctacgtattgctacatacaagcacgcgctgggctgatacgccactaaacgcgcacga

SEQ ID NO: 13721 - DNA, 647 bp, Emericella nidulans
aacagggggacatcccaaccaagccctgcgggggggggcccaaaaaccaccatacccgcgcacaagcaaaactttagtcccgaacaggacacaacaccgccaggcgggggccccagaaaaaacccgggggggaacacaaaccccaatcacaagtaaaggaaacaaggagaaccgccgcgaacaaccaaaagaagaccaccgcagaaaccgccatggcggaaccacaccaaaagacgaagagaccgcacaacacaaggcgcccgagcgccgggggtgaaaaaacacagggaagagcgaaacagaaagacccaggccagagagaggacccacaaacccgaaacaccacggaaggccctggtcagaaccagaacccccgaaccactaacccccacaggcaaccctcgcagcaacccgagaaccacacccggtaggaaaagcacgacgaaccccgggacgaggaccagcactaacagaaggtcacacaactcagccaacccaaggaagcctggccaacaacactccaagagccaaccttaagaacacaaaaacaggggcaaacccgggaaacaggaaacagcaaagccaccccccaaaaccccggcaaccctctagaaaggccctaaagccaaaccccagcgcggccaacc

SEQ ID NO: 13722 - DNA, 615 bp, Emericella nidulans
cacgggggattgccttgaccaggaggggggactgctggacacgatacatgctcctcgcaccaaccagcaagttttttcccaaccaggcccgggcacggccagggggcaatttgattatgaaccggggccatgaaccaaactgcttggacaggagatccgaatggagcgtagcccatcgatgaggaaatatacgcggaccgtggagaaactgatgtgggatcaacattcggagacgaatagtattttcataaaaagacgcgccagagtctcatggctaccattcactggtcactggcaaatatgatgatagatttcaatgaatgaattgacatgaattaatcgcctcaggggagcggatcatggcacctctctgaaggtatttcgtgccgttagcttgccataagggcagagttcgacagattaaaagttgcgaggaaatagctggaggaggagaataagaatagatctgtgatagtaaaaaccggagcggccggtttcttgcttcctcagagatttgtgtagaacgggtacaatctggaagaggttgtattatgccagacaagacctgagcgttgatcagtagcaagctctattaatgaatcgtttccgacattc

SEQ ID NO: 13723 - DNA, 734 bp, Emericella nidulans
ggaggccctcccgtgccgggcggacatccgacacattccccttgatctcgcgtcgttcgcgtctatccgtgcggcacgaaaacaattccaggcagagtgcgaacggttggacatcctgattctcaatgccggcgtcatgggccacccgccgtccctcacagaggaagggtacgagatccatctcggaacgaaccacatcggccactttctcctcaccaaactgctcctccccactctccgcgaaactgtttcccgctctgaatccccggatgtgcgagtcatcacgctaagctcgctagcggccaacaccgcaccatcatacgattccatcacgtccacccccgcgctgctaagtctcggttgggcttcgcggtatggggcgtccaaggctgccaacgtgctcttcgctgcggagctggctcggcggcaccccgagattttgtcggtgtctgtccacccgggcgcagtggtgacggatctataccagcagactaaaaaagcaggccttttctacgaggcgggcgttggtcttatgatgaagttctttcgaagcattcgcaccggggcattgacccagatttgggccgcggccgcgccgagagagcagctgatcaatggcggatactacgttccgatcgcggtcaagggagtctcacggtacgagaacgatgtgaagacggcgagagcgctctgggagtggacagaaaaagagatcgcaaaacattattgatacc

SEQ ID NO: 13724 - DNA, 578 bp, Emericella nidulans
cggccgaattaaccctactaaagggatcattgtcgctctgagcccgattccgagccttccctgcgcgatctatgatattcgcgcacagaaccttgggctttctaccagatgaccgatgcgtaccggccacaccgtgccgtaacacgcatcatgacgggctgctgagatcatgccaacctttctagatagcactgcggtagacctacacattcgtctagtagcgacgcagtctctgcagcggacaatggaaatagagcgccgtacagccttacgacaggagacttgggaagtgcgctgatcagaggcaatgctgagagtatagtgcatatgcgcggccgggacagatggccacaactgaccccagtacggataagcttgcgcatgggtgcacggcgtgttatgcgtccgacggctgcactgacatctggctgacaccctaggagagagcgtggacttccggacaaaggctcctggcagtatatgtgtcccgagatgcccactttgccgttactgcaggccaaggtgcatgagcgctgcgtatgacgggtacaaaccagacggcggcgactgggtgtatg

SEQ ID NO: 13725 - DNA, 321 bp, Emericella nidulans
gacagttttttttttttttttttttttttttttttttttttttttttttttttttttttaggcaccaaaatccgggggggggtaagaagcgggaaaaaaaggacccgggggaattggcggaaaaggagcctgcttgacagaaaaacccccccaacgaaaaccccccgaaccgaaatcccaccatcccccaaaaccctttgtaacccccccccctctattccccgcccaattcccatctccccccttgcccaaaagcgcctccagcaaattttcccaaggaaagggatccccccccccaaagggattgatttaccgcccccc

SEQ ID NO: 13726 - DNA, 1278 bp, Emericella nidulans
  unsure (1)..(1278): unsure at all n locations
taaaaaaaaatataaaataaatacgaaacaaaacaactctttaaaaaaaaaaacataaatgtgtaatgtttatctccccccgcccccacaaaacaaaaaaagcaggcggggtaatttccaatatttgggtagccaaaccccccgttccaaagcttttatatttggagtggggcaaggaagcttcttaaaaaaaaaagggtattttttggagtgggagaaaacgggattccaacagtaccttggcaaggcaaaaaggccctctgtatgacctgtggaaaggcacaataggcccgggttattccccgcccacaaaatgccccacctcataagtggctcccaggggggcacaataatatcaccagggtgcccccattcacggggcctccgggggtgggctaaatatttcgataaccttaaaagcgcccttgatgacttcacagcttattgggcgcgcgtggggccgcgaaaggatcccgtccgcgtctgcaccggcgaccagcagtcgctcaaattttcacgaaccggtcccactgaaagcctgtcgtaagagcgttgccgggccggatgacggcgttgttgatggtcgcaagcgcaggcgggtggccggcgagcccctctacgagattcgggttggtaatattgaaggcgctgtgctagatgtccgggacgaaggtgtgaaggtcaaggcccgttttttacgcgcagcgacgtgagaatgggcccggaaactttctcgctaagcgcgatcagtgtcgatctctgcaagagcggtgctccaggcgcagggactagattcatatggcctgggccaaaactgatcctgtccaggaacgaccacatacgcgaaaaggccgagtgatcgcggcggatgatgaagtcgagatgtgttttgttcgatgcgccagcgacaagaccagggcatttcggtctctccagtgcaaagacccggttctttcggcactcgcggcagatgtagtgcatgatccgcagcttggggttgcggcggcgattccatgccatggagaagtaggtgcgcgcactgatcccataccctgcagggttacagcggccagtgccgtggaggatagcgagggcatgcagtatgttttgattgatcaagatctgaatgggatcgatcatattcagagtcgcaatgttggcttcgatcacgcctcgaggctggggcgtcggtgcccataaaaatgttgcattgtaccaggctataacggccccctcngttgtcaagctggggcatgttctgccacagggtcggccgtg

SEQ ID NO: 13727 - DNA, 409 bp, Emericella nidulans
  unsure (1)..(409): unsure at all n locations
tcaccgtcaatgggagacgttacagatcgtacatacgacttgctactgtttctatacggattcacaatggctgttgcgaccaccaagcacacaacacagcattgtcgtgcattctaggaggtgttctcgaatgcatgtacggtttgatatatggccccacattgctcgcccggaagattgtatattgtacgcctctacccaccagcgagaatatataaggagaaggaactccctgctggaccatactatgcatggtaagcaccatgcgtaacgatgttgaggctgacttatctcccagaccaacctnaccatgtacagcctatgctcccctgggtttggagcctcttattgcaagaaacaatgagcgagaaaagcaggaatacttcaattagatgcggagaccgatcat

SEQ ID NO: 13728 - DNA, 1518 bp, Emericella nidulans
ctacagttttttttttctgctctgggcagcgtctgacatataccagatcatatctcagaatagactacgctgtttccgcaaatattggcatttccaaactatctgatgttacaagtgaaacaaaatttgatgcgcgtgtcagtggtcctcaatttggcattacagagcaggacatcgaaacccccatgcatgatggacgcacaatcctcgcaattgcctatttcctaacagattcagctgctgttgaactttgttgcctgtctttatcatcttcatggcggcggcgtttgtatcggcagtcgttatgacgacttcgagtcgcatcgcactatagcctttaggtataaggttattgttgtcagccctgagtatcgcctcgcccgagagcatcccttgaatgcggtatatgatggattgatacgttgtaatgggtatgtcttgcttgtcgagcacacttgagcattgttcctggcgcttagactctgaacagaccctactaaactcaagatctttgcactatagataaccaatgcgatgaatccatctatctgcatccccatctactgacttaatcattggcggtgtttcttctgagtaatatcgcaaatactgtgctttattccaaccgtgaccaggagaattctataccagtattagaccagttccttagtgtggcacgattgctcccagacccagtcatgcagcaaagtactgtcaggcctatattagcgccgaagaagacagggcttttgctataccaccggcagattagcagagttgtttctgtgtaagtgagccactagtaccactctatccattgagattctatctctctgagatttttttggcagttaccgcagcttaaaatgtggttggaaaaactgagctgactgacgcaactatattgagtagccgcctacacccggaaatacgttctcctttgatgacctctttcaataatctacagggcatgctgatattccgcggatctactttcaggtctatagcttggacccctacgcgatgaaagcctgatttacgaacaacagctgcgcgagagctgaattgccacacgcctgggctttttatcccggtcttcagcatcatttctgggagtttttcccgcaattgatagagcatgtggaacacaggacagagaacacagtgagagggttcgggtgattgtcgaaagaatggacaaaacaacactccagatagatctggattgattcacttaacgctgaccgacgaatctattttctatattggtgctttcatctttgaaaccgcaggaccactaaaatccgcagtcatcttcatcgtcacgcccgtaaatatattttttgcatggtaaaatctgtagaccaataagtatgacccttttattctcccataagcccttaaggttgcaagatgagcattaagtggacacccagaccttggagcatggcagcatggggtgttgcaacataaaagaagcaataacagtaatataagaataaattatacatatataag

SEQ ID NO: 13729 - DNA, 719 bp, Emericella nidulans
  unsure (1)..(719): unsure at all n locations
attccggccgaattaaccctactaaagggatctccttggagaagttgacagcgagtggcttgataaatgggcagtctttgaccatttcgatcacccggctccttactatgcttctgttgtttcaggaaaagacaaaggcaaagggttggtgtgtgtagctggtgacgcggcccatgcgagttcgccgcaccatggcgcaggagcagggattggcgttgaggatgcgcttgcactcattacagtgatcgagaaagctattagagatattcattctgagcaaaggacgaaagacgatgcgttgacggcggcgctgaaggcgtactcggatgtacggtatgagcggagccagtggcttgtcaggagtagtcgcgaggtttgtggaacgtacgagtggtctaacccagagattgggggcgacttggagaagggatttgaggatgtcaaggagaggtcccatcggatctgggattttgatattgacggaatgctaacggatttggngagtatatatcagagctgctagttgagcttagctaggatcacgacattcacttggctttgttcgggtacttttccccgcttcgacatttcttttattttagaagtaaagaattgatataataattaatttagctagccccgatttacttcaaaatctaatctaatcaaattttgatttaccgaatggtccgcaaagttacccctaactagattttttt

SEQ ID NO: 13730 - DNA, 556 bp, Emericella nidulans
caacgggggtctgcttttgcgggcatcgggcccagcagaatgcatgccatgcaccattcccacaagggcctgttttttcctactaagaccggggaagcggctgggggcaaatagaatatcatgcgggaggtagaactccacgccttgcgcaagcggacccatatgatcgtagctcttcagctgacctatagccgggcctggggcagaaaggtgttctactacgacatgcctatgcttctgggcgcgtggtataaacaagcccgacagggtgaggagcacaatcttgaggctccaccaaatgggtcatctattccggattccggcatatgcccacaataataccaggtgaggaagggatgtcttccccagtcataggggattcctctgacaaacctttgcatggaacggaaacttgagcctgtgaaagagtcaggacgaattcagggtctcggggagacaccttggcttctaaaggatcatacgcgacagagggcttctgcgagcaaagtaactatgtggaggaatacacactatcttggatctcgtcttttgcagc

SEQ ID NO: 13731 - DNA, 1297 bp, Emericella nidulans
aagggaccggggccgagaacaaaaagccttggccggttcttaaggggcagagccagccctgcaagtagagacctaagtctcgcggaagttacacaaaggcgcgacattcttattcaagggcaaagatgagtggccgcgggcctcccagtggtggtctgggaatggaggtagcaagttcgcttctcaacggcgtcagggtctaccgcttcgtccacaacgccgcgtaccaagatgtccagagccagtttgacctctgcgtggagtcaatggatccgcaaaggatgatccatctccttcagtataatccttaccacatctcaacgctcctccaagtgtcagagatcgcaaaacaccaaggtgaccatgcagtatctgcagacctactggagcgagcacttttcaatttcggtcgttcggtccattcgtcattcgggaatcgcctcagagatggcagagctaggcttgactttctacacgcggagaaccgcgagctgtggcttgttggttggaggtacattgccaacctcggaatgaaggggacttggagaactgcatatgaatgggcgaagctgctactgagcctggatctgaaagacccttattgcattaaactcatgatcgacaatttagcgcttcgtggcagagagtggtcacacttcatcgatctctgtacacagaccaggttatcgcaagagtggaaatacctgccaaacatccagtgctctttagctttagcatacctgcgactgaacaaacaaaaggagtgtcgacagcagatgcgtgtggcaatgtcccgctatccatgggtcttctgcaagctggcccaggaactcgacatccagccaattccgaagcgaatctggggtaagcttcctcctactgatgggcacgagctgttcaccgaactctacattgtgcgtaccaaagacctttggaacactccagaggtaatctctcttctggtcgaggtagcggacacgctatcagagggagatgagccgattgaaccaccagaaattactttggacattgcgcgccatgttgttctttcggatgttccacgcgttacaacgcatttaccgactcgtttcgtctccgggcgtatctcagcttctgatcctctaccaccttacgaatcggaagcattccgacagcagtcggatcccacgccgtcctatctgtctcgagttcccgaggccgagaggcctggctggattcgtaaccttatggagcagctgaaccacggcgtgatccccattcctcgatttcgggccggtgatgaagaggaccatggaga

SEQ ID NO: 13732 - DNA, 446 bp, Emericella nidulans
atggccgataatacgactcactatagggatcttgccggtagtagcgaatactctgtgagactttaagactgccggtgtacaaggtccatgtgatcatatactggacatggcctagtctaccctaaagcatagatgcgctccctttgataggcgccctgagttcgccgtgcgccccaaggacatccgatcaatattccaaggccctgatgtgggctgtgcacggttgcgtacctgaacactacacactgagctgaggtcctgtgccgagatctatcttcttatcgactgtctatcaccctgtaatctgcttgtctgagctcgggctcactggaccctgagtgctgcacgtttgtttgggcggtgcgtccctactacgactgtaatttctcggtgacgaatatgattgactgaccgtcgtactcataaacataactggcttgcccagt

SEQ ID NO: 13733 - DNA, 650 bp, Emericella nidulans
aattccggccgcataatacgactcactatagggatctcggacgcaattatcgggcctgtagaagactgccaggtctcatcgctgggcacgtagatcgttttgccatcagcggtggctatagagagtagtgagaggagaccgagagtgtccccgtagatattcctcgtcatcgaccaggtcagcgcgccggcgtaccagccctcgcccacggtgactccgatcgtgttgtcgccggtttgcagcagatccgtgacgtcgtaggtattgtattcgtggcgatggctgtatgcttgccatccaggcgccaggacatggtcgccaacgggctggccattgatctcagcctcgtagacacccaaggccgttatatagagtctggcggagaggatctcctcatctacatcgaagtccttgcggaagtagatcggtcgatgggtagcattgacctctgtctcccggtcagagacaatcgctacagcgctctgccaatcgtcttcgtccagcagccccggctcaacagtaacagggtccgaccacggcgcatcgggctggttagcgcgtccgaatgaacgcacacggacagtggcctcctcgccagattgcagcgggtcgctcggccagggcacgagaacagagtcggatgaattgac

SEQ ID NO: 13734 - DNA, 555 bp, Emericella nidulans
tcaatacatgccatccaaccttcccacaggtccctctttttttccccagcgacccccaaaacggccggggggggattgtataaaacgcgggggggtcaaccaaaccccttggccacgtaaagccacatgggtctaccccttcaacctacctatatacgacccatagacacattgccattgtcagactataccccttggcccctaggctcctcccaaaaaacagcacaattgggcctggagcacaaccatcaatctcagccccatgggatatatcttatcaattcctgaacatgcctcttcagattccactaacttaagggatttttactccactactagggtattaattctatccatgcctccatctatccatgccctcatcctcaccaacagcatatccacaccttcgtgggctcgaacaattcaccttgcgcccctaaacagaccatacctcaggatggctccttctgacacctggatgtacctatgcgtatggcgccgcacccacttggctttctctctagaagcggaatcccaaaccctagatctttgagc

SEQ ID NO: 13735 - DNA, 556 bp, Emericella nidulans
aactggggcgtgggggccgcatgccacccatacctgcccatcagcgcgcaagtttttttccgacgagacccgggaaacggcaggggggaacctgtataagacgccgggggggaaaccccacccctagcacaagtaaagtgatttcggcgtaccgcttcgaacagcccgtagccggccatggcgcagaatgcgatggtggaaccacatccctaggcggggaggctggtcaaaacaagaagcacgagagtggctggtgaccagacaccagtctcagccgcatgggatatactatcctagtgcaggcctcgacctacaatgatcccacggaaggaagggatcgtacactccagtcctgaacgtatttactgcgccgaaaccccttgccgctaaccaagatcgtcaacaggtactaaagctctgggaaatcttgtaggaggccagcgacaacacattggacacagaattgatcctacctggagagtggtgcctatgctccgaatgacccttgtgtaggccaggcaccacttggcagacgcttaacaggtaaaggaaatcc

SEQ ID NO: 13736 - DNA, 628 bp, Emericella nidulans
ggctacgggggatgtcctgacaagggtctaagggattgggggccaaaggcgaccctacgtgcgcatgtgaaaaggtttttttccgaacagtaacggtaaacattaggcgggaacctgtgtatatacccggggcggccacaggacgactaggtcaggtatggggatgccggaggacagtctcgatcaaccaatagatggcaatggcatagaatgctatggtggaattaccccaggagtggaggagtctgtttaacatatgacgatcgcgattgtatagggaccaagcacccgcggcggccgcatagaataatactgcttagtgtaagcgtcacatatgagtggtttgaaggaaggctggggtcatcaacttaggccttaaatattaactactggaatccttgttggctaacagatttttcaagcgatagtgaggctgcgggccactggagggggacagctataacagttgccacggatttattattcctgaggagctgtcagtacacttgatgccctctgtcgagtcaacaaaatatttgcattgccggtattgtgatataggaaagaaatgcttgttactttcggcaacgtttatatggttctgattcgcatcctgtggggagatttt

SEQ ID NO: 13737 - DNA, 207 bp, Emericella nidulans
gcgataatacgactcactatagggatcggcgctcggcggttcaccgggccggtgagatcgggcatgtgttccgttgctttgggaatcctagctaacgtgcattaatgaacgccccgaatggtccgcacctgggctttacttcgtgcggtgacccctcaacgttttcgcagaaccaaactgactccgtcccggaatctgacgggacat

SEQ ID NO: 13738 - DNA, 1543 bp, Emericella nidulans
cttttcagaacgaacatccccttggcggcagcaagtacgaggaattcactcgttctcgagcagcagaaaaggccaagggcacccgtgctgcttcaccttacacactctcctacccaatgcagatccgtctgtgcttgtcgagaggctttcttcgtctaaagggtgatatgagtatgacccttgctaccactatcggcaacagtatcatggcgttgatcatctcaagtatcttttacaacatgaatggcacgaccgagaaattcttctcgcgtggggccttgctattcttcgctattttgctcaacgcattctccagtgcattggaaatattgactctctggcagcagcggccaatcgtggaaaaacactacaagtatgcgctgtatcatccgtccgcagaagcgatcagctcaatgattgtcgacttgccagctaaggtactcgtgtcgatcgttttcaacattatactttacttcatgacgaatcttcgacgcacagcaggccatttcttcgtcttctacctattttcattcaccacgacactgacaatgtccaacatttttcgctggattggtgcaatttctcggtctatggcacaagcaatggttccctcatcgatattcatgttgatcctcgttatttataccgggttcacaatacctgtgcgcaatatgcatccctggttcagatggctcaactacctcaaccccattggtgtaggtattcttcacaacgcgctacgtatgttgctaacttttctcagtatgcttttgagtcccttatggtcaatgagtttagcggccggagatttgattgtgcaatgtatgttccggacgggccgggatatgctgacgttcctctgtcatcgaagatttgttctgggcgtggagctgtagctggacaagactacatcgacggtgacacatacttgaatacttcattccagtattacaggtcccatttgtggagaaactatggagttctcctggccttcatgttcttcttcttggcagcctatatcatctgcagtgagttggtccgggccaagccttcgaagggagagattcttgtcttcccaaggggcaagattccggctttcgccaaggtagttcgacgtgacgaagaggatgcaaaaacagtggagaagcctcagttggttggtgagaagagtgacgatcatgttcgagcaatctcgaaacaaactgcgatctttcactggcaggatgtgtgctacgacatctaaataaaggtgaaaatcggcgtctctttgacctatggatgcgtggttgaaccctgaactttgcaggcttgagggagtcctggagttgcactgcctattaaggggtttttttgtttccggtaactttggctaggtacaacagagctttggtcttccctgctagacttgtaactttgacatatccgtttacttttggatttgtgcagccgacttggccattttgctaggtcggtgctcaatcgtttggataggttcggtgttacaatccctgtcctctcttttggttccctgccctcctaaact

SEQ ID NO: 13739 - DNA, 1093 bp, Emericella nidulans
acactactatagggagaccaagcttaggatcttgccaattttcttgagccaagatcatgattggaatacccatcgcattcctggcagtgcttgggcaacttaaagaacaagctctcttacggcgggcccatcgttggcctcttgatctagggctattcgaaagacgcttctggattttgcaccgtctaaccatagtggaccgtccagcattgcccaaggataaaagggagagatttgtagaaagtgatgaaggcgggttgacctcccatctctattaagcggccagtcggctggagattcgcgtgtgcaaaggtaacagcgtgagctggttgaggatatacgaggagcatgcgaaataggaaatggcaaaagacagataccatagaaaaggtaccatagtcaaatgacccaagaaacgcaacggaaacacaccaaacatcacttcatctattgtcatcattatatcaccccatagttgaagattattacaaacgatgtagacagtgtaggaagattggaggtctgggacaccaatacgtttgacattggcgagacccttaagtgccagtctccaagtccagactttgcctcggctacgactagtggaggtaatgatctggcgttcctgactagtgtcggtgcgaaacgcgcactgtgcgtcagttcgcgaatgatcaagcatgctaattggaggtcacccaggctgatcgcaggtcatcggtgtcgttcatggtcatggcacatggttcgcttttatccagacaatcctctaatgcaatatggtcactctgacctcttataatgctgcatgacatctggtacggactctcgatccggtatcacaagcatgacaccacctttgtgtagctcatggggcgctctacgtttgcgagccctaaccgcggcgaagagactggttccttgggcttttgcccaccggaaattgtcaacaacaaaccgttcccttacccccaaaaggaactgtggcccccaataaccaccctttttttttgggcccctttcctggttgccttttggcccccttttaaagttttaactttggggaaaagttgggggcttctcgggggaaatt

SEQ ID NO: 13740 - DNA, 823 bp, Emericella nidulans
gccgcataatacgactcactatagggatcatcatcaccatcatcatcacgaacatactcactctcactctcattctcatggtcatggccatggacacgtcgttccaagagcacatacaacgccttctgaacggcggtcaaatgaccccgcagcaggggcaacccggcgataccgcgagtcgccgtatcccatgctctccgtggacgaagcactgaggcaagtttcagctcacactccggagccggaggttatcgaggttccggtgaatattgacctcgtcggatacgttatcgcggaagatgtttacgccgccgaggcggttccagcataccttgcaagtatcgttgatggatatgctgtcattgctcctgaatctccagatgacggacacagtacaaagggaatctttcctgtggcttctattacccacgccaatgaggagggagcgctagcaccgcttgagccaggcaccatcgcccggataacaaccggcgcttctttttcgcccaatgcgaatgcgggggtcatggtggaggatactttactagcggcatcgacacctgatggcaggaagaaacgactgtcgagatttaacctgagagaacaagcccaatgagaacctgcggcaaccgggaagcgatgtccctttaggatcagatcctttaacggggccctaataccccctgtcgtgtgaaaagcctgtggcggtccgggccaggggccgaagtttcaaaaaacctctctgggttgtctgcgaagcctaaaaacgaatcccgctttttaggggggatgattaaaagctccctctttgtttaaaaagggt

SEQ ID NO: 13741 - DNA, 775 bp, Emericella nidulans
taataacactactatagggagacccaagcttaggatcctacgcccccttaccaagcgtccgggaagcccaggaaagacgtagctttcgcctaggcctggtcctcgttctacctttccgactccgcttcttcccttcacagtatagtaaatagaagctgtagaacaacgccagtggtgtatgtccgtagaatttcaagtttctgaaaggcaacgttagacggtagctttgctagcttacttgcaaccgccacagcgatgacaaggaggtcgagaggtcatgctaaatgcttggtgatgaaaaaaaggctcgctacttggcctcacaggcagatttcttttcgtactttctaattacacctgtgctagaccccagtgctcgcggctcaatcatggagtcccggaggacaccgaaatcagcacgttgtcttctagtgtcagttcctttggggatcgttcaatgatctccatggccaagagagactctcggtacttctatgagagacggtctgccttggttcatctttattctcgttcacaccttccaggaacttccatggacgggttgtgccagccggattaaggtgttacattcgaagctttggaaaagcctgagacttactaacggctgagcgagcgtacagatgtacaaatgctatcaagatcttgataccactgagtcactttgccatgtccgacgtggaacatatgtgaggatagttaaaggatatccgcatcactattgtagactgggtggattcatttcagtatacataag

SEQ ID NO: 13742 - DNA, 1086 bp, Emericella nidulans
  unsure (1)..(1086): unsure at all n locations
ccggccgcataatacgactcactatagggatcgggaaaattgaggcaagtagctcgcttaggcactactgaatgctcataggcagttggcgaatatgcattttgttccgttcaataagggcactgaagatcgcatcgctgtaggagcgctggacagccccttacagaactctgacggagaccttgtattgtggaggggattgtagaggggagtggaagaaagnnannnnnnnnnnnnnncnnnanntgnnncannnnannaaaaaaaaaaaaaaaaaaaaaaaanaaaaaaaaaaattttaaaagattanaaataatttttattcatttatttattattttttattttatattatatattttatatttttttaaataattttttatattaaatatttttattatattatttataaatcttaatatattttttattaatttataattatttattattttttattatattattttaatttatttaatattattataatttattttatataattaatttattctaatttaattatatttatatattttaatttcatattcttcttatatcatttttattattactcttataattcttttttacactttaatcttatactatttcccttcttatatccatttcccttttaactattttcatcttaattacatttttcatactttttttctcaactttcttctatttcattattattaataatctttattctatattttctttcaccttacatttcaattattatttatatacatttttttacattcacaattatcattctctttttctacattctcatactcttatattcactatttctaatttctaccactcctctcattctctatatacttatatacaatatcatattcctctatctttctttaatctcttaacttttatacttcttatcttcattttaaaatcatatttttaatattacatcaccttaaatttcaatacttatcatatatttattttnnnnggcgtcatcattcatctcctatattttatcataatatctaatcttttttttaattctgtcttattctttatcatatgatactattc

SEQ ID NO: 13743 - DNA, 417 bp, Emericella nidulans
acgccgttctactaattgcatgttcctccgcgaaacggtagcggtaaagggccacatgcgctgcgtctgcaaactctacatggtagatctgacgcacgccacgctctgagcctctgtatccatgtggacccgtgcggagagaagcatgaactggactgcgcgcgcatacatcattggctgattccaagtgcagcactgagctagacaggaaaacatgagcgttggaaccggaaggctagcagagccttacacccgtcagcacactggaggtgatgcagagcacgcgcttgagaccactacggtatatgaacaggcataccagagactcagaagccctatcacgagcgcaccttcgaaactacgtcgagagctcggccgccaagatgtgcactatagtgaccacctcatcatccactg

SEQ ID NO: 13744 - DNA, 486 bp, Emericella nidulans
cacatgagaattcgcggccgcataatacgactcactatagggatccagctaggtggcgtgacattcaccggctcgatcgtagcgttcttgaaactcgctggccgcatgtcttccaagccgctaattcttcccggtcggcatctgctgaactcgactttactcggaactaatgtagccactatgggcgcatttgtatctatggctcccgccaacccgatgatcgccgctacatgtcttggggcgaataccgcactgagcttcataaaaagctacaccacgactgcggccattggtggcgcagatatgcgtacgtaccttgatccctttttttgaaacctgaacccatctgataaattcagcccgtgttatcacggtcctcaatgcgtactcaggcttcgccttggttgcggaaggctttatgctcgacaacccactgctcaccagtgtgggatctcttattggcgtgagcgggttcgatttgtcata

SEQ ID NO: 13745 - DNA, 1656 bp, Emericella nidulans
cacgatctgtattcgacttgttaggcacgacatgggggcatatggggcttggaaaagcagcagcgcacgacgtaccaagctcagcccgatcaagaactggataaggatcagcacggccatgaagcctagcgcgccacgtttgccgagagaatcatagtagatctgcccatcatcagcacacttgtcatctcccaaccactactgaaaaggaagtgtacctgtgccatcggctgcccatagacagtccccgccgttttggcgacatccggatccatgaccgcggccaggacactcagtaccagaaagcctaacaagcacgcactccctgcgctgaagaggatgccgcggggcacggctttgggcgcatccctcgcctcctcgctcatatgcacgcaggaatcgaagaagccaatcgcccagatgggcgacatgaacgccaggacgaagttccagcccgtcggccagttggagagattgtcgatgtgtccgaagacaaaagagccggaattcagggtcccgccgcgagtgaccttgccgacgggcaatgcgaccacggtcgcgattatgaggccaacgttgatgaagatgcaggcggtctggatgcgcggcatgatgttgctcgtgacgatcgtggcgacggagtggacgaggatcaggccggcgtagaggccgtagattatcccgttgctggcagaccagttgccgtcgcgcgcaatcgagatgcaggcgagaatgagcagcgagagcgtgtctattcatcagacattcgtcagcacctgtatatgattccctgaatcccaaatggcagggagacgagaattaggacgggggaagagtacaatcaaccgagcaaatgcccccaatcaacccgagcgtattgctatatcccaccagaaagctcagcggtcgcttgaacttcttgcctgcaaagtagtgcgtccaccagtagaacccgccggccgtcggcatagacgacgccatatctgacatggccagcccgacggtgaagatgaggatgctggcagtgagccagccctataaaaatcagagatttagcatattgcgcaaggacagagagcgaagagcgcagcaatagcgatagacagatcgagggcatacccaaaccatgcccgccggcccggcaggcaacgaaaacgggattgtggacgcgatcgatggcaccaggcccatgatgctaaatgcgatggcgaagatctgcagcgtcgagtacgaccggcgcagttcctgtttgtaccccaatttggcgaggagttgctggtcataggtgtcgcccaagcccggcgagggcgggcgaacgtctgtttgcttgcccattgtcgctacgatgctcaaatgagcagcgtgaatggagatgaagatggtgaaggggaggagaggaggtaaggagatcaaggtggctcgacgggtctagcgttgagccgagattcctattccacggtttaccagaactagggcgagttcttcaacccgtcatgtactgctcaaactcaagtcaatggcgtagcatcaatgcgttaagcatattgcattttcatagagtcatcgacatttggtgcccaaattaaagtgtgggcagggcaacacaaaatcccttgatacttgcaggggaatcccccacccttataatgctggaag

SEQ ID NO: 13746 - DNA, 1366 bp, Emericella nidulans
ttgtccgaataatttatgattttatgttcaatgcatctcttgatttcatcttcagacacaccgaaagctggctggatttcatcaagagcatgaataaaatcggagtggttgaccttcatttccgcggcatcgtccttaaccctaactgtcttaccggagtcaatgtggcggttgaaggcgaacgacgtagcagccttcacgaggccagcaatctcagcacccgaatagttcttcgtcaacgtcgctagttccgacaaattgacgcttggatccattagatcactctgtctcatgttctgggtgtggatgccgagaatctgagctcgaccagcttcgtcaggcagtgagatttcgacgtgcacttccagacgaccaggtcgcaacaaagcatcatcaatcatatccttcctattggtcataccgataagtagaatattgttgagctggtcgacaccatccatcttagatagcagttggttgacaacgctgtcaccgacaccggtgccgcctcctgctccgctgccacgctgtttacatacagcatccaattcatcgaagatgatgatgtggagtccactttcgtcgcccttctccttatactcttgttccgcgtcggcaaaaagtttacggatgttctcttctgactgtccgacaaacttgttcagtacctccgggccgttgataatctttggctctcgagcattcagcatcttcccgatctgtcgcgctagcagcgttttgccagttcctggcggcccgaagagcaaaatacccttcacgtgctggataccaagcttctgcacaatatcaggtgggaagatacgcgacgcgaaggcgcggcggaagatcgtgtgaaattccgagtcaagaccaccaattcccatcttctcagtgttgaagtcgggttgaatgatggcatttgctgcaggccggttttttgccggctttatctggatctcactctgaggatctttgaagaaattgatcaacgtatgcttcgtaaggatgcccctggctgtaggttccgtctccggcactttactggtatccttttctgaagtcaggctgacacgaaggatcgtcttgaccgttagctgaagcggtacgccatgatgatccatcagtaccggctgccccggcgcaaatatttggctttcgaagttctgataccattagtcaggctgttgagagctaggaaagggttacacgtaccttgataacagagttgagaagctcatcctgatcatatagagtatcgggtcttagctttccagcaaacttgacttccatatccgcagagccgaggtacgcctcccctccctgacggaaagggtcgtaaattcgtacgtcgagggagtctcggaat

SEQ ID NO: 13747 - DNA, 492 bp, Emericella nidulans
  unsure (1)..(492): unsure at all n locations
acaactatgagnacttcgcggccgcataatacgactcactatagggacctcacgagccactgtaaggcaggatttgttcttgccgagcatcttgatttctgcgagacctggctcagaagcatggtggaagggagtaatatcagcgacgggggagtcctccgcactctacgagaaggcgctgttattgtaacaaccggcctgctatagcgagccctggggtgcgccacagggcttggccggcctggcatgctgccttactatcaacggcatctgggtcaagtgggaagacacccagtcaacggttgagaccctagcgtaggatgctgttactcgcgctgataagatataccgctggaatcgaatgatgacgctcaactcaacataaacaccggtatcttttaactagagtgcgaacacagagtccggctcggattccgggatacttacaaggagctaccagtatcgcgtaagattgccaattccgatgaacag

SEQ ID NO: 13748 - DNA, 653 bp, Emericella nidulans
attcgcggccgcaattaaccctcactaaagggatccgactgcacagcacctttgcccactgatgcaatagggacgagagccatcggtgtctatgagccggagctcgaactaacctagagcaggctgccggacgaacattatcttcaagagcatgaacgccctagtttcacttgggatgagcaggccgtccattaccgacgatgtgtacctgaccgggagtatctgcgccttctatgggagcaaccgtattgtgacttataggactgaccacaccacaatgacgcatgctcactcacatgatgactcctgtactagatgccgggccctgatatgcaagagtagccttatctaggcccgatggacgagcactcagatgaccagagtactgatgccggggacaagacatggcttccgatacacgccactcacgtgtgcgagtgacgaaatggaagctgtccacgatgatagagtccaactcctggacctgaaccattatacacctgctgatgagcccaagataatgtgtgaacacagcctgtgcatataatcactgttagtctaagcccttatcgaatatgcgcacatcgccgaatgcgccagagatataccgaggcctgcatcacaatcatgaacggccacttcacagaactgga

SEQ ID NO: 13749 - DNA, 1022 bp, Emericella nidulans
tgatccgaaatgatagacagcagaaatgatgatatagcgatctgtctaacgagcttcccttgcacgagcgatcgcatccacggttcgcatcgcgaactccaccccagaagctgccccggtctgctccccgtctccaaaccagttcccgctacggcggggtgatcggtcccgtgtatcctcgtgctcaatatggtcgaacgagttgtcgctgcggttctttctcaggggcgcaccaccgccataggcaagagggtcctcctcggcgtgctcaaggttgcgttcctcgtttatcagggcattacggagtacatcaagcatatcgcgctgtttggagtagaagctcgccttctctgcgcgggttttggactcaaactctctggggagaagagacccgctggcagaaagttcgtctgcacggctttcgtggctcttccctggagatgtcaccgctgccaccgcggagctgattgcggaataccaatcgttggcaggtgcggattggtaccaccgacagcagaagggaggttgaagcgggacaggagggactgtgcataagacgctgcgctggcgggtggaggagtcgggggtcgctgcgggggaaggcctagaacgcgctcccttacgaagtcgatggcctggtaaagatactggagacccagtgccttcgcacgttcgtgggcacggccgatgaattcctcaatctctcgttcatggtgtgcaaggaacggctcgacatagtcttggtataggatgcgggcaccctgggtctgcggaagaacgaggtatgcgaagaagccgagccggatccagctatagaaggggatccatcctataatgaagtatgtccaggattcagccatgaggatggcagaaagcaccacccaatacatcaaccatggtgccaactgatatggatccgacgagcgaagggccttgtaggaagcaaagatcgggaaaagaatggtgaggatggagctggagttgcctggtcagctctaccgcaaaagtataggggcagggca

SEQ ID NO: 13750 - DNA, 1197 bp, Emericella nidulans
tgtcacggagacattgcggttcaatcatccctcccctgcagctcttcttcctttctcttctaagactctccatttccattcccctcctcaaagcagtattcgagtcaattcatccaatcactgatatttgccttcaacgtccgttttgttctgtccaaattggagaccaagtttatcagtcaccttggaacagctggcgtgtttcgcgtgtacctggtctccatcggccagtgatcgtgctcctcagccagacacttctggttcgccaattgcctgctgcgcgcatcgcgaccagtctccagtaattactcctacctatctcctccagagaatcaggccaattatttcttcgacaagccagatctattccgcagcctttcgaatcctaaagaataacctggccttcgactgtcttcacctgcgcaacgtgccactgtccataattggtccacggttacttgcgcgttacttcagatccgccgccttgagtaccgctgacgttatcgctgtaagtcttcccagcagttgaaccaaggcgtctgggagttttcaggaccctagcgcgttattctcctccctgggcatcaaaccagcctttctcgcccaataaacaataaaaatagtgcattagaatttagaagggcaacctagcgcaatttctatgctcctcggcgaatgagagcctccccgcatctcatctacgccgctagagcagagttgtcatggacgcgctgccaatcctcccaacagccctgatctgcttttttgtccctgctcaggctgttgtgaagcagctcgatgccagcctaatcccgcttccttcccttggtccatgcgccttgaacctgatcctgaaagccagttgcgtggtgtgcactctctgacgtggatgccaacagagcttattcaaagtcattacttccaaaaccggaatcgcctacaccttcgccaacagctaaaaccatgtcgtcgacctctccctccaaggagcccgaggtggaacaggaacctcaatcgggtgaagaacacgagcaaatggacaaggaacaagataaccaaacgcaaggtcagggagagttcgaggtgaaggaacaagacagatggctaccaatcgcaaatggttagttacgtcccttgcagctctgctgttcccctgatttgcgcgtaccttgcttttatccgctggtctactgctgt

SEQ ID NO: 13751 - DNA, 1375 bp, Emericella nidulans
  unsure (1)..(1375): unsure at all n locations
attgaaggcctcgagaagctcctcaagtacgccaaggtcaagcctcatgtcaaccagatcgaaatccaccccttcctccccaacgaggagctcatccagtactgctggaagaacgacatcctgcccgaggcctactcccctctgggctcgcagaaccaggtccctacgaccggtgagcgtgtcagcgagaacaagaccctcaacgagattgcccagaagggcggcaacaccctcgctcaggtcctcattgcatggggtctgcgccgtggctacgtcgtcctgcccaagagctccaaccccgcgcgcattgagtccaacttcaagaccatcgagctgtccgacgaggactacgaggccgtcaacgctgtcgccaagggccgtcacttccgcttcgtcaacatgaaggacacctttggctacgacgtatggcccgaggagaccgccaagaacatctccgcctaaatggttacacgattctctgttttgggtggctggtagggatttttttttttctgtttggatttggtagcggcttcatgttatgcaggtcatagccgcagctcgtccattctcctctcttcttaccctcggctatatctacggatttgctaccgagaccgaagtagcaggagggcatgtgagccgagcgaagccaggaaacgatgtaaacgaaactgaagaactagctttctctagcttgaacttgggatagaacgaaattacattagagtgtatctcatttaccaacgtttccacgaggtagaattgaacagctccaaaaccatattggataccaataattcgacacccaatcccaccatgccatcagccaccgatcgcatccgtcaccgtcgccggtacttctccatcacggaccggaatggatacggatggatactgccaccgtcggttgccaatgctacgttcagacggaggacagtcctccaggtaccctcgcgccggcataccaatgacgtaatcccactcccgctcggaaaaacacgggtctccagcgcaccggtgggcaaatgtagtttaagccctaatcccccttggacgctgacggtggatcctgcagccctaattgtccagtagcttgaaaggatattgaggcgttgtggccgtgtatcaggctggtggggtgggaagtntncaactccgcgtggatagttggatggatggaggatgaatgattggtcgggatacgaggattcttggctccccccatctttaaccaccctcctcaatttcctatttctctaattcctcatttactcccataacctccattcaaattcttctatctatcctcatcaatactatctcttccgttcttttttcattattcctttctacttattctctttattttaat

SEQ ID NO: 13752 - DNA, 627 bp, Emericella nidulans
taggaccccagagtacgtatcttttaccttgacctttactacggccatgctttgtcgtgctgtggccaggctttagcctatgatatgcattgccgatcactactaatatggccttctagtacaacttggcggacatcaaggcgcaagaaattggagcgcaattgcagagaaactaccgggcagaacgaacaaagactgccgcaagcgctggaccaagattagtctgagcagtcggaaaggaacctggactgccgcggaggatcatcttttgcgcaaagccgtggctaaattcggctttcagtacgaacttctcctcggtcatccttcatcgccattcaactaagcgctctcagatggaccaaggttgcagagatggttggcagccgtcaccctgaccgtaagaatctccacccaatttgggtgcgaagtctcatctcggtacagaatgtgcaaagcgatggcatcactcactcgatcccaacgtaaagcgcggtccctggacgatggaagaggacagctctcttctcgaagccgtgcaaaagattggccgggactggaaagagatcggacgagagctttttcccaggtcggtccacgacggatttcaagaaccggtaagggtcaatc

SEQ ID NO: 13753 - DNA, 923 bp, Emericella nidulans
actaattgcagtgctacgatcaagatttcccacttttgagctaccaagcctacgggattgaaaaataccgcatccacatgtcaagtcgggtctgtctcgactgctatgaggtcttggccaagtacgaggcccctgcaaatgctacatcgtgatggttccgagatgtataaccatggaatacggccaagggacatgcactgaagcgtctaggtgagaaggttgactcttctaatgcgtaaggtgtagaatacctactagtcctactaaagtgccaatgacacagagaaaaattatagtgggtgccaatcaatcatacccagttagacagtaagcgaaacaacagacctctccttgcccaaatttcaactgaacattgactcgtcatctgccccaggtgcggctaagccagtactgaagcaccaagcgggctagtactgaacaaccagatttaacaggtctcagacacttcgtaacgaaaacacccagtggacgtaagcaggatcactgagtgatctaacttgcgacgcgggggctccgaattactttctggtcgtcatgatcggcaaagacactgctcgtgaacccggggcaggtacaagcgtatgtgtaatagtaagggggactatagagaatggccgtgatgaattgatcatctcacaggcgttattgaacttgattagtctcgaaccagctaccctgctctggatggctagtaccgcttgagctcgtcgaaggcgatgctgttgttttcacagagaacgacatgccattcgtatgcatagtgatggtctattgtgaagtcggaaaatacaagcacgagctttacatatagttgtaatccagaacccaaacacttcaggtacatacgaccacagagtgtcatatttttggtctacatcagttattgctcagcgaaggctggt

SEQ ID NO: 13754 - DNA, 521 bp, Emericella nidulans
gccaccacaatcgggaagactctcttatcggggcattgaccttgtaagaggctagctgaggcttagacgctatgttgccaaattgaggtgacatcgcgtatgcgtatttgcgcctgggagccttcagctgtatccatggaagtgtatattcgcaatattcccttggccctctatccacctcccttcatgatgccgagttcctacagagtaatgacgcgaatacgaaggcgacgccaaagcctccagctcctcgccggtaccctcacgctcatcatccttcttgcccacgtccctgcagtgtcagccgctaacccgtcgtcttcaacatcgtcctcgctctcgttttcgtcctcgatagcaaccacgagcgatacccaggcccacccttcaagaggctcaaaggctgggatcttcatcggggccaccgtgggcgtgctagctacctccgctgcaataactctattcttctgcttgcggcgtcgtcgccggcgacgccgccgtctttcttgctctcctccggg

SEQ ID NO: 13755 - DNA, 1223 bp, Emericella nidulans
gcgaccttgtcggagccaagggtagattttaggttgctacagacaccggggccgacgacgaagccctttgtactgttagtggtttgccgaaaagggttgctagtctggggggaaggcgctaagtaccatgttgccaatttcagtggagccgcgggcgaagatgaatgccacagatttgcagtcgcccttctcaaggtcgttggagttcatactctggcggcgctcgagggagacatcggtatcgctggggaggggcgtggcgatgacgagggaggccagagccgcgaggagaatggtgtggaatctcatactgaacgagtgattcgtgatttgtgatcaaggaatggaggagtaaatcaaatgaatgaatgactcgatgcaccgggcagagtctatctaggctggactgggctagtttggatgaggctttcctctgctgctgtctgctataatccatcccagccagggttgaggagatatttataccccattgtcgcactcacagacgaaagatcaccgaggcaaggacagcttcaacaagtaccatttgactttccccaggatctcgatacatctccagtaggcaactgggtacatcacgggcgttcgtgtctcaaagtaggactagactgcgacatgtccaaaaattcggcaaccggaaactagccaagtcagccctgatctccgagaccggacaacaacgatacgctattagagatattagtcttgcttcgactatacaattttgggtatttcgacggcactgcagtctcatgcagggtctactaagttttgtgtgtgccctggtccggcaaccataagaagtgcggtgacacgacagggacacgattgggcgagcacagtcataatgttgaatctgccatccaaatcggagagatcaaactgactaccgatgcgacaagtgccggggtaccgaggtgaggaatatatttgtaacagggtccgaactttatgggggttggaaatagatatggaagggcacgaatgtttcagatattttcgaattttccggactgccggagcagactactgctccggggaatttgctacctaatttcatacctagggacctgatcaagggacagttcgtagactgccgggctcgtgcgtagagatcacaggctcactggcttcggcagttgtttacctagttctccgcggctgggccggtatacttgagagagtaaatgccgcgctcaata

SEQ ID NO: 13756 - DNA, 525 bp, Emericella nidulans
gcaccgcacggtccttggaaaggatcactctgaacgggcttgggggtggcagcccacgtaccaccctgttttattgcgaaggaggcatctctccactgactgagggactgatgacgcgcggtttgttataagtctctaacttctagaagaaaaccagcccctcacagcatgcctaaatcgctgctgtcactgaataaatatagaaggagctgctcaatagcacgttcctggatctatcaacatctatccctatgcgagtgtactaaagttattccaatgcgtgacttgtgggcactaaaagctgttttctatggacaagcaaacctgcgaagagctagctattccgaaactatgggtgagagtacatttccggtggctgtcattgatagtcgtttttagacccccacaaagagtgtctctgccaatttaaagatcacccgattctgcccccatacactgtcgtgtagaagcagaaaatactctatctgagagtttgtcgctgccaacatgcatcagctggaacga

SEQ ID NO: 13757 - DNA, 444 bp, Emericella nidulans
  unsure (1)..(444): unsure at all n locations
actatggttntcgtgtataagagtcggctccctcaaagaacttttcggtcaaactactcacaggtttcataaagaattcccgctcgatcttaggccctgctgaacgccctatggaatcgattctcgcaaacattggcgttaatcgctcggcgtactcagagcctgtcaatcctgactcgcaagccgcttcgcgattgctcgtcctatgccacccaaatcagcgacatggcgacaaacggcaaaatccatcttacctgtcaaattaaaccggtcatgcgcatttacagacgcgcaggcaccatgcactcggggatgtgaaagttcaattgcaatattttgtgtcacacactacaagggactcaggacagatggactggccacactctgcacaatccatgacgaccctgtgcaattcaactatatgagcgtggccttttttcagag

SEQ ID NO: 13758 - DNA, 431 bp, Emericella nidulans
aaaaaaaaaagaaaaaaaaaaaaaaaaaaaaaaaaaaaaaaaaaaaaaaaaaaaaaaaaaaaaaaaaaaaaaaaaaaaataaaaaaaaaaaaaaaaaaaaaaaaaaaaaaaaaaaaaaaaaaaaaaaaaaaaaacaaaaaaaaaaaaaaaaaaaaaaaaaaaaaaaaaaaacaaaaaaaaaagaaaaagaaaaaaaaaaaaaaaaaaaaaaaaaaaaaaacaaagaaaaaaaaaaaaaaaaaaaaaaataaaaaaaaaaaaaaaaaaaaaaaaaaaaaaaaaaaaaaaaaaaaaaaaaaaaaaaaaaaaaaaaaaaaaaaaaaaaaaaaaaaaaaaaaaaaaaaaaaaaaaaaaaaaaaaaaaaaaaaaaaaaaaaaaaaaaaaaaaaaaaaaaaaaaaaacaaaaaaaaaaataaaaaaaaaaaaaaaaa

SEQ ID NO: 13759 - DNA, 1406 bp, Emericella nidulans
ctcactatagggaggaccaagccttaggatccgatgtcgcgaacttgctcctgatgaggtgcttgcggtagagacggtggaatttgcgcgacatgccgccgattccgtctttgctgtacacagacacacattcaggggacgtcagggtctcgccgggtcccaagttccaggagagttggtcggggttgaagccgatcaacgcgcgggtcaaaccctgggatcccttctcgacttgagcggagaaggagccggtgtagacgaggttgaagccccatgcttcgccctgggattcggttgtacaagtgtgcacaagggctaagaaggggttgagaaggtggcaggagtagccggtgctgcttccgaatctaaggtacgtggttagtatctggctccacgttcatagttgactagtcgtcaaatagatcgaaaagagagagagaatgctcacccttgaatgccatactctactctccgcctctctcggttcgcctctctcgcccaatcacccctcaaactgacgaggtccaagtcctcgagcgggaagtctacagagagactcgccaaattctcaatagtaatattgccctttcctttattcgtaacgttgacgcttctaaccacagcatcaaattctggaaacacactgtacgagaggtccgcagcgacggcactgtaattgtcgtacagatgtacaaccaacgtcgtcacatcccccgcctcaccgaatgtcgccggcaggccaggcaacgccggtttaccgtcgaccacctcatggccctgatactgcaggtcgctgacagtatatccagccgtttgacggatgcgcaccgcggggatccggaaatcgccgcgcccttggtcggggaattcgcgccggattcgaccgggcatcccgacccagccgttgacggctggctcctttggagccggaatggcaccgctgatggtcgcgccgaagtggtcagagaccagatcgccggtggtgctgtggcgtggaagacgtaggacatgcttgctccgtgagacgaattcgtccctgacgacacacgttggattgtaagcgcccactactatcgttcttatgaaacgatgccttacctttgacagttgtcctggcaacccataggcatgcgtgcggacaagccacggtgtgggcccgaccctgcggactgaggtgtgcctgataacccactctggcatcaccccggagaccctatgtgcctctctcgaaaaaacccaccccggaatgggtttttattcccaaccgggcccccgccacgaaataggccgccgcccccgaggcttgaaatatttatcacggaaaccctctcccgcgcgggtttttgtttacctttttgctcaccttcccccctgtttttcttttgaaaataaatttttttaaaggt

SEQ ID NO: 13760 - DNA, 488 bp, Emericella nidulans
aggtcatctagtttttttttttttttttttttttttttttttttttttttttttgagtctcagaaatcattgacagagttcaaaaccggcttggtgaactccccaatcaccttcggcacatcctccagcccgccaatccagatctgctccagcacagcccacgattgccccctctgaacagacggctgaatagtggcaaatcccgtggtgttcacagaaacaagcaagtacggatgctttgtatacgacgcgtttgccgagatttgtgccgtctccagaccagacgggtaaaatgccgcggctcgtccaacaactggaataaacgtatacgcctccgctgttggtagcatacacagacacccggcattttcacctctggggcctcccaaggcttgttcctgctcctccatagtcaggcatgcatgggaatggccgatgtgcattgcttcggcgtgtgctcgcttcagaaaggtcatggatgggtggaa

SEQ ID NO: 13761 - DNA, 543 bp, Emericella nidulans
  unsure (1)..(543): unsure at all n locations
ggatgngattttggggtacacactgaagccaatgagcaggtagtgtccctatgtgcgacacactcatctatcttaccggctagctgcctagtattgatacgatgcgatggagctcggtcattcagtcccatacgacagtacatgatgcattctacatgagaccctgttaacccatttattgaaaccgatgtcacaaccgccggaagatctgtgcataccgaccagttaacttgactgtacagatgagtcaagcgactatcgacatatacaggtttacactacccggcacatctggttattgtactgtagcaatagctgcatgtataacactttcacgtgactagtcgtttcatatggctgacatgatgcgtcattcgtgccgctcacaataccagacaaaggtattcctcacttacatggcatacggcatgcgatacctattaaagagcgagcactctggtaatcctgtaccatggttatatcatccagacgcacgcacagttgaagcacatgctctacgtcatgctaaatagataaccgtgc

SEQ ID NO: 13762 - DNA, 1263 bp, Emericella nidulans
catagagactcgcggccgtataatacgactcactatagggatctagggagagcagttcgtttaaataacaagtcgaacgtgatcatgtatccggaccccctttgacattgcagacgtaggccggttctgttcgtcgctcactccggataaacttcatgcgtcggacaaatatccgaggaggcgatccagcgatccagcgatccgagaacatgatcggaatactccactatatctcgcttgtaaagaatcgtctaaggcagatgtaagaggaacgccagtattaagaatggggcaggagtctacggatcgagggtccccgggtacggtattggaagtttggaaaaatccaatacacgctattctcttggagtcgatcaaagtaaatgctagtgtactatctgcaggatgccgggaacggcagctgagcttcgttgatgcatagcatgctatagctcagaaagaaaactgagccggatcattcggcaaattagagaatgcctggacttgttagctaagaacagcccaaaggacaggactaccaacccaagtatccaattgagtccaccaaatggacccttcaagattgtccagaaacccaacgtcgcccatttcaggtggtccatctacgaaagctgatgacgggaaattcccgtcatagctgatagagttgaacggaacgacattgttcgtatcagtcggatcgactggcctctgctcgactacggcactgcgatcctgaataggcatgtctcgagattgttctgggttgttagcgagcgaacccttaatgagctttgtgccgagttgcttgtgcacttctagccttgtttcctccaaaatgataccataacgccggctagggcagtttttgcgcgtcgcttctgccaaatgttgctgacagacctccgcgaggctaaagagtgatcgtacgctgttggtatctagctcagcaggctctaggtttgaggacagacgatgctgctggatggtgtagatgtagaccacgacaattgcacagaaacatacatggtgggtgaaccagaatgactggataagggtgccttgctttgctatgctgtccactagcttcatgacatgctccgctgcctcaaggcatttagttacatgcgtcgacaccgttgggtgcggagctgctggccgacggccaaggtcggtgaaatcattcaataggaatgacctcgtaacgtgtatcattgcatggcagtaggcgagctggaggacttggctatgcctgcataatgg

SEQ ID NO: 13763 - DNA, 364 bp, Emericella nidulans
agagtccgcgagatcatcgcgatgcccatagcgagctcgcctccacgttagagaagggatcatcgaggcctcaaagccagaaaacaccaggaatctcttggccttcttggtgaacaataccctctggaaaaaaccctctagcaagatggctctcttcagccccccgaaccacagatgggctggcctgacagattggcgtgccggcagactgcatgaattcgactttactcctgcacggctcgataggaacgctactggggccggtaatgataatgccaaggttagcatctgtggaattacctgccatatgctcacgcccttcacgcagcgggatcgctgggcttgtatgggtgatgccgctggg

SEQ ID NO: 13764 - DNA, 569 bp, Emericella nidulans
gcatctcagatgtagtgctcatgcaaaagcgctgagtgaatacccaaattgccgcatgaaaaaaactgcgagtgttttttcgagtttcactggagcgggagcaggcaagggtatcttggtatatggggagccccctgctcgagcaggatagccttgctgcccttgaccagtgggtgcggacggtaactgtacaattaaccatagacagcagcaaaagctctaataccgcttgaaaagtcagcttgtgcctgacacagaagagtccaatgtacgacaagaacaactaagcggcctatgcggaatatttacaaccagcatgaggacagagactgatggtggtggtcctccatggtctatgagggatcggcacaatcactaatagcacatcagtgtgaacgaaaacacagaaataagggtacagccaaacaatagctgagcagcatcgatcaagctgactcgggctaaatggaaaaagactttgcctgtttaagaaaccaccgaccagccgttagaggaccagtcattcaacgatgatgaagctttgcaaaggagtcacccattcctattcg

SEQ ID NO: 13765 - DNA, 1050 bp, Emericella nidulans
acataaaccgctaaggtggtcaggttaatttacaacttcatcggaccaaaactggtttgtcctggccgaggaaggccccacagttaatggccataagtaagttagctcggaagaagttcatgtcgttcagaagagtaatcatctatgtttcatggccgagactttatgtgttaaatgtagtgaaggctcatagcagaaaatatggccgagtcactgagcgatgcaacagtgtttgcatacacatgtcccgagcctagcaaggcccgatctgcttaaataacagcggcgtgggtcatttcccagcaagagatcaattctcctagacttccgattcggcatctccatatagtggatcccaggtttctgtttgattggccactcgaataacgtcgctttcagaaaatgccagagcttctcctcggccccagcctgcgagcatagtcaagaggcaactcgtcatgtcttctagtccatcatcctttctcctcttcattctcattcactttcatcccatcactaaaagtcagcctacaattcaataactacaacatggccaccgaacgcctaaactccatcctctctcacctccgcccaggaaataagggcgtcgccgctatgtcagttgccacctaccatccgcatacttccaccacttaaagcacagaacaaggcaagactaaccatcatccagcacgcaaaagaatcctgacgacgtcgtcataaccctctccctccgcacgcctctcacaaaagctcgcaagggcggctttaaagacacagaactcgattaccttgtctacgccttgctgaaggaagtgatcgcgaagtcccagatcgaccctaacttgatcgaagacgtctgcctcggcaatgtcaatgatggcaaagctgcctatctcgtccgggccgcctccctcgccgctggaattccacacacagccggcgcatcctcggtgaaccgcttctgttcttccggattgaaagcagtccaggatatcgcaaatcagatttcgctgggggccattgatattggtgtcgctgttggtgcgg

SEQ ID NO: 13766 - DNA, 1575 bp, Emericella nidulans
ataaataaaaaaagtagaacaatataaagatgataaattgtgaaaaaacgaaaagaacgtaaggacagagataatataaggaactactcacaaagaaagattaaaaaaaaaaactaccgacaaattacacacaacttgagtagtatgactcacacataggaaacttaaaacaccaaaagttaacacttgagataataaggagggaaggatccaagggagaaaaaagagaagaaagtttggcaagaaaggaaaaacctagggggtcatatgatgccagcatttttggagaccaccaggggtttctgggcaacgatgaaactatttcgctgttctagttgcccggctattctgtttcaagacggccctcctttcaaattgcgcaatgcagactattcaagaagatattcgaccgccaaacttgatccggccatgatgcgtacaggctaccctagtatagccataagaagctagcctcttaggtatgcgtggctgtccggtcccaggggcatcaggagagctagtagtctactagtatatcccggagccttttttcaagaaggcttagaacatatgtaccaattgatctccgtaagttatgaagatacgattattcagtaaacgtacacttgaatcgcagcatcagaaactggatgaaataattgtatggactcttaaatgattagacacttaggcagcacatacaagttcactaaagagtaacgtcgtggtggttcggagctcctgccccatgaccagtcaatgatgcccgcagaggaatagtgggtggttgacggcgggctcgctcatttgatcaccggatcacactgccattctcgaactaataatatcatgaccagctgtgcaatctacgtaactgctgatatttctgtatgatatcctgctgtcctattcaactgtgatccagcccctcgtacccgtgactttatcgggctgtcttttctccactgtccgctcctgcagccgactctctgactttaaatcagctcatcagcctcaacagtcatcacgaaatcacaatccttaaaaacctgacctctgcgaatacctgcttatcatccatcaagctctttaatttcgcccatcatcacgggctcagtgaagtcacttagtgttgtctccgcagctatctcctcccccgcctgtaactccactcacttccaccgcaaggaacatccacggcagacggtgcatcttagctggatctccatactcttacccttttctccaaactgacaccgtccgtattacccgtatagctcttgtgcagctcacactccaggaaacataagggtctttcctgaccagtagcgctcggaaaggccggcaggaacaacagaacaagatgggtctattcttataacgtttaccttacatctgccaaaatcttcgggtgcaagcaatgcaaaacgcatttgggccgttttgacgccctcatcaggcgggtgaggttcgctatccccacccggttataaccgactggtgttattatgggctccgttgcaaaatttcgggtcaggatggaaaaccgccctttcaataccgtggaacccaacc

SEQ ID NO: 13767 - DNA, 1442 bp, Emericella nidulans
gaacagccctgtctacatgacatgcacgattgaggattgggtgagtataacaagaatcgattgcatattcacgggggtatcagaacaactatcacacaaccaacaaatcaaccataaacgtcaaccgtcggcatgaaccatcagtatgaaccgtaaaacatcaacatcaactcagcgtcagccatccggatactgaaccgcgaactgctcgcgctcgagctatcgcctccccaggcccctgtgacgttcacaccccctatactgcggatccccatggcccccagcaggttctgcccgcgccgcagcaagtctcgaccctcacccagctgctctctcctctcgatgccctgcctcctcagcgtctcgatctcggcatcgcccaggatacacccaccagcgcgcctctgccatgcagcctcgcgcacaacgggcgcccacagctcggcggccttcgcctcgtccatccctgcggccgcgtagcactttctcgacccgccgggcgtagaagcgtcggcgaccgtcttggacgagaaccactcggaccggacgacctcataccgccgctccatgaaccatataatgggccaggtgatgagccaaagttggaggacgatacagatccagtagacgtaggcgttgttacgcagggtattgatccagtgcggcgagtagacggtcacgaagccgttggcgatgactgggttgatgacgatgtggccctggtagccggttgagcggatatgggaggtgagcgaagtgcgcatcgggttcgcgtcgaagccgtgcagggtgcggcggtaagtgaagctgcaagcagtcaaaaaccagtcagcatacaatgagcccggtgtccaagggaggggatagcaatgggaaggcaacgggaggatggatggaggatggcacgcacgactttacgggggcgggatcgctgcagaaccgctcgcaccagcccctgatcccgggatagtcctcctggctctccagctccatgagcctctctccctcgaccgcgtcgccgagcgcgatccgcccgggcttcgcgttgcccgcgcgcgaccgaatccgtcctccgcggtacgccttttgcccgtcgtggtcgctcacgacggtcgtatacgaccaccgcacgctaggcccactggcttcattgcggccccagcgcaggattgtgcgggtcaggtcgattcgaaaatcgaaatccgtcacgttctcgttcttggtctcgttcccgctccgtcgggtttctctatggctgccgtgaatggacaggcatgggcgcggcgggagacgcgtctgcgactcgatcaaggactcgagcatgcgagggtcgctggagtaggacggatcgagcgtcaccgagccagagaaccgctgggtcggtcggatgctctggtacgtttgctggccggggatctcgtacgcgtcaggcggaggggata

SEQ ID NO: 13768 - DNA, 1341 bp, Emericella nidulans
caaggcgggatccctgtctccgatctcgtctcgcagagagatcattgtgaattctccacgctctgttatgtgaagcgacattccattgttccccttattgtccagccattcgaagacgacgtcaacgacgtccttgagatcggggctttttccaaggtgactatgaccaatttactgccaacattttttccctttccagaggccgtgaagagaaagagacacgagcaacggaagataaaacagccacaaaaagcatgatggatctacgctattcttttagcaccctgcatagcacgcctgggcgcgcaaacatgttaccgctggtctctggatccgcctattgctcttctatcgttccgtttatctcttcctctattgctgttctggacttcttgagcttttgacgtgctgtatgagagtatttgttcttgattttcttgacgacatccgggttcgacgaaccacaaaatgatttcattcaggattcgcatgtgggaagagtttgttttttgatggtcggtcgaagatgggaaaagcaagatgctgttattttctgtatctgtctagcagtgtattctcgatttctctccagcaaaacagctgcttagtctagcattaatggaaacgtcgcagcgaagcattgacctcaatttgtatcagtttgctatcactgcgtccgagcacgacatgagagcaggggtaagcgaatgctataatgcccgttcgaggccggctacctgcgccggatgcttgaagtagcggaacagcccagttgacgcaccgtacggaaagattggttgaggagtgttgttaattctggcatcgactcaattgcacctgatagagagataagtctagtaaagataaagctgttgcggtcaaacccttctaccctgaaatgatgaacagaacgccaaactatgaggtctatgaatcgtgatagacatgaacagtcgtggtctggcaatgttaagagcgtaaatatccaaacagtggtgacttcgaagcaaagcttcaactgcgacctgaacgcttcagtgagtcgtccgtcaactcgtacgcgggtcgatattcctcttcacggggtcccacagactcggattctgatgcgtattcgacagcccccctagactcgtatagccctgatcatacagtgaaacagtctccatcgtagatgacgcagaaacgcccaaaatctcgataccgccaatcaataccgggtgaatggcataaaagtcggcaccactaatcgtctataaaccagtaaattcgcccaggcgaatccgtctcctatcccacaagaacgcttgccgacgattttgttagatatttaaacccgac

SEQ ID NO: 13769 - DNA, 135 bp, Emericella nidulans
tctttttttttcttctttttttctctttttttttttttttcttttatctttttattttttttttgttgtttttttatttttttttgttttttcgcgttatgctactcgttttgtcgtttcattcttttccaccag

SEQ ID NO: 13770 - DNA, 446 bp, Emericella nidulans
cgtgcgcctgtttgggtctgacgccgcctgagcaggcccttgtgcacgcgaggcgctcgcgcacaacacagtactgttggactcgcgactcaaatgactcgaaaccgggcgggattggctccagcgggaacagaaatggacgctataggaagctaagctgcctggtattttttactgactgtatgaacaggtacagtggaggcagggccgcatggacatcacagaatggtaaactgcccaacgcctatgaagggtatacacgtcactaattgtacagacgctgacgacacgatccacagggagcaagggttgtcgagcccgggcttctttaaatgtagtttgcgcctgggatggggaatggatcaacagactgcggttcatggactactccacattatagacctggccattgagctcttcatcaacgactgccagatcagctgtga

SEQ ID NO: 13771 - DNA, 335 bp, Emericella nidulans
aaaaaaaaaaaaaaaaaaaaaaaaaaaaaaaaaaaaaaaaaaaaaaaaaaaaaaaaactcttaaagcccccccagggggtatttgttcagggggaagaccctgaattcccccggcggggggcttttttaaacccccggttgaccccagggtccaaaattcggggttttaaggggtgtgccccggtaatttgccccttaagttccaattttttggcccctgaactccggttaaaaatccgaggtgggaaaaaagggggtaccccggtgttgccaaaatttttcgcccttttggagataccatttccggaattcgcggggttaaaaagggcgaaaat

SEQ ID NO: 13772 - DNA, 1330 bp, Emericella nidulans
aggagatgtccaggaatcggcagctataccattctccgttcgcactcaagcagatgttttgctctgaggagcttgaaagcgccctcgcgtcacttactaataggttgcaaactaccaaaagagcccgtacgggacgtttatggaacgttagaggccgggtcgcttcatctgggccaatgtttgctagaccttttgataaagtctggactcctgcaacgacatggatgcccccaaagctcggaagactggaaatctactataatgcctttgacacagatactacgatcggttgttcttggaattggattcaatataaacctgccaaaggtgccgtcacatctcgcgtcgaaggctcggtttcaagatctcagctaccctaacgaaataattattcccttcagaaacagtgaaaatcatagctcgatcctcataatggccaactcaaaaggccagaccaggtagcagacccagagcgtcttccgtagatgttagtctgtatacaaggtatcaggcaacagcaacgaaaaatccctgctccccatccttcctctgaacctgcgccctgtgcaccaagtcgtctccaacagcaagcctcagcctttccaccgtagctgggctgtctagcaccaacggctcgcttacccccctctccctccgcgcgtggctgagcgcatccctcagcgcgaagagcacactgctccccatgaaaagtggtggctccccgattcccttgcttgactggatgctccgtagcgttttccacatcgtcttttctttattgtcctgcaggaaactcacattgaatacttgcgggatatcagcgaaccccggaatcttgtacgtgcctggcccgcgggttgccagttgtccggatcgcgtccagagggactcctccatcgtgaacagaccctgcccttgcacgaatgcgccctcaatctgtccgtagtcaatcgcagggtttatgctgcggccaatatccatcttgaggtctgcacggaggactgtgtgtgtgcctgtaagcaggtcgagctcgacctcggtgcatgccactccctgtctctgttagcgggaagcctggaaagaagtaggagagggccttgccatacctgagtaaaatagaaatacataggctttacattttcggaataattcccccactcatatccaatagtgggcatcttatagtacccggcggctgagaggttcactctatctcggtaggcagctttggcaatcgtacctaggtctgcatcctccccatacttctcccggtacggcctgagccgttcattgatctgggcgcaagcatgtttgatcgccatccattgag

SEQ ID NO: 13773 - DNA, 471 bp, Emericella nidulans
cgggaacccatacctagcggtcagcccacgatatgtgcgtcctaagctggagtggtttatatagctatactcagtcaaatagcgcatgtgatataatattaaaggattctagtacagctacgtgtgtataaggctgaaaagatacagtcccttatccatcaccttacggttacgtgacacatggctgacataaacaccgtatattatgaaacggctactatgcactacttacactatgtactactcaatatagactgaccaaacccaacccatgagacctgccctaaaccgccacaacctactaagagacaggcagcatatgacctaataaattgatcgggaccagatatacttacaaactctggcagagcaaaccactggctgctaaactgacagattgaacgtaacctataatagaagctccaaccttcacatacctgctgagaaatacgtcaggctagaccttctaat

SEQ ID NO: 13774 - DNA, 528 bp, Emericella nidulans
acggaccgtccgacgttggaggctcggttctgatgccaactgtcgcaggaggggtctgttccggtgcggggagtcttctggggtacacgcggccctggtgtgccactgtctgcaggcacaccgaggggagaatggcctatggtagatacgtgagtatagacggacaattgtaggcctttcaacgagcctgtggtgactggttatggtgaagcatacgcactgatcgccctggtattggctaattgagcgctagagccgctctgcatagatctaccatgatggcgctggcgtgcctgcagggcatggagtggctactctactggctaacagcggctgacgactggagctaagcgaggctgcgtctaagggctgtgcccgaacttgacaatcagaaatagatggatcactatgattcgatgaggacaacgcacaacacctgtaccagagtcgacaaccgctctcctaacggttgccgccagggcatcgtcgacaaccgggttacgagaggcaccagtgaggctatcggac

SEQ ID NO: 13775 - DNA, 1015 bp, Emericella nidulans
agggaaccgactcttaatactcacgcttatgcgcacagcctacttatcgtgcttgcgaccaacgcatttgttggttttttagaaacaaatgtgtgaccaaatacaagatcataggcgaaagaagagtgaaaatgaaagttagaagcacagatagggtatccgacgccagtgtcctcatattaaccagcccaatatccatttatcccgctcgtaccaggctcaacctgaagcttttaccgcaattaatatataccagtaccattaatcaacaacagcatgcttttatagcaaagccaccccaatagacaaaaacggcaaaacaaatcagcatactgtctagtcctgccgaacctcaatctccgtatgggcatagatcttgccttcggggacaaagattctctcctcgctcgaccgatcgatcccgctaagattccctgtcccaataaccgtgtggtcgttggccctaccgcgcagactatgcatatgcacagactggttccgcgacggatcacggacctttgagaagccggagcctgcaccgtacgcgtaattgtaggccttgttggacgagtactcgccaatgaggcgggggaggaagcgcgaggcgatagctttgaaggagggaattgaggcggcgaggatgccaacgttgatctcgatggcggaccagtacatggcgccgctgatggcccaggttgcgtcatcagacgagagcatggtggggatgtaggtgatacggacgatggaggagacgcaggcactgtcggtatcacgttagcaagcgtcacctcgagcgtcgctgagaggagccatacaaaagtcccaaacagaggatgaaaacgagagcaatcttctgcttgcgtggcatctggagcttgaagatcacccgcactggcagcgtatacgtgagcagatcggtgaggatgttgagcgctgcgttggccaagtagaagacgttaatgttgacgcaggtacccttcaaggtggtatcccaggccttggagataggcctgca

SEQ ID NO: 13776 - DNA, 1132 bp, Emericella nidulans
cagcacgacaaaagccctggattggacagttactggggtaattcaagacccatattcctgcaatgttgcacatgcatcgtctgaactagcagcagatgctgtgacattgaaccacagtgtactgcatgcggactttgaacgtgtaataagcaggattgacgttcaagccccgggatttgtctccattatggctttcagcttccatcagcccagagtagcggtctgctgcaggataatatcgctctgtgtatgctttacgtagtcctcattcttgggttgaaacacagtatggatattgcggatcaatttgcaagcgccggatattatataggctgcatatggcgttgatcagctaagtcagtcggccgtttactttcccgacattgggaattcgttagctggaacttccaatacaaacatagttcgtccttgcccctcatctccgctccgacgagctctctgccttcgttattcgagctacgccagaatcaccgaaccactagccgtcctacagccagggcaggccagatgcgccagcagcactttgcttttatggtctcactgccatgggccttctattagcccaatactgactgacaagcgcgacatactgacgagtctatctaaagcaaagcggtgcctctgctgtctcggttaacctgagtcaaatctgcagacgcgacctggatataccttgtcaacctctggccaatggtcgatcgacattgaaaatccccttaaatacgctttacgtcttttagagggcctaattttctgctctatgaggcgggaatattatgatcccgagctagtactatataatgggtataaaggttactatttgtctcgaccgtgtaaatactcgtatacgactgtgcctagggcgggaattcgaggacaaaagtggggcaggttccgacagtctggatacggaccgcagctccgttaataatttgaccgtggagctgggccgcagtctttcaaatcggcaggcgcgattacgagcctgaaattcgaggtgactatgttatatgttaacaaggcctcaacttccaaagattgacgcgaaaagatgctcggatagtttctagtcagaatgagctgaccgaggtcagcatgatttaatgacgat

SEQ ID NO: 13777 - DNA, 318 bp, Emericella nidulans
ggaactccatgctcgaggggcggcattctcggattcagacttatcaggatactggtgtcgtataagatgctgatctggccacctccggcgtcaggcgtatgtcatccatcgccggagcctcatataccaatcttgcttaatgcgacctgagcacttcttgtcgagatgctgaggagagaggagatctggcaaattcccgcgactccgcagtcttcggtcactagctcaggtctctcgtacagaggttcctgccattcaagatgaggcgtctgcaggccaaagatatcgactggatccctcggcactccgcgtccgcag

SEQ ID NO: 13778 - DNA, 424 bp, Emericella nidulans
  unsure (1)..(424): unsure at all n locations
gcgactggtgttctgtaaacatagacccatacgctcggaggatcgtgtgctgccttgttttgacagaacgccggcctagatcntacttggcacagagcggagcagtctggaagaggaactatgtgcgcatggcaaacgagatccggaaactcctaggctagagtaattgcgtaccttcacaatccgaaaaggtaggctgttaataacacaacgacggttcggacccgaaatttgaactaggtctatctgcatcacgtgggtatccctgtgacatcacctatactatcggagcgttcagttgatgtcctccgactcacacacatcacgtgagtggcgagacgatgtaatcggaactgaaagacatgttcccaagtgtactcagtaagtacccgaccggctcttggtgctgcttagcgtaatgcac

SEQ ID NO: 13779 - DNA, 113 bp, Emericella nidulans
cggctgcgtaactaagaactggttcaacaggctcgagaccaatgctgtaggtgcactgtagtgagatctgcgagacatgatagtttcgagtaagcgataagccgaggtcagtc

SEQ ID NO: 13780 - DNA, 524 bp, Emericella nidulans
gcggatgatggccaaggaggtgagatttcaatgtagccctcacggccctcttctgcgtcaaggctggacctcgacctcgcgaggtgttgtgggcgaggagaaggagcgccaagcacctacacgggcttaggatgggtcgacgcaagaacttacacgaaacgtctgcgacgcaaactgaacgcgcatttagaacgttaaagattgaagggcaacaccgaacctactcaatagcgctagacccctacgagagtcatgatgacatgtccagagactcctagatgcggatgagcgcaccatcaatactagcgcacatgtgccgcgggaactattaataaggctccaagattgcaagaaacatcccactttatatattctgaccacgtttgtcacccacagaatgaatcaaaagagggcttgggggaaacacaagggaaactcccatgggaatacccagggccgacccttaaaaaaagggcggtgaacggtggtaaccctaacaacccaaagattacttaaaccgggaa

SEQ ID NO: 13781 - DNA, 242 bp, Emericella nidulans
ggatatgctttgggcacactacggcgatgtagaccgaaaccatagctgaggcgatgccatttctttaggcgcagcaatagacacagacacgacagactgagggaagagggagtaccagtatggcaggacagcaattagaaagactaaacaacgcacaggaatcaaggtgcaaaatgcagatacgaagatagcgtcagacgtggatcaacatggaatctcaaatagagatccaacaaaaaggt

SEQ ID NO: 13782 - DNA, 541 bp, Emericella nidulans
gatttaggtgacactatagattcctaggatcatcatgaagctttggatgatgtatttgagatgtggttggcctcacagctggacaaaacaaacccatcgctggggaaactgagtaaggccaagcggccccgcgccacaaattgaccctctagacgctcgatagtctcaattgcaccagcgcactatcaacaaagggttactttcctttaccccctaagcctcttgtattacataacacctaggccgcaggcccgcccaattttcctcaaatgctgggtccttaccctcccagtaccttccctctccaggctaagcaaccatcgaagaattgcctcccgcgggtaacacccccccccccgagtgggagtctactgacccttgccaaccccccccggttgggcgatctgaaccccaggcttttgaagttctttcacccccaaatgggcccccccccgaccaaaaacccccttttttggttgggcaccccccaagtggccctgtccccggacaatacccccaattttttctctaaataataacc

SEQ ID NO: 13783 - DNA, 1483 bp, Emericella nidulans
ctatatgaatgagaagaaaattttaaaaaaccctaaaaaatttaacaccagcctcaaaagagaggaaaagggaatttcagaaaatattaatttccacattgtttttggtgggcttaactatttggtaggaagttttccgccgtaagaaaaattttttaaagaaagggggccaaaaacgagaacaaattagggtgctttgtgggcacaatggttcattagcataaaggaaaaaagccccaattcaacaccggttcaaaggctgttgaactgaacaagagggggaaaaaataaaaaggaaagtccatgcatctccgtgattcgacccgggcttcacaatgcaacgaagaattctcctctagccaatgatgcttatttcataaaacaattaatttttgacaaaatgttccgaatattaacaagcctgaaattaagtcctattcaccacgtgctcgctccaccgccgcacttgggccgataagcaaaaaagatcgcaaaattgttggcctccgcctcagctccgcagtctacccaccacttcctcatccaaaacaccatgggtaaagccgacaggaagaagagcgcccgagcttccgcttcaccctatcaaaaaccatcaaagggcgacggccgtagcgcagcagcaaaagccggctccgcgatcttcaaattcaacaccgatctcggtcagcacatcctgaaaaatggagcgattgccgacaatatcgtcgacaaggccaatgttcagccaagccagacggtccttgaagttggtcctggtcctggtatcttgacgactcgcatcttggagaaggcgaagaaagtcgtcgcggtcgagttcgatccgcgcatggctgcagaattaacgaaacgcgtgcaggcgacgccgatggagaagaagctgcagattgtcctgggtgactttataaagacggatttgtccaagttgccgccgttccaggtctgcattagtaacacgccttatcaggtacgtcctactatttaccctcctgtatcgcgccagagcagggctaacagattcggaccgacagatctcttcccccctcatcttcaaactcctctctatgccaaacccaccgaaaatgtgcgtgctcatggttcaacgcgaatttgccctgcgcctgctcgcccgccctggcgacgccctttactcccggctctcggtcaatgtgcaattcttctcaaaggtgtcgcacatcatgaaagtcggccggaacaacttccgccctccgccgcaagtcgagtccagcgtcgttcgtatcgagccgaaacttggaaagccagagatcagctgggacgaatgggacgggatgctgcggatctgctttgtgcgcaagaacaagacgcttcgcgctgggtttatggcgaccaaaatccgccagatgattgagcgcaattggatcacttgggcggctatcatcctgagaaggtctcgcagggggatgttgattcctttcagggaaga

SEQ ID NO: 13784 - DNA, 590 bp, Emericella nidulans
  unsure (1)..(590): unsure at all n locations
taaacgattgacgggcggagagctgccggcccctcattgaggggcgcactgagtcaacttgatgtgctcagcatggtgccaaccggtcacagtcatgctttatgttcggcacggtccatatccgcggacagatttttggccgccgcatacgacaaggacgcagacgtgcgtaatctgaaggcacacaggtcgtgacccgatacaggcctaatggcgccggttatactgccacagacagactcttgtgcacgcgcgcaatcgggagtgaaaactcgaaagttgggaggatgagaccagtctacgtagtntacgctcaccgtgcgcattgagtgcacctactgtagcgagctgatacgagaaatgccgttcagatcacacatgctgacgtatccgaactgccgatgcatttatcgtttgaaacaaggacctctgtgaccttcattgcttgagatgaatacaccgagtgctaggaccgttcactaactgctgcatatacgcgagtactgtgcgaaatctaactgatgtgcgcataaccataagcgagctcgtacgtggctggcacatatccgctagtgcatggctacatgatc

SEQ ID NO: 13785 - DNA, 1961 bp, Emericella nidulans
  unsure (1)..(1961): unsure at all n locations
atcaaagccggacccataaccactctccgaaagttcaagtttcacgcaaaggcacctttatagctctcaacaaactccttccaagttgtcagcttgaagccagcatcagtcaagagatccaagctatcctttaagctctgcccaaggtagtaccccggctcttcgatgaacaggtggttctccagcatctccagaccgacgtaacccggcatgaaagacttgtaggtctcgtggtcgatctgaatgaacctagtcttgtggcctgtcacttcctcgaattctttgaggatgcgggtaggcgtatagtagtctgttgctgcgaggattcgggagccctgtgttttggatgggctcttgagggcagtagccacgtatttacctgatcaaccacattaatctttatagcttcattacaagtgaactgatagggaaacaactcaccaagatctgcctcaatatcaacaagcgggaactgcgacccctcattcacagggtaagcaagggtataaacgccgtcctcgcccttcctcaacattcccaagaaaacataattcgacataaaataccctgggagcacaaaggtggctgggatcccaaggtcgcgaatatactgctcaacctgggccttgtggtcgaaatggggcacgttcttgagccgtccgcttgttgatccggagacgttgagtaacgacgagaaaatcaggtgctgcacacccgctcgcttcgcggcgtcggctacattcttgccctgagtgagttctaggtcggaattctcagtgaacgtgggcgttgtcacgaggaagacggagtgtgagccgctgagggcttgctctagagagggaatggaagtcatatcggcctggagagtaggtaagcgatgtaggacataacaatgtgggttgcggggtaaccacatacgctaacgatttcaacgcctttgtctgccagagctttggcgtctggcttggagacatctcgcgttattccacggatcttgaactccttggataggacagggtctgcaaggatggtgtttgatgaccgagcggccctgattgcccgtggcaccaaagacggtgagaagcttagccattgtgaaaaggtcgtcaatattgtgaagctttggacttgttgattagagttcaagcagattgattgtgtttgttgttgaaggactctttctcggtacaccagcacccttatatacctttagcactcacatacttctgaaggattgaatcctgacgcataacggagagccacccgtcaacaaacccgaagtggccaatcatggatccttcagcgaggaatgtgcaccttccagaaggctttggtagatgaactgacaaatgatgacgggtgagcgcaccccgttgctgaataagtacgggcggggggatcggtctcgctcgcgccgatttggccccgaggccttacagggcttactataacaccatagtggggacccctcaaaaccgtcttaggttctttcattgacggttatagaggaaacgcacccataccgcattcataccttactaagtgttcctgagacttcttgaatgatccacaaagtcaggcttggaggtccagatctactccagacgtgcgcaattccgncacacttttacagcttnttgcatattcgccacttttcattacaggtagagtaatttgaagtcgacttgataaatataacgggcgccgccatctttgggcccgcttacgtatctactgcactaaaccgccctgcacggttcatattgtgtcatgtccgccttagacaaatttttgaccaataggtgatgctcagtcctcaatttaacccgacatatttccaaaaagtgttttttggcgcccctttatattgccctacatttttttattaaactcctctcacgcggttgttttttccaaattaaatttttttgccggagagatctcttctttatttttttatc

SEQ ID NO: 13786 - DNA, 577 bp, Emericella nidulans
tgtttatgatcgaggtctccctccgatcttcaacctatgctgctgcagtcctcgtggccgctctattatcgaatacgggagtcctaacgaagttgtatggagacctgatcctctttattgttggagctggttattctcttttactgtaagtcaatcatcttgcacaagggcaaacactgatcgaagatccgtaggctatattgcgagaggcagcacgtcatagtctactactacaagttttctttatggctgagatccagaaaaatgcgatctaatgtacagcaggtcaaggcggattagagctagtcatcaaatacaatcttggtagccgccttttccggcttaacattctttgaaaaaggcgcctatgcgtaatgctggttctttttgaccgtggagccgaacttgaatagagcttcgggcacctcttgattagccgctttcagaacattgatcaatctgtttgttgttgattagtagattttcaaaagactccaatagaaatatgggtaaaatcactacttacgcgccagactgggccttatcagtttccgtaaacaggttatagcatgcccat

SEQ ID NO: 13787 - DNA, 577 bp, Emericella nidulans
gttacgggctcaatgtccgtctcggggcgacggtcccatctgcactgggagggggactctgccaccaattttggatcgaatcacccggagaatatgcatgagaccgccgactgaccttcttgagtatcaggtgtgccaggagtgggcttctcatactagagctgtgagtcaatccccacgaccctggggtcctttggacagacaaggctacgtgggcgcacattcgggtcgcccgtgaccgtgtggtcatgaaacctccagtagaggttggcttgccaaccgcgtccgatgcttactgtcttccttgctgacttggtatctgatgctcacctgcttgcctggtgtgagaccatcctgtactcatcgggagcggaaaagagggagaccaacccgggcccagttgcccagcgcgtgcgcagtggccgagcagcatagcctgtctgaccacttgcgctcaaaccgtccaggggtaccggacttggatgctactgctatcgtttgccctcgctatgcttgaattgtgcatcatcttcgcatccgggaccccgctcactagcatagcttggtcatgtcagct

SEQ ID NO: 13788 - DNA, 1014 bp, Emericella nidulans
aagactcaggtcgacctcgacaccttcgatataacaggtatgatgggagactatcctgagccttccaagtgaagccagtaggctgatccacaaccccaaaccaaaagccgtcggacagttcggccaatgtgtagattgcacttccaaccaggtatttcgttcccccgactactagagcataccttaaaccttgaaacagtacgagtactataccgagctggcgaaacctagcaggaaagacatactacaaaggacaattgaggttgccgcgggcctccatgatcagttcccggaggttacctttgatgaactaggcgtggaagtcggggtaagttctcttacaattacctttttcctatccatgagattaatgatgcggtgtcacgaccaggcggtccttcttgcaggagaaatggtcccagctttcaccggtaatctccatctcatggtcaatccaagctacgcttactccagggagaaggttatcgaggccgcaaagagcacgccctcccccatctcgctatacccagttcgtatctatctaacagagtctaaacaggattctatcgtctcttcgccctcatcaacccttccttccccagctcccgtctcgtgatcaaagtccctgcgacgtgggaaggactccaggcatgccgtgacctgcaagctttcaagatcaaaacgctgggaactacgctcttctccatggagcaggccatactagctggagaggcaggctgcgtatctatttcaccatttgtgcacagtctcaggatactggttgatcccgagtaagcagccaccaatgcaagcaattgcatttatatcgttgtgagtactgtactcacaacatataacagatacaaagaccctcatcctgtgtacaacctgacggcccaagcgcagcgctggtataggcggcagtcgctgccgacaaaggtcaaatcatgctccacagtgggtgtggatgaacttctggaacttgcggggatcgatgcgctcaccatcatccct

SEQ ID NO: 13789 - DNA, 541 bp, Emericella nidulans
cttcgcaaatagaaccggacatttcttagggctttttgcaggcctaagggtgcgggattagacgtcgcgaggctcgtcgtggacgaagaggccaacgctactttggtacgtgccccgactgtggttggtagctaagctaccagcgacggtgggcccagatacctggaacaagtggaactttggagctgacatgttcgccatcttttagccgaactttattgagaacacaaaagaccccattatcatcaagcgtgcggttatcacaatcgcccggagccctgaggaagtatgtaccccactgtctccccgaagcttctttcttgtatagtcgaatatattttgacatgtattttaacccagtgggtggcaatattgcaactggttggagaatatacaatgaacagcgttgtcgcggtgcgatcggcttgggctaatgtaacattgatttagatatgctgcacgctttgtgatgcgctgcagggagagacagcgttaacagcaaaattgatcggtggattattgtcgtctggaaggtttactg

SEQ ID NO: 13790 - DNA, 684 bp, Emericella nidulans
  unsure (1)..(684): unsure at all n locations
ccattatgattcgtatatttgcagctttttttgtggtcgcttatgaataggagatatgacggggcatattccaaacttcataggggcattacccccccactcttttttaatttctccattctcccattctccctcaccttcttacatcttccctccttatcatcttttcactctcactcttcttgtcctctcttacttttttttcttcatttctccttaccctttcactcaccatctcttcccacttttctactttctatttaccttatcatctcaccttttcttattactatctctcatcttcccctacaacatcaacccattctacctccccctcttattcttatattcacctctctccctttctatcacctaccccaccttcccccttatcttttattcacctttaannnnccctttcccctcctcctttccctctacctctctcatctcctccaacctccttacctttacttcaccctaacttcctctcccttctttctctacccatctccccctaccctctttcttaccatatttatcctattttcatacctcctctcatcctccccatcaatcctactctccaccgtcctcctcttcaacccccattttacaccatattctactccctcaccactcaaatttacatctctctctctctcattctacccctccctcccc

SEQ ID NO: 13791 - DNA, 413 bp, Emericella nidulans
atgtgatgaattacagcattactattagtcatgatacacagaaacaagatatcaaccgtccaaaaaaggtgtgtgattttgttattaaactcttgagtgttctttttctaattaatacaaaggaagtaactaccttgagagccttttgccctatttgcttataacctagtaatgtacataagtggcaattctcaattaaccagaatgtgggcttacctaaaatgccaaattctttaattatttggaatagtgtctttggttggacacacacatacacacacacacacacacacacacacacacacccttacagaatagcccagtttctgagaggggtgatggagtcatctgcactgaaatagagaatccttctcttaaatgcccgggataaaaagcactctacaagaggatgt

SEQ ID NO: 13792 - DNA, 596 bp, Emericella nidulans
accccactcgcctcgccgtaagcctaaccctctcctcctcgtccatcagagagtccgggttataccggtcaacaagcatcgcatacatcctctgtgcgcgcgcatactgcgcaaactgttctgcttgttgcaggcgccgcagcacagcctctccctccgatacgctttcgccggcgccattagaaggtcgcaaagtgggttttctgtatgcctcacggattcggttgagttgtggtattttcttcttctccattatcatactactcttatctttcttttattttctttctactctctcttgtctttctttatctatttctcatcttttctccttatatattctcttctttttctctttctttttatattttcttttctctctatttcttctattctttatgatctatctttccactttacctttttatacctccttccataatactcacttgttttttactctttttctttatatcttccaccttatataatactccctctcctctacctctataatcttcttttctcctttcaatattcttccactttcatcctttctttttcttatctacttctcttcctttcatatattcttt

SEQ ID NO: 13793 - DNA, 704 bp, Emericella nidulans
  unsure (1)..(704): unsure at all n locations
ggtctctgggnccggacattcnnncggttttcgtaggatgnnctgatggaannnacgaaaggggcgtacgcggggtcctttgtgtctctnnncagcacatcgcacnncgggccgnnngcattcngcncngtggtnncgcagtaccttcttttatnggcatcnngtacctntcaatggangnnaaacnntccctnnngtcacantanannaagtngnnagagtacccggttgacctggacntcngnnttgtgtcaccaaattctgggcnngacacngaannngaagtcannctttgaccttccagaacgctatnnngttgtggcccccggcactgatgaaacggaattggcnntcgaaccccaactgggggaaaggcnnctcaggannttctaacangnnttcagcngagggtcgtctgcgtcnnaaaacaannagttgcnnctttgtnncttcaccggcccagggganngcccagctgacccggcatggggcannaagagcttcttntgccacttccgcantttagaagcacagcctgtggatggagccaaaagggtcttggatatgttgtggagttgattgggacgatcataaatatgctactaagggcagacgcagagacactggcacgcccagagcacgcgcagccagtctgcactgccctccagattgcccttgttgacctggtgtcagactggggaatc

SEQ ID NO: 13794 - DNA, 1108 bp, Emericella nidulans
  unsure (1)..(1108): unsure at all n locations
tggtaccggggatctctagctttagacgcggtgaccgccaatggggtggcatattgttgcgtcgacgcgggctggttcaattggccgtggctgacgctgagggcgtcctcgtagatggagatttaagcgacatcgctcgatgcataggtccgccggatggacgaggtgacgaggtgaggtgcgttggagttgctcctggattcggtttggaagacggcgtcgccattgcgctgttatatgtggtgcctattggggagacttgagtaggaataatggtaggcgagtgccagtaaggcaggaaagaataaatgaattttcacaagagcttcacgatctgcaacaaagcgagttcatctcaggtaccgcggagaggggctcgagacaaacaccacctagctcccggttagatgccaaacgccgtccaagcacgctgaatgcggaatcaaaacagaaatggtctaaacaacatggctcctgttcgcctggagagaacacctcgctcgtctcatgcaatgggcggatgaattcaatctcaagtcaaaggctgagaagcaaagctagagtcacatgagcataagtttgtcctgtttgattctacgtcatcaaaaatagttgagcttcgagacacactctacaactcaatcactgaattaacttacccttctcgttttgattataggatgtggtcgtttagaaatatctaccgtcagattcccagacggactcaatttcgatctgtgtcgacgttagagggtcaccctcatatcgtaagtactagcttcgagccatgcgcgctttcactaatacactgctagtatgtattcccaagcaatggaacacatgtcctatctctcctgcccactgaaccgccaagcgccgatctagccacttggtgtcacttcgaagcttcctcccaccacagactccttccgcgagaaccccaagtttctagaaactctcaagaaagtcgtcgctcaacatggcacgaaagatccggacgcgatttcacaaggccagggatggtatccacgtctggcgctaatatcgcttcggtcggcgttcttatgnctgggtcgcaaactcacgacccgggtgggttgctgacatg

SEQ ID NO: 13795 - DNA, 152 bp, Emericella nidulans
gtcgtaaatcatcattatctatgatacgctcgtctaccctaaacggtctgcagtgtcttcggcggtgaagcgagagcttgctctacacgatggcacaccgtcgtctttggacttgcgacgaggggactccggctcagacggctctttccgtg

SEQ ID NO: 13796 - DNA, 1827 bp, Emericella nidulans
aacgtgcggattatgatctccgtcttggacggtcctcgcacggggtggaagtggatgcgcgtgctgtacttattatcgtacgcggtctcgttgtcgtggaggagcttgttcagcctcttctcgaggacagggaacgaggcgaggtggatgtctatcccgccacgtacgaggagctcgtggataattgcaagaacgatgttggtctggccatgctcgctattcgcgaggaagagcacgctagttttggtcttattttttgccattgcaagaataattgtatggcctgttggttgcgggacccagcacagtatggggacgcgccgacatgatatagagacccaggtctctccccaggggttacagtttgcaactgccaagacgaacttgtgacgcgaccgatttttgaatgtatcgtgagactgtcagggggatcgtctggcctatctcgctctggtggctgaatccggtgttcagaaacctaggtccggtccccttgcggtacgtgcaacattcgcatctgcacgaaggatgagccaaccctacgtatcagatcaatctatcagccccaggagaatagagtccagcccccacagtgctgtgacgagcgggcgtttcatggctggttcgctgatccacatcctcggctttgcccattttctccgtgaaaacgggtccgatcgcgagggccaattttttcgagcgcgccctgcagatcattaaccggcatttgaacatttgaagcatctgttctgaatctgggcaaaagctcggggatggttcctgaaacagtcgacatcggcatgttgtctatctgcctctgcctctgcctcatgtccggtctccattgccggcactggtcgttgattgtcactgtcacaagtgccatgtcccattcaggccgatctactgtggccctgaaagtagggccgaaacgaaatggctgaagtgacgcgactgagttgtctggcaccagggcaggatccgtgatcgtatataatcaacagacaaagcttgctttcacaacactcttgatcttttctgcaagtacactcgtttctcctagacaagatgtcgctcgttatggccgtgccacatgccttttctgttagtgattttggagatattcccactgtccttgtctcagcattgagctttatcctcgtaggttgatcccctctctgcattggacggtgctgagtgttcagatccctggagccctgctcttctgtctgcagctgttgcagcctggacctgtcattaagggggttaaaggccctctaattgacaggtatctgtttggagtacgtatactcttgcttctgctattgtcttctgctatagtcaagacatcgattgacatatcccagctcgagacaaaacttggctttctctctggacgcagcgcctacaagttcaactccctgcacaagaaatatggtacgaattctcaatcattctcctctcacctatctttgcatccctcttcgtcactcccctgctctctgccgctgactcaaagaatgtaggcaagatcgtccgcttcgccccgaaccaactctccttcaacacgattaagggtatgcgcaatatctacggcgcagggcttgggaagagtaacaccttcctgaaaacaggcttctacaaagccatctcccgccgaaacattttcacagccaccgacccgtactaccatgccaccgtccgcaagctcttcagtccatcgttgagtccggggtgcatggctgcgcacgaacccgtgatcaaggggtgcattgcgcggttccatgccctggtcaagcagaggatgcagagtcaaaaagcgatcag

SEQ ID NO: 13797 - DNA, 135 bp, Emericella nidulans
tggtacggtggtgataggtccgtgagttcaagatggacaagagtcagttaaattttgagcatggtatgatgtactctttgggtcactgctaagagtgtttgcagaactgagagccatctcgggggtagcgggatt

SEQ ID NO: 13798 - DNA, 864 bp, Emericella nidulans
atggagatgacgattcccaacatcaaggtagcataatgagccggggtagacgtactgagggaaacaacttgttcggagggcggcagaaggtatataagattccgtcttcagggtctggccgctctgggcgagcactttatgaacatgatgtcaacaattcgctttttcgacggaaacccagtgtaaagaagggcaatgaagaggaacacgcgccaaactctccacaagaatctgaagatgcattgtccagagtgtcttctgttaaccgcaccaccttctcttcgacaacttcagggccgatgagcaatacccgcatatcaactgctgcgacttctgtggacgagcatccattgtctacgtcacctgcccagacacataacagtagttcggagtccatccaaccaaaaccaactggccctggcatggctactgagagagcgtccgttaggacgcggcgtttgtatggccaggccttggagcaatcggctcacactcagcaggcatcggcccttcatcgactggagagtctgagccgccagcgcgcaggcactccggagattccttctctcaacagaaactattcccgaagtgctgtaaacctgcgtaacggactgctgaaactgaccactgcgagtcgtcgccgctgcatcccgcccacgagtcctcatatctgctacctaccttcaggccacaaatgagttgactaaaacctccgacagctcgttggtccccagtaggaacgagaggcacttagtcgttgcaccgagacgggaagcacagctgcctgtcatagccggctgctatagatgaatttccacgcactcacgtcagtgaaaacgcttcacacatttaggcagacttaga

SEQ ID NO: 13799 - DNA, 419 bp, Emericella nidulans
gcgcaacgcaactacctcaccacgtacgtcaattactgttggagtccgggacaacctataggcgacagcgtgatccggtcgatgatcggccgctacgatgaatgggcttatcgcataccgtacggatgacaatggacgtgcccgaggcacgtggcagcgagatctggttgccgccccagtcacactggtcgctagtcccgaggagcccagacacaggacgctaggaagtcacggcagcggttcacgagtccataccgagataccgacttctgtgcgaacgaaagcatcaccatgatggtccacaccacagcgctggaacagccattaacatcggatcgctagcatgatagactgcttcgaaggacttgatctgcggcgcacagacatcgtctgcatgctataggctatccaaaacctca

SEQ ID NO: 13800 - DNA, 1356 bp, Emericella nidulans
caaccgtctactcaaatacctctcaaccaacggcggcattatcgtgcaccacgtcgacactaccaaccccgacaaagtgaaggaagtcttgaccgacaagacagccatggtgtcctgaaaccccgaccaacccgcttatcaagattgtcgatatccctacgattgccgcggcgtcgcacgaagcgaaccctaactgtctagtcatcgtggacaacaccatgatgtctccgctcttgctcagcccgctcgaactcggcgcggacgttgtctacgagagcggcacgaaatacctgtccggccaccacgatgtcatggccggagttattgcagtcaacgacccggccctcggcgagaggctctactttccgatcaacgcgtccgggtgcggactgtcgcccttcgactcttggctgctcatgcgcggagtcaaaactctcaaggtccgcatggatcagcagcaggccaacgcacagcggatcgcagaattcctggagtcgcacggtttcaaggttcggtatccaggtctgcgctcgcacccccagtacgacctgcaccactccatggcccgaggagcaggcgccgtgctttcatttgagacaggcgatgtctctgtcagtgagcgcattgtcgcgaacgcgaagctgtgggctatcagcgttagctttggctgtgtcaacagcttgatcagtcttccctgccggatgagccatgccagtatcgatgcaaagacgcgaaaggagcgtgccatgccggaggatctgattagattgtgtgtgggcattgaagacgtagacgaccttattgatgacttgaggcgagcagtaagtgtttctacgcgtaatcgtgttttctgggttatgctaatattctctagctggtacaagctggcgctgtcaacgtcactctggacggcattgaagcgaacacgccgcagtctgcgtagtcaagtaatgaaggaatatggttatggatgactcatagtctggcgttcggcgtttgtgtataaaatctctgcctttggagtatctttcggtagttaaattgagtgatcgggatataagccggcatcggagggcaccgacccccggtccaatcccgtccgcatctcatcccccgggagtcatcactttcgactaattaaatcgacgacaaataatgcctcatcgatcacatctttttgtctaatttattgtcgtatcattcgttatcatgatatagggcagtacttcagcgaattgacctgtttcttctgcgtatttgcatttctcttagacgctctttcagctacattccgcgactgcgtaccgcgtcagacgttcaagaagctgaacatgccccaagccctccaagatgcag

SEQ ID NO: 13801 - DNA, 610 bp, Emericella nidulans
  unsure (1)..(610): unsure at all n locations
ttttccatctctctcctacagacatatacgaccatatatgtgtttattgatcagtgggactatagtgctatacatctttctgcagtgcgcgatagttgcccttagccctcggcaaagctcaacgtgtgtgctgtcacctgagacctgaaaagaatggcatgattttctgtgaccaccataactcaaaaagctgtgtncaaattaggcaacgggatagatggagtttgtaggtattcatgaatggtccgtatccatctagctcttaattgtcttacaccttattcatttttctttttatcttatattacttatttctttattatttctctattctcctattcattcttattctaccacttccttttttatctctttttttttatcttttcttcatattaccttattctattttctattatttttcttttcatttctctattttacacttttcattacttcttaactttatctcttatttattatcataatcattattttcacactactatataacattctaacattctactcttcctttttacctcatattatactacataactaatttccgttatcctatctttacttatctcattcttccataattcat

SEQ ID NO: 13802 - DNA, 573 bp, Emericella nidulans
cggatcgggattactttcgtgacgccggccgcgcctcttgtgtctcagactgcctgtcgatactcagctgtggcctaatgttggggccaacaccgattgtgctccctgatacaaggagtctgctgaggatagcacgcttattgcctaatgcatccctgaaaatgttacttcatccgtcaccgttcgtgtcggaatccctgacgaattaccagtccggttttggtagcttaggctgtttttcggttgtattgacgcttacttttacgtccccttagatatcctttgtgttatctaactctccttcttctctatttttcttttcctccttatctctttttttctttttcatctttctctttcccttcttcttcttttctctttttttttcttcttcctatttttccttctttctttttttacatcctttatcttcctttcttttttacttcttccttcttctcttcatctccttctctattttctctttcatctttctttttctttcttcatttttcttttctctccctttatcctctctatcttttcttttatcgtcgtttttacttcttcttt

SEQ ID NO: 13803 - DNA, 454 bp, Emericella nidulans
cctgctaaaacgcctaccaattgtgaatgagactgctaccgattctatggagccttagttgtaggtcgtggaccctgctctgcatgatggcgcgagtgtgtctagtgaaggcccccggatccttggtgcgcccagcttcgtatatgacacgctccagccatcagagattatacacaggtccgacgcttactaaacatgccttagaccgcgaatctctctactactggaatgcatactcctaatgccgcatactgtgccacaccttgctgtaccctgtgtactgagacccaagctcaactctgacaacacgctactaggactcatcgcagactatcattgcacactgcatcttaaaaacaaccctctgcagcaatcacgactcgaataggacactcagatgtgcgcctggttattatgctgacgagggggcaagaatcctgcataggctgttcaa

SEQ ID NO: 13804 - DNA, 104 bp, Emericella nidulans
gaagtggagccagaagatttctttggcacaatttaggggcagcattagtagtagaatacagccaatgtgtacgtaattagaatgatacgatcagagaccatatg

SEQ ID NO: 13805 - DNA, 573 bp, Emericella nidulans
actgcttgcggcaatggccagactatatgtcttcagagacgggacacctttatggagaccatctactgaacatcacaaaaggtacttcgtaaacctaaatcctttaaatcatctaccatcctatacatttacacaatctataacataactacctacacaccctaattacctcaatcccctcctccaattccccctcaatatcacttcacataatatatctctctaaaacaaacatatattttacttcacatcaccatccctcttaatcctactcacacaaacacttcatacatccatccttaacacctccaccaccctccaattataccctactaatacctacatcaccccatacaaacactcttctactcctccataatctacatcatcatcaatccatcaaacctctatccacacctcccataacaaatactactcttcaccatcattacttacccactcaaaaccctctcaacaccctatctcaccacatccactcaacaaccattctatctaaccatcacaacatacatctctatctcccaattctcaccacttacctacccacactcc

SEQ ID NO: 13806 - DNA, 473 bp, Emericella nidulans
tacctcatacacttacacctatccacgggtttggttcggtgatcgaggatctgtcgttgcaaaactgcatttctgcactcccctactcataggcgcccccggggcggcattgacagtcgctgggctgacacgcccatgcggggggggaccttccttccattgctgagtcccaaaagtgccgcgcatgcatttgtatcccgtgcccctaccccaccgttgtgacattactggcttaatgtggccttctttatatttggccgctcctcatgataagtctggcgttaatcactatatgacttgagggccttgctgcatccgcatgcgccattttcaggcgatatagcaccagtgatactgacacacactgaaggtgcacccacaacgatccctgtgattgtgcagatattgctagttcgctagagagacggcgacctataagaataggtgacaaagcttgcgacagacatggtgcg

SEQ ID NO: 13807 - DNA, 128 bp, Emericella nidulans
caaccccctccactaccgtccagccttccgcgaaggactcctcacgccacctgaatacccggcctcttgaggcataagcgcccctgtcgaccgtgagctgccaggcggtgctaaggtcgatggaacag

SEQ ID NO: 13808 - DNA, 1688 bp, Emericella nidulans
cgtgtataatgggatgtggtgcaaagcggaaagagagggctgagggtaaggaggagacctcataagatgataggtaacgcgattggacagctctgaaatgaaaggtgattgcattgggtctagtagctggctactgaacctctaatgcacgctatcacttctccatggtcgttctggccacctacgtaaatagttgattgccagctacatgactggatacactcgcctcgcgtctctgacagctcagagagcaaaataaaacgctatgacagccgacgggcgaatcaaataacaactctgagtgtggtatagaagtatgtttgctgagaagcgtagacattcagaactccaccacaaaggtacctaggtacataatcctcattaccaaaaccagtatgactccatcgtctatcatgatcaacattagaagcgttatcactcgcaaaggcttcaaatcagcaaatatatcgtaggcatataaaccagctggttcgcaaatgtgcataggtaagtcgagtgagcatctataaacaaaagcatgctaggaaacgccagttgacccagggcatcaaaagatggtgaccaagtaaaaacaatgaaagaagcattccagaattaaagcaatggtgctatgtcagagaacattaccgtatcatccatcgtagaaaaaggaggctctgcctctacctaagaatccgcataaatggatctactacccaaaatggttctttcaggtatattgtctgcaccagacaccgctctttctcgcgctcgcctcggaaattccagatcagactcgtctccaatgaaggtccaatcctcaatgtcggcaatgtcgtcgttcgcgttttgatcatccgatgtctttgttgagggcgttggcgaaaatggcgtgcttgaaatacttgagcgctgtcgggttagggttgtggcgtactcgaggtcacgatatatagcctgaatggcagtcgccacaccgtcctcctgctacagattagggcatgcctagcatatttatttatgaacttacacttcgtatccgctccccaagttgtttcgccctcacaatcatacgctcgtcatgagtagctgtccagagcgcgcgagagaacacgctgacatttagcttcttcatacatataccgacacccagatcttctacccggttgccgaagaagaattggtcaccaaagaagggcttaataatggtgggtacgccggcacgaaggcttgcgcctgtagttcccgcaccaccgtgatgagcagcggcgtcgatctgcgagaagagccagtcgtggggggcagattgaatctggtgaatttcaggtggcagcggaatttctaccttcgtgctagtcgggtccccgagacgggccgaccaccctttggaaaggatgcagcgcacatcggctttctgtactgactcgacaactgttcgtgttaaggccgacgggtcagaaacaacaatcgatccaaagccgatataaacaatcttcttcccgtcttgtcgagcgcactgaatgaactccgcgagcgctctcggaggcgtccagtcggaactttcactcagaaaccaatacccggttatacggacccaatccggaaaatccaacggtggaggcacgactgagggagagaaattgtagaggaatgggactttgttgggttgcattttgtcgaggttggtg

SEQ ID NO: 13809 - DNA, 432 bp, Emericella nidulans
acccattacagactcctcttggaatgatgctctcataccacataggctgccacacgcgaaatagaagtctttaaacaactttcagattttgcccccctccaccctcaaggtcaaggaggtgaaacccacccggcggtactgctacaaagacaaatcactgattaataataacacatacacccaagaagccatacaaggcataggagtgaaaccccgccgattcaacgtagcctacaccaatactaaaaagatttccaactggacatcactgactacccattagtacaatgacctcaaataagccctgcctgtaatcatcctcagagagtgcgctagctaaaacaacaccaataatcccaacttccgggcttgcatctatcataacccccagcgcttggatttctaaagaatcacactgaccctgccgtcaca

SEQ ID NO: 13810 - DNA, 1052 bp, Emericella nidulans
aatcgggccgcaattaaccctactaaagggatccccatgtacaataaacgtcggggggaacccttctcctttctgtactctaacaacaggatcaatgctcctgatatccccgcattctggggggaaaatcacccgcagcacattcccattcgcaatctgcgtcagcgcaaatgcatcacgcggccggctgaagtcaggcttgttgctcgcaccggattggccttcgagggaaattccgcttgtcgttgggatgggaaactcctcgtatacctttgccagaaattcaggctcgaatggagggagcatggacttgacgtgtgctaaaggctgagtccagctggggtgtgtgaagtgcacggcgccgtagaagttgaggatcgcgcgtggtggacggtgaaacgtcatagccctatccaccgttacggttaacatatacccagaagcctgccaaagggaaacccctggggaaaaggtaggcataccaagctaagcgccaggaaacctccgctgctcgtcccgaatgccatgactctatccttagcaactctgtacttccccttcccattgccatttccgtctctatcctgcttctccaagaatgcattcagcccatcttgatccgcatatatccacgcgaggaaatcgcgtatgtctgccatcggtccagagagcacatcaacgcccggacaaagccggtggttcgggacagctacgatccagttccgagctagacagtcggatatctgcgcgagggagaccatcctgctgtggccgagcatgaaggcgccaccgtgaatattgataactgtcccttccattagtatctggtatcgcgcctgggttagggtggaaatgagggaaaagacctacggacggggtagtggattggttcattgctggactgagagggttgagaaggcgggaggtagatgtctgctgttatcgtggacgagttgatttgcttataggaagttgttagtggcggtggtggtgatgggacggtgaggggggtcattttgctggtgatatggtatattgtattgacggtgata

SEQ ID NO: 13811 - DNA, 1493 bp, Emericella nidulans
cctacctatcagataaggaacgtgaagttgatagaggttgtcaaacggattgtttacagtggagaggaagcggcggccatggttcattgtttggttccgcagtcaactcgttttgcttttcttctccacaccattctctctcacttcttgcctccagtcctctcttttatcacttatttctgctttttttgaacattcacttctgctgcctaagccttcccctccgtccacttgacattatccaagtcagccttttaaaatgggctcccaacaccccttcgaacagtccctctggaccccccagtccggtccgttacggtctaatttacaagcagtttccttgccagtgctgatgagaaacagtcctatccacactccctaaccctcccgaagagaactccacctctccaatcccattctttcatctcctcgagcgattaaagacgactaaacgcgaggggtggcgccggttcaacattaacgacggcgagtccatctccgatcacatgtatcgcatgtcgatgatgaccatgctcgcccccccttctctcgccgctcgcctagaccttccccgctgtatgaagatggctcttgttcatgatatggccgagtcgctcgttggtgatatcactcctaatgacccgattaagaaagacgaaaaggcccgtcgggaagctgctgtcatggaatatatcgccaactctctgttgcgcaatgtgccgagtggagtctctgccggcgacgatatcttggctgttttcaacgaatacgaagcgaatgagacgctagaagcgcagttcgtgcatgacgttgataagatggagcttttgctgcagatgatcgaatatgagcggagttatgagattgacctgaatgagttcctgggtgttgcgaagcgaatccaacttcctgaaatcaaggaatgggctgcgacagtactcgaggagcgaaaggcgctatggaagtcacggcagcagcaggaatcaacatctgaagccacgacataaataggaaccttcaagagtaccaactggaccatgacccttgcatgattctcatacatgcatgagtgaaacggtgacggtgaaatgtctgacgatactgcatcttatttttctttttcaattcctttgttaggggcgttgtactgtcgacgttgaatagatacctaccagcacaattagatatggaacacagcaaaaggaaagctatatcctccacgcacctagaacagccaaaatctagaataacttccgcttctcgagcacgattgcagcgcacttcccttaacccaaaaagagcgattggttcgtaaagccataaattccgtcgccctagaagttaccactaatgaccatacatcaaatccactcaatcaagaggctccttctccatctctcgcgccaacatgatcgcttccgcctccatctcctctgggcccctcgcaaccctctcttcatcatcaacccgcaacctctccctatcatcccctt

SEQ ID NO: 13812 - DNA, 536 bp, Emericella nidulans
ggggcaaagaaatgcagacattgaccttcaaagcacaagtcgtacaatgaacatatggcatcgcatcggtgggcgcatcacagccagaagcgaggactattccgggaaatgcagcaggacatctaaaggcaggtgctcagagccactcatagtgagcacgcgctattcttcagacattgccaagaccagcccactgctaactgaccacaccatattcgaacagcggtcggatctatgatgattgacgaaagggcggatggtactgacgaccgatgccaccgcggcgccctagggctcgaccgccctgatgtttggacaggactcatccaaaacactcagcgtcaatcgttcgacgcatgtggttaacactcacagggctttgcatgatttccgggcgacaccaatcccaaaagtaggcgggcgaaccgcgtgcgatgactaggtgatgtatgctagtgcatgggaagattacagcactagcttccttgtgccggaaaaattgcgcgcctggtcagtccccaaatgatttaaaaggc

SEQ ID NO: 13813 - DNA, 1430 bp, Emericella nidulans
acgcggtatcggaggaggatgttgtctcgcaactggagacggtcaacaacccaggagttgttcgcctggatctcctcccgcgaggggaatctctgcgaccacttccagttctgccacaagtctggatcactgaactcgtacagcggaatctcggtgtcgacccggcaccctgggtaacgggtatagcaccaggtgccgccgacatcctcgcatgcatcgaccagtaggactttcaggccgcgacgtttgagcaggttcagcgtccagagaccagcccaactggctccaacgacaagggtctcagtttccatggtggtactagagcgcagcaaggaccacaaacatgcacacgcagacagacaatgcggtttattgagaagcccaaagacagggaacataagcaggcaaactagcaggacggtagcaaaccaggaacctccagcgggctcaggacaatttacaagtaaacccgccactcccccacccgactatatgctggtctcaccgaacactaccccgtattcttgctgagttcactggttgttctagcggtgcctaaaaacttccgtctaccagcttccctgcactctcacagcgctgccattggtccttctggcctgctttgtcggattcccggcctttctcgtgcacccatgatcttctgagtggcttcatgtttccgggatgccaatcgttgctgacttgggcgttctttaaacttcctttgtaaccttgagaacagatcgagctcatcgagctcatcgagatctggggttctcctaggtcctgattactcccatctcggcgcccccgattggaggttggaggagtctccaaaggctcgaaatagcctaaaaggacggacaggtagttgtagagctggtcctgcaggtatacagtagagatccctgctaatccatctgtgaaggtagtgacctgattcgtgtatcgagcctgatcgaagatgcaccgtgacctctaataaaagggtttagaaccatctcgagggtttgcacgcgcttgactcgaaggggcaaaggatgcccacttcaggctgcgcatgactggccatttgtccttggtcaacgtaaccaaccaatggccgactcctatttagcgctgcggtcgtgcgcagcgaactctgctttgatcccgggttccctgcggaccgcatgttgcatggtaccgggcagtaggcaatgtcttaaaatgttaaagcctcacggtgatatcggcttttccgtttcactattcctgcgcctgatatacagtcaaatatgattccttggccatagacaccgtgagaagtttgctgagaccatcagcaccctgctaagacttgactactagcggtatgagcgtcaataggtgaccaaccggtttcttttaggcctattgattttatccagagttcccttgtccttgccgag

SEQ ID NO: 13814 - DNA, 552 bp, Emericella nidulans
atcgttcgcagcccagttgaaaccgactagaataatagaagtgctgctagattcaccctggaaaacacttgacaggacatgaatgggtctcgcactctctgtgtgagaatcacactgtagtggattacacgcgtccagatatgctagccagtctaaccagtggtgtcgcgcgtcggtccagacgactgatcaaacagtgtcttggagcaacctaatcagactgtctgttagtgcacatggcatgtgcgacgatacgtacacaattccttggcggatcggcatctgatgcgcggtgttacactgacatagtgcagaaagcagccctcgtcccagcaactgtgtgtcatcaaacgataagtgtaggctcgtttctccctagagagagatggctaccatacctctactagccccacatctgtgaggcatggagcaatggtgcaccagatttggacctgttcacgagctcaacctgcataaccgccctgacctgtataccatgatctgagaaaacactgcacaggcactatcatcagcgtatgcctgatctaatca

SEQ ID NO: 13815 - DNA, 1075 bp, Emericella nidulans
cacgacccgagggtagaacatcaaagcagatcccagcattaggattcggcagcgaggtcggcttcggcgccgtccatgctaatccatccggcgatgttgaggagtagatgaaatctgcccatcggctgcgatagagggcgagatattccccggtcttcagacgctggatttccatatgcacgcaccccgtactctcggcgattggaatctcagaccaagtctggccctgatcatcagacgtgcggatggctgaaatgtcatcgttgccaatccactttgcacccagttcaacgcggcacttaaaggttgggatcacaaagatgccgttttttaggatgataacgggctgccggataaaggtgccaggctcgtcgaagataactgtagggtcactccaggcattcccgtcatcgaaggagatcgtacgcttgacgacggctgagtcttggttccctccttgctgagacgtatacaggagccagagctcaccagaagggtgctggaacatgacgggattttgctcacttcgtgtctcgtcgtgcgtcactttgatagcttcactccaagtgcggtttccaaatggtaaccgggaaaagtagatgctgatatcgggcttgccttccatgttccccccgaaccaggcgcacaaaaggtcgccatttggcagacagagcaggttcgacgcatggcattgcacggttgccggtcgtaagtatgcttcttgataggtgtatgggcggaatgtcgagcgcaagatcccgtcaaagagagtcttcatatcctcttggttgacttccatcagatatgtctatggccgggtggtgtattggcgtcagtgtcgaggttttcaggccacagctacccctcttaaggaacgctcgtatactgtctagctagaacgggcttccatccgatcttcggggcccggccgacacttcaagaagcttaaaagatacaccgggcgacagttcgatgccgcaattcaaatgatctaacggggggacgataaccccgcggggacgactggacgcggggatttttccatgggttaggaatggcttaggagccctaaaat

SEQ ID NO: 13816 - DNA, 460 bp, Emericella nidulans
ctatcaccaatagaatctgcaccacgccacgtatggcgcaacgtatccgtatggcttcgacaggtatgatatttagggcttccccaccaaccaaacaaccccccaaccttactacaaaaccccatccccaacacttccacacccacacccaccaacccccaaaatccacactcttcaacctccccccccccctctaccctacacccctataacaattacccccccacaccacacaaaccacccccaatccacccccctaactccctaccctaccacccaacaaaaccaaccacacccatatcaccccaaacataccccccccaaacataccccctcccaccccatcacatatcctacattcattaatttacccacccaccactaccactcttaaaacactatacccaaccttaaccaaacacaccattttcaccatctcctccaactcccatcactacac

SEQ ID NO: 13817 - DNA, 451 bp, Emericella nidulans
aggaagaatgtggagagaggacctcaagtttctccagcaagagagcaaaccggcccaacgggggaatttgttagaaaatgggggcccctacaacgcccaaagcaaagcagatcagaagagccataagaaaggaagaacagccgaacaaggaacacaaaccaacgagaaaggctgaacctacacgactgacttgaaagtcgcacagtagagaacacaatgagcacagcgagacatgccaaaatcagacacccgaacggaagccacagcaacataccccagacactacaaggaccgtacccacattcccaacaaaccgcataaaccaacaaaccgacagacccagcgccatgtcataaaatgctgaacgagcaaaagaacaacaggatctcccgacagctgagctcgatccgggcgcactcgtggccaaagccacaacctttgggcacgactc

SEQ ID NO: 13818 - DNA, 435 bp, Emericella nidulans
acccgccatacagaaaaccaaaccaggggggatttaaaaaccaatagccagtctaaccaaccaacccacacccagaaacacaaggccaaaccaagtaaatccactacagatagccacaaaaacgacactccaatagcaacacacccataccaaaacgaatatcatggagaagaaaaagcacacaaactacaaccccatatatagagacccaaccatccgcccgcactgaaggaacgagtgaccccatctctataaaagacaatgtaccgcaaaccccccaaaaaacaaaaacaactcccaaaccgataatctatgccacatcataagccggatcccaaaaccaaaagaaccaaaaccacaacccccaccaggacccatcgggattcacccaaaaccaagcatcaaccaccgtgccaaaaatcccccccccaaacc

SEQ ID NO: 13819 - DNA, 569 bp, Emericella nidulans
gttttgacctggggtggttagtcagacgtgatgccatcgatgaacgtttgggtgaatttgtgtttcataaaatgggcaaagacggcctgtgactgaatgactgcaggaaatgatagaagggtcaatatggggagacccaatgtccagctcaatggcattttgcttcaggttcgcttcagattggactgataatcatgtcggagaaacctagggataccaaacccatgggcagacaaaattctaacattgcagtgcgtctatggatatattaacatgttgacaggagccttttctgcgtatcatgttctactctatctcgcagagactattcactcggcgcacttggccggccattagagtatgcttgtgaacgccatgggagtgggaacggctgaaaccgcacttcagacaatgatacctaggtacattctgaggatctaattcgtgcaacgaggaatggccgtacgtaacggagggcatgtttagctagttgctgcatgtcaggaaactatctggtggatgtatcagatggaatgtgatataagatgtctatgtgataacagcttgta

SEQ ID NO: 13820 - DNA, 137 bp, Emericella nidulans
agtagtatatgggcaattcgtctctgaatgtcatgacgatccatcatgacttggcataataagtaaatagttacattaattattagaagttctcatagctgaagatttcagatgcatcctgtgtcatcgaccaccat

SEQ ID NO: 13821 - DNA, 1366 bp, Emericella nidulans
ccctccacagtgccaaccggtgcactctccttactaatcatccagtgttcttagtaacatatcacattgttagatatgacctgttatatataactgcactgccgcatctcttacctgataagacctcctttgaagtccttaagagtagtaagttgtgtataatacagatcatagttagcataaaagattttaatacttattgttcgtggcttaattcggtcacatgaccggatcgacactagtaccccctgaggttattgtacaattctccatcttgcggacttctctgcggtgcataatatcatctctgtatcagatagtgttcggccgtattacgggcccagtccaccgttttacaagggctgatccgttcagactctatcgccagtctaccagagatacataaactatgtttgaataccgccctactgcagacatcaaactccctgcttcagagtcgcagtttactcgattgccaacaaaaaaatatggcgacaatccgacgattgaagatacagaagaactgtcaatctgtatactcgagctcgtcgcccgcacccagaggctagcttgtgcctgcctctctctgatccagcacaagatggtctcggctcttgctcaaagtgagaatcctaagctctcgaccccggatcgaattcagaaaggtagtgagccgttttcatctaccgaagagtaccgcgtctactgctcgatctggcacctgcagcacttttctaccctgcgaaaagcagcaacagagcgttggaactgggatgaagcatcaatccagggtctggatgcatacaacacatggactgaaatagattggagaacgggaaacgaaagaatctggacgactgcagcccttctttcagacctaggtcttcctccaatctacagacaccatccctttcagcacttcagaaataactagcacaggatccagaaggtgaagagtcctcccgcgcagcctggacctatccccatggaacaccgctgcccctcttccattcattcgatacgccgcttgcgtaacatacccgcagcccgccgtgcctttgggctcccccgccccctcccagaaaaactaatgcaacggagacctggcagcttacgattgagcgtcgcagatctctgccactacaatgcatgctattctgtcaagcaggttcggctgtcagtcgagagcgcgagccatcatcgcctgccctggtcgactttcgaccatggcgacgacttggcatggcagtctgggatgcctggcgaatgcaattgttgggtttatttactatccctgaaacccgggtcgagttatacgacatctgatagtgacactctagatgtattgccagggtcctgaggaaga

SEQ ID NO: 13822 - DNA, 404 bp, Emericella nidulans
acacagcacacgccatgggcgggcatctgcactctaagggcatgcacacgcaccgggcagtagggcgccctacgagggaccaggacctgtacgtcatgcgaaggggctatgcatgtgcatactgagtgaccatcatctagagggaggtatagaccctgtgtaccacactagtactagtgcagcattatagccgtgaccgtggtaactagagaacacccacatagagggaacgagattcatacctatactagacgtgggccttgcccgtttacgtctggccagaactacatacagatgcacgcattagggtggcctgaccatccggttcctttttcagactaggcgaccagtgccgagactacgacattggtgacatgcttcgggagatcggcatggtcatctgg

SEQ ID NO: 13823 - DNA, 471 bp, Emericella nidulans
gcgggttcaggacatccagaggctggcggttgatggtcggttgttgacttccggtggagaattttctttcataacagcactacatctgatcgtcatggtaagacgagcttgatgtatgtcattgatataccactaatccaaataccttaagtcatagcattgttaccttacccctgtgatagcgatcacatataatttattcatgtctacggtattgttattatatatataatgctctttggaaaaccaagttacatatccattatcgatattagtcattttcaaaaccactcacatttaccccgttctttgaaatgtaaataataatatattttgtatcaatttgtcaatgtcaacttttattaacaaactttgtctaactctgtctatttacgaatttttttctattacaaaaatatcatattgacctttattattgtaaaattaattaacattaatttttatatatta

SEQ ID NO: 13824 - DNA, 463 bp, Emericella nidulans
ggccgtccagatgtgtgggaaagttcctacgatctctccttaccaacccaacacagcccggagggggggattttggagcccgatgcggctcgtcacaccatttcagagaggctcgatcaaagatagccattccctagctgaagtaacaaaactcgatgttcaaaaaccagtaggaggactgcggtagtgtatggacaactatactctgaaggcctacaccaagactgaccagtacccattgtcactgagaccctgaaacattggagacatcttagacaagccccatagcttactacgatggctatgactggtgccttacataaatatacgagggctatggccaaacatggaacactggctgctattggagacgcagagcttacagatgggtaggcactccccattgattagataatgcaccgagtaccttaccaaagctaacatatggacccggtggttatat

SEQ ID NO: 13825 - DNA, 750 bp, Emericella nidulans
  unsure (1)..(750): unsure at all n locations
ggacctagacacagggactaatcaccacaggcaaccatcccgtagcgcgagcaagaacactgcccggggggggttaaaaaaaaaaaaacgggaccgaaccacacccacaaaagacaccacaaaaaaccaccaacaaaaccacacaccaacaccaccacaccaacaaacaaaaccccaaacaccaccaacacaacacaacccccccaccacacaacaagcaaaccaaaacccaaaacacacacaacaccaccaaaaaacacgaccaccccccaccacaacaacacacccaccacaacacacaaaaaacaaccacacacccaacccaaaacaccaaacaaccaccactaccaaacaacaccacaccatacccaacaaaacacacacccacacaaacacaaaaccgaccaccaaacaccccagccaaccaacacaccccaacacacaccaccacaagcaccaacacacaccaccaaagcaacacccctcacaaaacccaccacaaaacaccaccaacaaaaaccaaccaccccatcaagccacccccaactaccctcacctctccccccctaccacccccccacnccttctccccccccaccccnaaatcatcccactacccaataccatcctcactcccccaccccccgccctactcacacacacaatactcaaccacacccaacacgacaagacaaccgaccagaccacccccaaacaacagcaagaacaacacaagacaccgcctctccc

SEQ ID NO: 13826 - DNA, 613 bp, Emericella nidulans
  unsure (1)..(613): unsure at all n locations
tcccagtgaaatattgcagtagagagttgagagcagtgttgggtaggaggtnccttacccttccatcncggcccggttttttcttccccnggggttttctcctcttttttcccccccttttccctttgtcctctgccttttcttttctttcccttttttgtttgccttttcttttgttggttctccttttttcccccttcttttttccgctcttttctccctcctccccccctgtttttcctttttccccctttcctgctcgtggttttttttttttcttttctgttctcctccctccctctgcttcccttgctttttctcttccgttttcctttttttttcccccccctctcttntttttttttttgtttgttcnnntttcctttcttcttttcttcctccttttgttttcccctcgtttttttcctctcttctgcttctctcttcccttntttttgttttgttcttcttttctttntttttcttcctcccttctgtttcctttccttcctctttttttgtttttcctctccccctcnttcttcctttgttctcctcctcctttttttttttttttccccttttctttctttcttcctcttctttttctcct

SEQ ID NO: 13827 - DNA, 1151 bp, Emericella nidulans
cctgtccccagaatgaatcaatggggtggggctcgaaaggatcggcctcattctggtatgcaccgccgttgggagtgagatcccgcagcggataaatgatatcatgtgtcgtctgccagagattctggactacgctgggctcggtagttgtgccgtcgaactgccgtgtgaagagaacatgccacaggccgttacgccaggccggcgataccgaggatgcccctgggccgccagccttgtcggcttccggcatcgtctgagagtagagatatggcgttgtcgcatatatcattagcgttgattgtgcgggcaatagttgccccttcgctgctgtgaaaatgtcgtgcaaagctgatgagagctgctgctggttgtcgccgacgaaatgctctctgggaatgagccgagtagccatggtccaggccgagctgggtagtatctgatcttccgtagcggcaatggtaccttgaaggatgtcatggtaatccgcagtcgcgatactcgcgttgcccactcttcctgcatcggtttctctgttggcaagatcgatcaaaggctgcaacgaggcctcggcatcggagaagttcagtaatgatgtgcctaaagatattgtcgatgttgcgcccacgggcatcacaacgtaccctccccagccttcggatgcccatttgtcggcgttttctactaaaatcgagataagctcagcaacgacatcgtcattatcaccggcaatggcaatccgtgcaaactgcatgtccttcctggggtgcacggagtaactgatttccgtcacgacaccgaaagtaccgcctccaccaccgcgtagggcgaagaaaatatcctggttctgacacctgttcgcagtgacgtactctccatttggaagaacggccttgatctgctgcacgttgtcgacgccgagtcccaattctggcgacaacatgctatgtcctcctccggctagccagccaccggccattccaacacccgcatatgtgccacccacgacccgatacccattggcatgcgcccaatcgtataccccgccgaactgctgaccggcaccgacggtgatcacatctccggctgcatcagagcattgatcaggaacgaatgctttgatgaggttgatagggggttgcatgttatgt

SEQ ID NO: 13828 - DNA, 439 bp, Emericella nidulans
tggtgtgcgctcaagcgctgggtcagtgctgggccaggggctttatgttcacttgcttgaccgtgccgatcgtgaggctacttgtggaccatgtctgcggcaccgggcatcaccggctcaaggcccatgtttcgcatcgtgagacgctgatggactactggttctggggccttgtcatcaacataatggcgggcgattccggatgggcagccatgtacaccacaagagcatgacgaaagcgtgtggcagaggctatggggtacagaccagatcattgcacctgaagatgctacacagagagcaagggaggcacatatctaggaaagtgggctataagccaccgggggagtcgatgcggctagacctatctgaccccagatgcgttgtatggacgctgcactctaaatctagcgcctttaggtatacattgcattgcgca

SEQ ID NO: 13829 - DNA, 528 bp, Emericella nidulans
gaaccatttttggacagatgccaaggggacgggcgagaccgacgtaatttccggctgggctggccccttttctagggcggcactcagattggcctcatctggggtccggtccctgcggccaaagaagcggaccactcactggccagccttgcgttaatcctgcacagcctgattgctatggattcgaccaccacctaacacatactagggcgccagacacataccgaaatgaagggccatgggaataatgtcccggtcaaagccgaccagcatcacattacaactaccctggtagacgctgcagggggtctggccgcgggcgccagcatgggtattaggcgcactgaccacacaggccggtgcgttcgagatgcccaggtacagcacctggccctggtcgaccatgatctggagactgtgcatacgttctgactagaggtggagtacgacctaccagaggacatagaggacatcaatccagacggtctggagatgctacacgagtgacgcacactatatggagagagc

SEQ ID NO: 13830 - DNA, 464 bp, Emericella nidulans
gctccgtcgagctctagtgagaacactatggccggcgctttctctagccacacctcggcccgcacggagggggggttttttgaactctacttggctcaacaccccgattggcgggggcgcgggtgaccattgccaacttcgtgcttaccaaccagcaccagagccgagccccgcagacgggactgagggtgcgatgctggagaatgcatcgcaggggccatagatagcttcagctcgcaggacgcaagcagtcaacgcattacttatcggaaatcgctcgcagtaactcagggcaaagactcagagtaagggtaggctcgtaggcagaccttgaaagggcgctggcataaacctggtcattctttggaccatcgtaccctaaaggattaggcacgactgaccattcatagtcatggaactcgttctgatcagagaatcatctcagatgagaattgcggaaatgt

SEQ ID NO: 13831 - DNA, 465 bp, Emericella nidulans
ggaggcgcttcagcggacaatgtctctggtatgccttttgtatttctcagatctacgggtgggcaacaggatgaggagcacgtgtttgggctgtaagactggtcgaaccttggtgtgacccgggcggatactcatgtgcagcgctgtagatgatcactcgaaacgactgcggacagtcgctggttcattgaagtagtgaaacacgcaactggcggagtgtatacagctcacaataccaacatgagcaaggatgtatgtggggtacagtgcatcagatgaatgagaagaaggggaaaattcatgaccacacatcgtgtgactgcctctgcataggtagagccagagccacctgagatatcagcttgttcggctcgaccaagatgacgattgatataaagttaagtcacaaggcgcatgcagtttgcggcacagacacgacgggtgcattacatagcagaaaagggt

SEQ ID NO: 13832 - DNA, 1565 bp, Emericella nidulans
attctgacagacaccttccacacgttgtcctttgattctgggtcgttgctgaagagcgtatcctgggaccgaaagacctaaaggccgctacaggctctacagaccctaagacccctattaactgctaatgattgatatagacccaagcactcctgggtacacagaaccgcagcagcctgacccgacaatcgtaagccataacttggaatgccagccccaaatgccaagagccgctctttgctctcgtttcagttctccctcagccctgaacatgcaagatgaaagaattctacatttaacggagccagggtagaaaataattccatgcctgctatgcggggtcccagtctagtgatatgaaactgcgcaaatgtgctcaaactgcttggcagctcctctcatcttcactccaccattccattggatctccactaccgccaatagaagtaataatcataccaaaaaataagataaaaaagaatacaatgcctagagctggattaaggggctggacgcctgacttattggaaaggccgtatataattctgtctcctccacaatttctaccatcgtcccaactccaccagaacaccaccaggacaggatgggggccgtcattgttcgagctgtgatctgcctcgtctgccttgcgtggcctggtgccactgctcaaggtgctccctctctctcgtatttgtcaaaagttactgacctggtactgaaccatgagccagaccctctcactctctctcccaccccctctcccagtctcactttcactctccctcccacgatagttcccaacccaccgacaaaatatggcgtcgttctctttcctgccttcgagatgcttgacgtcttcggcccccttgaagtactctcctgggctgcacggctgcacgaaaagctggatctctacctgctgcgcgagacactggaccccgtcaccacacagccgcagagcgctgcaatgaacacatttaattcgtcgttctttccgaccgttaacccaacacatacgttcgatgataaccctgagctggatgtgctcatcgtgcccggtgggctggggacgcgcaaccctaacatggaccggaccctgcagttcatcagctccacttatccaagagtgcagtatctgatcaccgtctgcacagggtcagcgctggtcgcccagacggggatcctagacgggcgccgcgcaacgacgaacaaagcatcctgggactctgtcatcgttaatgggccgaatactacctgggtcccggaggctagatgggtagttgacggcaatatctggacttcttccggcatctcggcggggatcgatgcgacattggcgtttgtggccgagttatatggaaaagagaacgcaacggtaatcagtgagtatatggagtacgaatggcatgaggacagcgactgggatccgtatgcggagatctggggagtcgtatagcgaatggtggaagggtgagtgatggtgctggtccgcctcggctaggcagtgggtctacccctttcgcatcaggaagacaccgctattgagctagtctctggagcta

SEQ ID NO: 13833 - DNA, 424 bp, Emericella nidulans
caggatgcatattactagactaatctggctgccgcactttgtttttttgattgttacatgcactctccgcagactttcgaggtgcggactaggcctctctcgttggcccagatagcggcgcgggtcagggcgaattcgttgctaccctctgacagatgagtgacgtccgctagtgtcaatacggatagccggggatcaactataggtatcccaattagatgctgaaagacataatgggactgggtaggatccccatgccacctgtgggtgcagggttaggcgagatagccggaggcgcttgggtgcctatgatgtgctactaggataggagtgctggactgaccgagtatgatctctgagagagagatcacagatattgttggttgatggaccggagggtagaatatacggttcgtcagccaga

SEQ ID NO: 13834 - DNA, 1118 bp, Emericella nidulans
ctaatctatcagaacgtcattccttctcccttgttatcaagtgtagtatctaactttgtcgtttgcgcggccacaccttcttttgcttccttttcatgcacaactattcgactctcaaaccgcccgacctctcacacatcgcgatcgttcacctcaagactaggttgtccgcgccctattcctacggccccaagcgccctcggtcgtctgtcgttcttacttcgctgcttacaggatgagtcggtaggtaattggggactggtctcagatactgtactctctcggagcctggggctgacgactgaccccgcagaacggaggctgatctggcgataaacattcgcaaggccacaagcattggtacgcataaagactacttcgcccgttaggccctagagcgttatatcgctgacccggttgcgtccagaggaaactgcccctaaacgtgcgagctacccccccgccgccacccgacggtccaactcaagttggccctgtacgcacccagaacggcgccaactgatatcatgtttgtaggaaaacatgttcgaagctgcattgtttatacatgggaccacaaatcatctgcggcgttttgggccgggatgaaagtgtatgtctggtcacgccgataaagtatatcttcttccaaacctaacccggtgtatgaacagccaaccggtgctcgccgacgaggtccaaacgttcaaggctcttatcacgatacataaggtcctccaggagggacatccggtcgtaatccgcgaagcccagcagcatgccaattggatcgatagcttgatgaggggcgttggaggagaaggcattcgaggtgcttcgattcccagtccgcacccaatttcgcggccgcagccttactgattgtatgcttgtaggctatggtcctttgattagggagtacgtcttcttcttggagtccaagttggcttttcacagaaatcaccccgaattcaatggtatggggaacgattcgatctcactcgcgcgattactgaggctgctgctactaggattatttgagtacgaggaatatattagtctgaagacgatcaatgatcctagtattatatagtgtcacctagagcgtgtgtgtaaat

SEQ ID NO: 13835 - DNA, 115 bp, Emericella nidulans
ggccagccacaagcgcgacaatcggaggatacatctcatgcgccaataagttcttcaacagttgaacggagccttagcaggcgaacgtagactcgactaggcgggtagaacccac

SEQ ID NO: 13836 - DNA, 1019 bp, Emericella nidulans
ctccagaaaatctcgtgctattatttgtgctatgcagtgcccgaccggaacctggaaacaagatatctgaacaattgcctggacccgggcaagcgggtcaagtgttctcaaggtagatatcgatccgagtgagaagcaaagtcgattactgtaccattcagccagcattattttcgtggcggaaaaacagagcctcagcgcgtgacttatgggatgtccagaaccataacattacgcacgctctgcgctggtgaggctcctctgcagcctctagactccaacttgtatccaccgagcgtaggtggaacgaatagttggctaaggacttggactctggaaggcctccagaaacacatgtaacaaagactgtttgcccaagaacagaagacaaaggcagtccgactgtgcaggttctgtcccagcaagtttcacaaaatctcaagcataattcacctacggacaaagcaaacttcaatatggaggtgtaaagaggaggtttggggtcacagccgcaatgtgagatcaaattgatcaacagagcacgagcctcgcaaactgctagtttgggttcccgctcgaatccaagagggcgagataaaatatcccattggcatccgttttccgtgcatatctaaatggatcacgcaactgggtgatgagtcttgctaattggtgttgtgtttgttggtcttgccgctattgtcagaaggcgtcaaggcaccatctagagcatggtctatggacgacctaacactaaacagataagaaataggagcctggatgcaggaacccagttgtgttgagcgggttgtttgcaaaagtggctcgaggacattacgccctgcgttagaagaggccggcgtctagtcattgctcatatcccgctcaccgagggccttggataagagacagaagctgcttactgcagccgaatggggctgatacacgctggacccaagtggacggtagggctaatgcaacagaacaggtaaaattgcacccatatttgcttttttttt

SEQ ID NO: 13837 - DNA, 1409 bp, Emericella nidulans
aaaatatcttcctttttccaaaaggccggatttgtaaaaagaagggataaaacgtcccggataaaaaacaagccccctcggaaactctcagagggatcccccggaagaaccttccccaagcaccccgaagtaacccgccacgccccccccttcgaggaaaacaaccccggccctcgcaactgggatgcgaaacccttactggaaaaagcttcagcatgtaatgtcccaatggtcataacggtagcgtcatcgggcccaggttcccacccatttaaccgcagcggaaaaccaactttaaatgccggcgctctccccaagaggacaaaccagaacctcactcagcagatccgggcccatattgccgccagacgatgaagacgaagacggagatgtagactgcgagcccccaaaccgctgcaggattgcctgttcaagacgtccaacgttcgatccaacatagttagggcgcagtcccagcctgttttcttcacatactgtcagggtgtgtttgatcgcttccagtccaattgagtaaccacctccctcatcgcccaacagatggccccagcctcctgaccgggcagttctcgtcggcacctggcccggctccgtgatcgtgtatcgcatggcaacacttccagttccggcaatgagaacgactgcagagggcacctcaggatgctgggtcatcgctgcagcgaggagatccacatcatttgtcagtcgaagcaatacagatggacggcccagcactgctgcgatttttggctcgattctgtcgcgaaggccagggcgatctagtcctgccagggcaatccaggcttttgagaactgtgagagcacaagcccgaccggctgtttgtttgtaactgggggtaactccggctgctctggcgtgtaggtttctcgcgcattctgcatggcattctctattgctgcgctcagagtagtcattgcgtcgtctagacaggtaccatcagtgctggagatgaaacgggttagtcttgttcgtccggtcttttcgtctacccatcctttctggataatagaaggagaggtacgcacatattgcagggacctgcctctccacgtcccaatacagcaccagccttggttgcaaccactgcggcgcactttgaacccccgccgtcaatgcatagaatcaactctgtagactgatcacgcagccgcccttcagcaccctgctgtaacgtagaggttgcagccagctctagtgccttggccagctgctgatcagcggcctccagaacctcacggcactcttccaccggcttcccagtggctaccataagcaaggcgagcttcacgctacccttgcaccgactcacagcgagtcgagctctaaattcggcatggacgcacattcaagactaacctgcgcaagatgt

SEQ ID NO: 13838 - DNA, 1826 bp, Emericella nidulans
gtcttcgccgtcagaaaacatggtttgcctttgtagatggcagttgcgactaggaaaccccggtaggcgttgtagcaggaccgtgccatgccgcgggcgtgagaccgggcaccacggcttaccatcagccgtctcaccccgtctgcgtggattacccatgcatcgttgctggtctgggcgtacatctcgtatacgctgagcatcatcatcgtacttagcatcgcgtcagacattgcgtccggggtctgcactgcccgcgcaacctcgtgcagcgactgcgcgtacatctgacggctggtttttaacagtgccgagtcttgtgaaagatatgcgagatacacagagctcagacaggcgacagccgcgtcttgaaaaacataggatccgacgtcctgaatgacataagaaggaaagtcgagccggtccgtggcgcggaatcggttgtgatagtacatggtggggaaagccgtacggatgaagtcggcgaagaattgaacgtgttgtctctcgagcgagatatgagtagaagagccgatgctcgtgtaatcttcactcattgacgcgtaccggcgtatcatcgcaagggcatcgtcacgaacgagtcttgctgcatcgtgggcggagggtgctggtctcggggagcggcctgtagatgaactgtgtcgtcgttcaaggcccggtccttcgtcttggaaacgaaaggtgcggcggtatcctggacatggctggccatacctgcgacattgcgagcattctggcgtgaccttatcgcactttaaagtaaacggatgtcagtggagcgcgggttcgagaagatcagcttaaatcaccttgatccgtctttcacgacagcgggagcaaccagtgctgtgaggtacgccaaccatcttgtccagatcaaagccagctgatgaaggctctcaaacccgcaatgagcggttgcaaatgcagatgcaatatgatttgaagccggaagttgatcttcaggacccggctagttcacggaaacacggtcgtttataccatgaccaggactaggacgagtatgcggctgatttgggaaccccgagatcatcgaactgagatggcctgagagtgctcgagagtcgtcggtgccggccattgccgttcaatgctgtcatctcgtttctcgcattatagggctcgttattttgggaaattaggaatggagcagcaccatcagagagatgctcatcaatccgggtatgatccggcccccacggcgttcgcagcgtcttatcaaacaagattttgtgcgagaggtgtatgaggttgagcaggatacgaactcgaggagaccactggcttgcttggggtgatcattttgcatcgggttggcgggtacacgagagggttcgattctttagggccagttagtgcgacaaaccgttctattttaattcctgcaacgggagatccgtacggtcaaaaacgcaccaagcgggatctatctagatgaggctcgtgttccagcaacgtgggtggagtttcacgaggcaagcccataaaattgctggagagcgtcgatggggtctcgtattgcacctcgcactacttattagcccgagttcctcttcgggaccacctcggtcatggtgataaatttagacaatttgctgtaaggacattcgtccattgagcacaaccaaatgctcagtatccaagaaaagaaagaaaacatcatgaaggtgttgtgacggggacttctgcacgagaatgcaagcagcaagcgaggatagaggccaatgaatggatgttggaaatgatcgacgtcaaagcgttgcaaccacagctttccccctgct

SEQ ID NO: 13839 - DNA, 660 bp, Emericella nidulans
tcgaagaaaatcgaatgggatctgataaaggctgggagggagcgattgaagagggctggacctcgaggcgattctgttgggtgggcgttctacaacatcccgtgtgggtcgaatcggacgaactcatgccatagaatcataatcccgtattattatcccgcactgtatcatttatctataatgaccctcacaactaattcatttctgcatagtttatctattatcacactttatcttactactggtcccccctagtacttctcccatttccttctcctcataagccacattctaattcgcttctcatcttctcactctttgaatgtgacttgtacgaatcacctactatcccgctgactttccatcattttcatcactaccctgtatggctggtcattgagcggcaactttctattgcttccttcgactattttctcataacgttcctatatttcaaccttactaatgttttattaaagcatcgttaacctcacatactcctattaccatttcctacattcactctttgtacattctcactctccctatattttatcctcctcatgttatctactcatccacttatctttcttaactaactcttcatttttatactctttacttacccataagtttttatcattcttcaccacttacacc

SEQ ID NO: 13840 - DNA, 366 bp, Emericella nidulans
ccggcctgctcatcagacggacttacgacagttttcaccacttctactcctcgggtagccgcttactatgcgctatcaacagaggcctttggctcgtgagtagtgtgtgcagggctgcgagttaattcggtgccatgccacttggaaatactgagtacacccaggcgactgtacggtgatgctcgaacggactcccgtaggccatcatccctgctatgcagctcaaggtacccctctgggtgcagactgtggacaccggataaccaccgatgccgcttatacatggtagtgttacatggagaacacgctcactggttcattgggactcaacaggcgccactaaaagctcatgactggcgcgatgct

SEQ ID NO: 13841 - DNA, 232 bp, Emericella nidulans
taaaccatttacggtccatgccacagacactaatattctctaagtgaacataacccgcctatagtacaaaatgatcgagatataagcccgggaaaccgacgatacgcaaggcaattgttcatgaacccaatctgatccagaatattccactgataagaaaaatcctaatttatctgctgcgcatcacgaactcaataccacttcaactcgatattcaatacaggctcataac

SEQ ID NO: 13842 - DNA, 1794 bp, Emericella nidulans
ttctatatcttcaaactgtccctgtgacactcgataaacgggcagtgatagcccaaggagcgtccgggccacgatgaccaccgtggttacgatcgcctcgctgtcccaaaacacaagcgcggtaggcgcaactcgattgactaggagctctataagcactagacttccactgcatgatccacgagttgaaggtaaaacaaggacgcgatccttgatattttcgccaaagagtgggtggtggtggtcgataatgtcgccagtcgtctgctcgaccccgccccagaagctaagaggtactttagagtagagtatctcgcccgtggctgcgccatggactattgccttgccataaattttcattctgacgttgtaggatcccgctagttttcaatgggctgagaggttgcgacgtggcgtctgcttcgtgcaaaaagaaaaatgcggggaaaaagaggaagccaccagccggattcgaaccgcaaacctcgtcagagcaggattcgggctagccggtatgagagcctatgtgggatcaaccagcaagcgtattacaagtgcaacgtttgggaggacagtcggattcgagctatggagtcgagtagttgctaaattggaagacgtacttctgaagccggagaatattcattagactggttcgactgaagagtatggttggcttattgagactattgactttgtgaatggtaaacatatatttattctatgtaacaacagcaggggtgatattaatggcattctacttaatccaaccacgacgcttcatttgatatagtgagtcgcagacggctcagttgacatctgttattcttttaggtctaggcagcgaggaccaacgaggacgaggagtcggtggcaactacttcttgaacgggaagtgtagtttcattatctgttctaggggtacctagcaaacctatcaacttgctccatagggcatctatgtacaggtacgctccagtgatctgttgacggctcttttttctagaggcaacaaaggagcagccacaaatcctaaattctgatgttcctcgtagatgtggtggtggtcgtgatatgctttttttttctgaccagaagataacaataagctggtaagatgcaaagcacgggcttgaaacaaagctaattatttcttaatctcaagaagagtaccgaaataagatgatgggaacggaggtcttcccaggaaatgcgcggggtcaaagagggacctgcgactgaaacctagggggtagaaacagaggagacatcaggcctagggcggctaaccgaactggtagcaatggttgcagagcaggtcttagacggccgttaactctgacagcggagtatgcgcagagcgaagatctaatcgcatattgtcgctcaacaggaccacatagcgcgcaagccagcaataaacccaacaccctgaagcccagagtcacaatatactacaacgaagagaagatactggtcaattcaagccctcgtaagaaaattgatttaacaaatctcttttacctagaatcatgccccggcgttcccaggctccttgaggacaaattctcccagtttcttgcggtcaagaatatcaccttccacgagccttcctgtttcatttaccgtcccattgacattctcaaaccggaccagagtgggtacattgttcacattccacttcgtccgatagacatttgagagatctctccacctgcatatactcaacatgcggggtcgcgagacttgcgaaacaggagacagaatagatgaatttgaaaaaaatggtcatac

SEQ ID NO: 13843 - DNA, 355 bp, Emericella nidulans
  unsure (1)..(355): unsure at all n locations
acgtccttcaccttgccatgggatggactactgcgcgatcatgccggatcaacagagggacctctaggactgagctgatgttaggctatacaggcactggaacacagggcttgagtagatcttgcagagctgtgcacacggtacgtggatggtgcctaaagcttgaccacctatngatgatgttcataggatacgtactgcagcctacaggatgcaggagaacgcatagacgctggtacttggcagtgtatctcaccagaatggctctgcaggaggtcggcctgtgaaaaggtgggtgctagaccgaagcgacccaagaccggaatgctggctatcgacatagtatgctggcata

SEQ ID NO: 13844 - DNA, 982 bp, Emericella nidulans
ccgtgcctgtgctccctctccccggcatccctctcgtcccgttccctggtgtgccccccctccctttctctggcatccccatccttcctctcctgggcatgaccctccttcctctccccagactccccagacacctcagcacatgaacactttcaataagttcagagcaagtgcaatcgcgcgcgcgccggatcagttgatgagggcccctgcccgtcaatttatggtacagcccagtctagaccagacgcagcagaccttccatgatctcagcacccctgttggcgtaagctttcgtgcattttgaatgtcttattcaacctgttttactgacaatttgaaatagtcttttgcactcaatcttgactccggcactctggatagctctgatattctgcagagcttcgactttgacgcgttcctcaacactgatggaaatgattcctcgttcctggataacccaacgacaggtcgttgccctcccgttacggtccaaaacggcgccatggataagagattctcaaggtcaaatgagtcccttgaggccggggacagggacaatgaaacaactgcgacttgcaatgatcccgacaagagcaattttgcactgaagtggtgtccccaactaaggccacccgccaagcgacttgccggctatccagccaatcgaattgagtggacaacaggatccgaatatgacagtaacatggcgactcctcaagacgcatcttccaaactggatgaagatacttgtttgtctagcgagacaccgccgtcagacttccctgccctggagacgatcctccgcatgcaacaggcggacggcagattcgccttcctcgggctctttttcataaaggttctcagagagaaatacgatagcaacgcccttgaaaagtttctcaactctaaattcgatcgacaatcacaccccacgaggtgccgtctcactgaactggaactgacctacaatattcttata

SEQ ID NO: 13845 - DNA, 474 bp, Emericella nidulans
gggggggcccgtcgagctctcatgaacccttatcggaggtcgctttctccagctgaaccttaccccaagtgaacggggggttttttgaactctatgagtgtctccacacgttataccgggcctgcgtctgacaatggcctcagctagcggaaactactatacgacgagacgagaactgggcataccatctaggagtacgctggttactcctcttaacctgtggcaccgatcagtgcggatgggatgctcgaaagaagccgacgttttcccttagtagcttagcggtgattgaccttgtgacatacctgagaccaagaccaggtatcacttggccaatgcaacgggtaggtgcttcaacgtggcacagaatcagaccattatgcacctagagctataagagccaggtgatttgagcacctattacccaatcttacggactatcacccaaaatgagatggctggcacagtggactc

SEQ ID NO: 13846 - DNA, 543 bp, Emericella nidulans
atttcacggcgcatcaagttggtggatctctgcgcaaagtctagtctggtgtgacattgaactgaaagattagcccagtaataagctgaatgtttagatgtgtagtgctcagccttctggtggtaagtgctagagcgggaaaccatgtggatctcatgggcttactcagacccgcaacgcattcgtcctcatttgatagtaagaccctcagaaggaggcaacagacagcacgtcttgggagcatcgggcattaacggctcttgtaactctccaatgtagtccggttggccgatactctgatcaaacgtcgtttcgtggttcgccgactctaacacgtgattaactgatgtgcttcagctatcacacccaattcttgcagttacttctgcgtttacggaacatcgactcttaacgaacgcattggcctgccccgggattacgcttcagcctaccaaaccttcatacggaagcatcaattctcgactcatcacacaccttaggtcgtcctctagacacatttgccatactaaattacaaaatgca

SEQ ID NO: 13847 - DNA, 576 bp, Emericella nidulans
caagttggtggatctctgcgcaaatgcccatattgatacgagtgataccgggaactatcttgccgttcattgtttggcttgtttatcttctggcccctcccccctgtacatagttggctactaaaattatacaaatgaatattgggatattgggatctactgatactgtgatcgtatggacttgtctccctcagagctgacgtaaaaaaattagctaaaagcagaatctctgatggagttctaatatttattgaatggattaggcccgctgactgccaaacagctgcagaaaactgttcgcatcttctctacctttgtgtgtcgatcggatggcttacgttatccttatcatctgctgcatactgcttcctatagtttagtgagcctacagtggatcagaccaggtcactgcctgagaactagtacctttggatggaccagaacttcgcaacggtgaagaagtttaaatcccctacagcctgacgcgtagttcctattcacgctagtacgttgatcctgtaagctgcatgtttgctcgtatgtttgacgagagaccgcgatgtttaggcgcccact

SEQ ID NO: 13848 - DNA, 1572 bp, Emericella nidulans
atactcgtgtgacaaagtcctcgcctttgtggtctcgggtgtcctcctttacataaacgcagatccattgtaagtgagggttactctgttgaaggctctcaaccagccgatccacatggggtcgtttcatatttgaaagactctggtattgctctgcgactgatctcttcttggatcccttccgtactaggtcggcaaggtcattctgcctcaagttcatcttggtcttctcaactcttttccacgatggttgatatcctggggcagccggcgccttgaagaatgtgtagccaacatagtatgcccccgtatgctcaccggtgtcggcattcgcagtgaagtcccttgacctcgactcggtacttgggctgaatctttcttgctgaatatcgacattgttcatctgatttgctaggtaatcaaggtttacggaactcgacgggttgaaggaaaaatgaggcctctcgcccgggtgggctgccgcctggtgtggatgaggtaaaggcggattcatactggtgatcgtcattccacaaaagacttggagaagaagtaagcatgtagaagcttcttcgtatgacgatgaagaacggaatatcaaattgacaggtgcagtgggcttgggaaccacgttcgagcaagttcaagtgaggcggcgaggtgatccttaaattatttcaagcgttcctgcccaggacataccgtcaacggtccttttgtttgtcgacagaggctcagcggatgctcaaggaatcccaacggcaatgcttctcagacccctgttgtataaatcatccattagccaatgggaatttgtcgtgccacacctgatatctgccacctcgcttgatatcgagcgcccgatatttggtcagaagactaacccctggggcaaacgggcaacttaagcctctaccactctgtggcagctagggaacaaaaaatgaggcagtgagaccgggcactggacggtgaggttttcgacatggatgaaacccccataccccttcttctgtcaaggcagaagtattaaccaaaggagagccctgtccatatggtcaagtaccttgagagtgaggcaaagatgagccactcatgctataacctctgcacaatcatgacgggctacttcttttctcccaggagctgcaggtgggggtattggcttctgcaactaagtacatgtcagcaggctgcagcatatctcgcggctcaacaagcctgatgatcaatgcatttcctatcaatactctgtgccctctcaacagggtttcgcatgcagccgagaacaacagttcgaacagccaatgccattgcttgcggcgctgctccaggcttcattagcttcaggctgtgctgcctgccaatcaccaatgagtcatattcagaatgttgtgagccggtagcacctactgcagttgctcagcgtacacctcgaatgtattcagtcgtccatccaataatgatcaataatccgcaaggctactgctggcttggcttaccccttccatgcattggatttgctctttatctaacgcgcacaaactttcccctatttttcggatacgaaca

SEQ ID NO: 13849 - DNA, 782 bp, Emericella nidulans
ttcgcggccgcaattaaccctcactaaagggatcataataagcatcgcctcaatgtccctgaagatcatgtaacgtagcattcgctctgagcccttcatcgctgtcactaatcacttacgtacagtaaatgcaacatatacataccaccagcaactcggagcactccttgatagcgtgtttcgggatgtcgtctgcgaacgggtttatccgccgcggcacggctgaaggcagacatggtgaaactggtcggacaaagtctatttgttctagacaatgtacggggtgtctactaggtacttccagactatctaggtctatgctagaaaagagaactcctcgtccagtgtgacctctccaacccctattctggttgcaacccggggttatgattccagcctccgtaggcggcatggtggatcctcttcctcatctatcttacataccacttgtcggaatgaagactggcaacgcattgacagcgtcggtgtcacatgttcgtgttttttgacgcgtgcgcggtttgtccgtaccactaagtgagggtctgacattggatgaaggttaaaaagtcaaatcttctgccgctgtcagagtcattcaggggggtaaagaagcatcctcacattaggcacgagaactggccagacgctggcagtcgtaccatgctgtgcttgagctcaccgttggggctatgcaggaaatttgaatgttactcaaaacatgcgtggctttgggacttgacccaactcctcgaaggagcagcattttggctgtgccctga

SEQ ID NO: 13850 - DNA, 596 bp, Emericella nidulans
tttcacggcgcatcaagttggtggatctctgcgcaaattaacaataaataccttatccgctataccagcaaatagtgacgtagacctagatagagtgtctggtagtaggaccagggactgattagttatagcttggtcagtgctgacctcgacagggtcttgaaagccagccttggaagagagtcagctccgtatacagactacagtagtgaatggtttctgagggcctaataggaggtttagcagggataggggttaaagatagggtgagtgaggccgccggttatactctgatataaacccttaatataaatgctgcggttgctaatattggggcatttatccctgctggatgctctgcgttgtacagacgtgggctcttgttaagaggctgcttgtctccccgggaagtcgaaacttctcgtcgagaatctgttgcatctgtgggtacacgtagggctgtagaaatgcacggaataagtctcctgggcggagacgttattcggggatgctgtcctagtatttgtgttcgctcttgtttccactgggcgtctggccgcccgtaaggcgtactacgtacccccccagctcgcgac

SEQ ID NO: 13851 - DNA, 2435 bp, Emericella nidulans
tgctatgtatcacacacatacgatttaggtgacactatagaatactaggatcacgtacaggctatccagctggatagatatcagccttggccataggacggtgccctaactctcaccaattaagctatcaactaccaagtgggtctgggatatctctcgccccgttaccattgtgactgctgtattagcactttaacatacccatttcctggggaggaccaaaaaggggacttaccaagatggcacctcgagagaatactctggcaaggttgctgatagtaggaatgtagctcggccgtctcgcaccaccgttgccacgcattgtctacaacaaggatcccaagagaatgaagcaggtattatgctaacagaccaccgactggatcgacggcggctcatagacaccagacaccttttgtcagtgttataccaatgtcagtttcaagacttcatgcctacggagttgggaccgctcacaaacctgatattttcgtacaagcaatgaccccatccattccattcttggttacaagagcagccacgagtagcataatataagtaagcattcggctatagtttgcagctgattcagcggcaagttgagaaatattccctaatgagggcaccaaaagctcacccatctcggaacacattaccaaccgttaagtctgcataagaaaagcgcagtaaagtgttctatttcaacaaaagatacccatatgaggattaagtacgtacgctcaaactacgtaccaaagaaacaaacaatgaacaagcatgtttcctatgattagaaaaacgtagctaagcttgtggaagagtgaagcctctccgtaggcacatattgcagagctgatctcgtgctcgatcatttaatcatggtctttgaagtcatctgggtcaccgaggcagcgagggggctgacagaagtggcgagggcagcatcttctatttccaccctttccatcgcactgcttgggacaagcattaccgatgttcttcgcatcgactttaccggtgagttcgtcgaggacttcgatggcggtgcgggacttataataccagtactttttctagccggtgaggaagagtcagatgtatgtctgtaaagggagacggactgagcgtgcggtgtacttacatcttctccgacaagatcacgagggggaaggacgagggtgccatcatccagttcaagggcggcagtgcaccagttcgcaatacagaaagaaccaacattgcaatccccgtttaccctgcagtgaccatcgaacttggatgtgtcgagctgcgtgaaactcggtgagtaggatgattggatagggaaattggaaatggaagactaacctctttgccctcttcgtcacgaggagtcaagttaacagtaacgtctacatcctcagggagaatgggaatagttgggccatggacattgaggtagggctggtgccgtatgttaactaaacagtaagggaagctggattgtcaacagaaaacccacctcatggccttcgccatcacgagcagcaacctgagagtcaggctcatcctggtagtcaccgaggctaaaagcaaaaggcaggactttgcattgagggtgttagaatcgatatataatgcatgaagggtcacttactgctggcagtctgagcgtcacgaggaataggacctttaccatggtggattggaacagtaggatcacggacattgagaagaggtccatcatggtagtctccgccagagccaggaggaaaaggctgagctatggtggacatattagaacagaagtgggattgataggagaaggtgaaagatagcttactaccaacagatttggcgactactgagatgggacaaccatcacgggacccacccccagagtcgggagacaaggtgtttatccagaaaactgaggaagcttttcggtgactatgctgatagagttctaccaaattccccatcatgggtgggacgaaccgcagttgcacagacgtcatggcccctatgggattagaatccaggtcttgcttttataggcttcaagggcgtctacctcagaccgtgaactcttcaaaaccactagtcttgtaagagcttctattcgcgtgcgtatctaggctttccattgcttcttatgtctccctcaacacattctcatgtctcacactcacactattcttttttcacattcttatatgttaactcttttacctcttctccctatttgccatattcccttcttctactttctcccctatctcgaccttattctccccttctctatatcctactttctccgccctcttccttctctcatatacccccttattattctccctgtctaatcctatttatttcctcacctctcattactctctatcattcctctatctcttatcctccttttatctctctttttctctctctctctcccc

SEQ ID NO: 13852 - DNA, 1069 bp, Emericella nidulans
aatcgggccgcaattaaccctactaaagggatcgctgcgatgtgcctttgtgaacaaagaggacttattaggtagcctgataattatgcattggaggcgcattagggctgactttattgattggtgcatttcccgatctggataatggacttcgaatgtgataatgtcgtcatgaaaacctgctggtatccgttcaatgccagcaattttgatcaggcattttgtctgcgctctgggtatatcacccgtccatcccaaccttcacaacctaggtttggggttgtctactagctaccacttctctcgctacccaccaaggctctttttctctagcaggatgtcagcaggatctcttccagtaatcataatcggcgccggcccagtcggaatgattctttcttacgcgctctcccgcctgcaagtcccaactctcgtaattgaggaaaacccgcccgacaaaacaaccaaatacccaaaaatggacctgacgaactcaaggagcatggagctgctgcgcacactggggcttgtgaatgcgtgccgagcgattcctggatctattgctgaagatgtaagctttgaatgtgtgttcgtgacctcgttgcatcctgaaaatgggagagaacttggacgatggagtgtcccttgcgttgcggagcagacaagcgaaagcaagggcacgaatgatggctctttccctgctgagcccggacagcgatgctcccagatattggttgagaaatggatgagggggttagtgctggattgtaagaatgttgagtttcgtggaaattggaggtatgttgggcatgccgaggaggaagatagagtcagagtgagggccgtggatctccatggcaatgagcatacattcgttggacggtttcttgtgggctgtgacggtagaaagagcgctgtgagaaaggccgccgggattgagatgataggtgcgaaagtgtaagttctccccctgcacttgtatcatgtctgataccaatatcatgatgcttagccctgctcactttcaccttgtgcactttcgctcgagagccctttcgtcaattcttga

SEQ ID NO: 13853 - DNA, 517 bp, Emericella nidulans
gtttcacggcgcatcaagttggtggagtctctgcgcaaagtatggtaacagatgaaatcgtagcggccctatgctcaactaccgaccgctgctggatccgcgatgaataaatacctccgttccgattattctggcgtatttatcatacataattctggtcatatgtttaatagactcgataggtcaaaggtactaacttaatgggcatagttttacgttctaacagtggttgatgcccgtactccggtcaccctatggacatattacgtcgaaggtttcaggttctagctaaccacggtgatttccttctagaacgcctcggctctcctgttagcgaagatggatggggtggatcgtagtgcgtatgtcgtcccttttcgattggtctagtgaatgtctgcccgacaaagactcgccccttcccaacttcgaactcgctccctaagcctattcgacaaccattacgatgcatctataatcgaaatccccttataatgactggactaggaatatatgc

SEQ ID NO: 13854 - DNA, 1277 bp, Emericella nidulans
agccattgtttattgacgcagaagccccctcgcgagccttcagtgcccggcaattcaggatcctcgtgcggaccctcattaccggactgaaagcccatcatgtgcaaaggggcgattgtgtgctggtccacttggggaacaatgtaagttgagctaagaggtactaaccctgcctcgccaacccgccgatgttttcgagaagccaattccacgccggcctcgtgccggcctttccctcgtgtacatctttcattatttttgctcgatctctttccccttttagtatgttgatggctgaccgagtttttcccggtgcagatcatataccccgcactgtttttcagcgtaattggtgccggcggcgtgtttatgggatcgaatgcacggagtcagcctcaggaactcgagcacctcgtttcgttagctgagccaaagattatcattacgaatcgcgaagcgctaccgacagtcctcaatgtctccacaagcaagggcatgctccccagccaagtgtgcctactggacgatgccgcaacagaacacattgatcaactagtcggatccggcacagcgccgtaccttgatagtggagatgagagctatctgaatttcgcgcagctcctcggttacggcgagaacgactggattacgtttaacgatgagatgatcgcaaagtctacaccggccgcgatgttctccaccagtggcaccggagggctaccaaaagccgcggtattatcgcaccacgcaattgtgtgccaacacctcaccatttcctacgatgtgccctatgcggttcgtcgattaatgtcgctgcccatgttccatctttttggtgctctatggacgcacattttcccagtccggtatggccagccgctatacgtcctttcccgttttgagattagccggttcgtcgcagctgtgtatcagtaccaaatcacggagacatacatggtacccgccatgatccatgcttttaatcgctgcacactgccactcgcggattatttcggatccctacgctatgtcggcgtcaccggcgcgccaattgacggggcgtcaatgcagcaattccgcgaattcctgccgctcgacgccgacgcgtctcagctctggggcatgacagaggtaggagtagttttccaaaatcggtacggcgagccaggaaacgcagctagtattggcagactccagcctggatacgaaatccgccttgtcggcgctgatggtaacctggtcgcggacgacaataagcctggggagctgtatgtgcg

SEQ ID NO: 13855 - DNA, 618 bp, Emericella nidulans
tcacggcgcatcaagttggtggatctctgcgcaaatgtatcctggctgagtctgccttagttagtctggttcgctagagcctggtcgggtgcctgccagtagctaagataggagctttagtccagtgtcctccgtcccagagtataggggtttaccgcctaaccaggctatagttaactggcagtgcagtaggaggtctgctcacaggatgtaataatcgttcagagccttaacagagcttgttatacacaggtgtccctatgtgagctgagcagattgctgcaaataaatgaataccagtgcccgaaggaaatgtggtcaactataaatcccgttcacagaactcatacagtgtgtaggaaagtgggtggatacttgtgccctgttgggagtaatgccgacgatgtcggttacgggttgttgactcgtgatggagtgacggtttgctgctgatccactgccccgtaaaacttgcaacagtacgtggtagtgcataaggcgacggtagccttgttcgccccgtgcatacaacatacctggtattggtgtaatatgagttcttcacaatgcggtgatgtgaaggaaacacgtgctacgtcgtctaatttatggatacac

SEQ ID NO: 13856 - DNA, 1686 bp, Emericella nidulans
gcatgaccaatgcggagttgattgagaaggcacagccgtattgtgatagctcgtttaccgtgccttcttatccgaccaagttttttaccgcttggaattcgatgaagatattgctcacgaaggagctcgtttatacacgagggcatcctctgaaaaagtattctttaactgaagaagggtgggaggttgccaaagctatcaagaagaccgcccagaagtcaattcagaatacactaccgtttgatgttcaatcagtaagtttgcctgaaatacgcgaagatcagcttactgacgccggcaggatgtaaccgcggatgaacctagaaccgcacagcgagaagaccttgcaagccagagggatttcgaacgtcagattagaccaggtctccaagctcataatagtcaacggcacaccctagattccctggagaacacattagacaactcaacgatcacgccaatccccatctccccagacaactttaccgttcaactaatccttgacacgcgcgaagttcggacatccaaagacagggactacatatccaacgaattgatccgcaaaggtattactcccgaagtccgcgccctcgaagtcggcgacacaatgtgggtagccaagttccacgatccaacctttctccgcaaatacggagaagaaggcgacgaaattatgctcgactggattgtggagcgtaaacgactagacgaccttataggctctataaaggatggccgcttccatgagcagaaatttcgcctccgccgttcgggcattaagaatgttatctacctcattgaggagttcgccgtgacacatcatgagtcaaatgccgcagctgctcagaaatatcatgacatggttgcttcggctattgcacagacgcaagttgtgaatggatattttgtcaaacgaacgaagaatctggacgatacgatacggtatcttgcgcgcatgacattcctactgagaaatatgtatagcgccccatcaccaccctcttcgcgtacctcagctagaccttcccataccctcgccctcctcccgacccggcacctcgccctctcaagctcccatatttcggctctcaacacgctccgcgccgagaacccgcacgtcacatacggcgtcacattcccgaccttctgcgctatcgcctcaaaatcagacgccctgacactccgtgacatattcttaaaaatgctcatgtgcaccaagggggttagcggggataaggcgctggagattcaaagggtctggccgacgccccaggcttttatcagggcgtttgaggagttgactgaccccaaacaaaaagagaatatggtggcagatcgcatggcgcacgttatggtagggaggaagaagattgcgaaagtgcttagtagaaagattgcagaggtttggggaggcttacctggatagtgtataatgtttaggttgagaattgacactacgaggggatggcttttgatattattcgacgtatttgtacagaagctgagggttttataaacggatgtcaaagatggtcggttagattgcatcaatgaaaaaataagcaagaggtttatcgcatgctggaactagaaataataatactcctgttgcgcgaggccgggccctaactacattaacctttggccaccttggcaaccgtttcattcatgggcaacgcaaatact

SEQ ID NO: 13857 - DNA, 805 bp, Emericella nidulans
cacttcaacataaagctgaaagcaactacgaaaatatcaactgaagatgacattccggctcagccaatttacagccgctcttcgagtgctcgccgccaaagcagaagagtctcgtgctgtacttccctccctttcactccgtctccgcaccataacaacaacaccaaaaccgccctctccatcccaggcccagacgggcatgcctagcggtgaaataaaccagatcgagattctggaaaggacaatcctcaggcctgaacgcgccgaatcaacctgcagcggcaccgacaacgccgtcggtttctccgcccaagcgtacgatccatccaccacaaccccagagagcgagttcgcctgctttgaggaagagatcaagcttcgatcagatggaagcattgatcctcttttcatcagtccggcaaatccggattacagcaaagtcttggctcgcgagctcgacgggcgcgcggtcgagagggacaaactcgatcgtcttggggctacggggagtgtgagggggtgggtgaataagggaaaggaggtcaaagtccgagtcatcggaaaggaagggaaggaggtttggaggaggatgaggatgggaatggggtatgacggggacgagtatgagaggttgctgaaagggttgaggagactgcagatgaggtgagttcccgatctagggtttctctatgtagactttgaaagtaatgaggactgcagggacgcagagaaagagaatgatacgagtcagaaaagaacttaactttcttactatcatgataacaggtaaaatttgggatcgata

SEQ ID NO: 13858 - DNA, 587 bp, Emericella nidulans
tttcacggcgcatcaagttggtggatctctgcgcaaattctgtaagtctagtgtgccgccgagctccgtgagtcgtagtctgtacggcgctaggaaggtgagatgagaagccttagatagcgaggtctgaggtgcaggcgcataggaagaccttttagacagttagctgcagtaatgacctactggggacagttcctgattggaacctgtcaggtgtagagtgatactcgtcactcctaagacctcctatccgaaaaattgtatagcaaacttgtagtgatactgtcgtggactgacctctcgtttcaaactcattgggggttagaggtatctgcacgtgttccactttacttactgtacacggggaatggtaccggtcttaataagctcttataacgccatacgctttggatctgaggtcgatcggaactgggaagatcgttgccaaaatcttgatcgctgatatatatggaaaatttggaccgcccttaaaccaggcgtgtgtgggatactggccctacgacgtaccgccgtttacacggtgtgtttattggtatcgaacttacgagatgaaatatcagcagctg

SEQ ID NO: 13859 - DNA, 494 bp, Emericella nidulans
cagattgcaatgatgtctatttcatccaccttccatatcatatcgcctcggttcactagctctcacaggggttcctttacaataccctgggttccaaaaacctatcatcattcgtatctttgacctcctctcagactcataccagcgtcttgcccaatatcttctctccgatctactcatttttagccaggtctgatccttaattgcgcgccgaaaacttacctatagatcctgctagccctcatccttgctatccatctccgctcccaaaatccaacttttacacaacagacaccgcttttatttctcacatatgtcttaacaagtcttaagcctgtcctgagaccaggcaacctgatccagctgtaccaggccccctccgtccaaactttagacctgatccacccctatatccgtcacattcttacaaaagcgttacgcaccaacgcttttaacaaatttacggccacttcccaaacatgtcccgaattttg

SEQ ID NO: 13860 - DNA, 610 bp, Emericella nidulans
  unsure (1)..(610): unsure at all n locations
ggtttcacggcgcatcaagttggtggatctctgcgcaaatacccgatcacaggatactaaccgtagggaatagggagctggctactaacgcaccgcgaccgtagacttcaacgaaatgtgttcaacggggatcgagctagcgctcttgttagtagctcgtgtcagtagattaagggcttaggtgcaggaaggtccctggtatctaggggtgccgaatacacgtgtgcgactttctaaggcgctaatttaacgttggactcctggatagtgggccagtgtaggtacactgagcggtagatactgagtttagtgcccntaggacctgcagtctcaggctagataaggacagtctgccactgacctgcgtgaggtaatgcttgctaaggttactgttgccgcaggcgcgtgagaccttcgagctatcgtggcagcgtgtgttgataggaagcggttgctgtgatttataagcctagtcatacttaacttaggtctcagctatcttaacttgtgacaaggtacgggtcgagactttaatgggtacgaatgttagtgttacacccagactacacagcgtagatgcaacacaaccatcgagatacagggttatatg

SEQ ID NO: 13861 - DNA, 1222 bp, Emericella nidulans
caaaccaatcccggggattttaattcatcttgaatccggaaaatgtgtgtcagaggttaccgaggaggagattgatgatctagcccgccagtgttaccagagtggaaagtatattaatactggcttcgagggcaaagagtggtcttacatgtgtcctaactgcgattacacgtctgcaaaactttctgcactctatcagcatgctgaggatgtctcgctctgttcctctctcctcagtgggaatggttgtttggctaaactggcacatttcattgctcggagtctacaatagtttccttccctgttccgaagtgccaccattttgtcaacagactggctgattcctacgaaaccaagtcctttatgcaaatttatatccaccttgacctctgggcatcgtgtaggatagcaaagtcttttgtcatccacaactgaggtggatcggtggtgggtatttcgtgacgcccgcgatcgttagaggatcgcttgaacggatttaagctgagctgtttgttgtgtttgtagttttcgacacgtgattcgctggtgcaaaggccagtcggatccgagcgggtcacatcatgagacctgcggagggcgggcagccaaacacgacctctcgcgaaatttgagaatcgtctgcgctcttgacagttggagcaaaggagctagcaagttgtgagagtaaggttccatggaattcaagaaacggctcagcgggaccaacaaaccactctgtggaggttgtccgtgagctaaccttacggacagtccggttcatattggtaaggagcgagcaagatgtggactcgagctccacagaattcacaagcccgttctgcgggtcaatcatattgctctgtggggtttcattgtgtactaaatgcggcggacagaccggttttcctgggacaatcaaaggggatcgcgggtgaactgaactgacgctcatggattgattgaggctaagctgtttgttgagtttgcagtacttgcacgtgatgcagacctgctgagaaggccacttttggctagtcggatctgaacaggtcagatcactggacctgcgtggcggcccaaatgcgactttccacgacctttgagaattgcctgcatcacgttcagagtccccgattatttcaggtccccacctccacaactgagtgctacagcccagcgacaacggcgagtaggagcatatgttggctcaggatagtagtga

SEQ ID NO: 13862 - DNA, 505 bp, Emericella nidulans
caatactcttggaagacgcatgaggaatgggagcggctcgacacaatacaccatgttccaggtttttcttgcctttgctacaaggccaatgatcacattggactaaatagctgcgaacaccactcggttgaagagcacacgccaaaactggccaccagattcgtttttggtcacaaaaatatacatcagcatgtactttttcatcattgcatccagaccaaagtacagagcattgaccggcagcacaatgggctgtagagttgcgaagcagatggcgatagtcgagtagtagaggaaatagttgtagtaactggcgtaatcgaatgccggcggtgctgtccactcaatcgtctgccggggtgtcggggcgaggaaggttttggcaaaccacacccagatgagatgcacaaactgaaccaggtcgatagcagcacccatgtttcgctgcatcagatacgtcacccataacggagagacattgcacatggcactgaaggctttaatg

SEQ ID NO: 13863 - DNA, 1270 bp, Emericella nidulans
gacttacttttgagacgtagagctgtcttccaccgtcaccgggaccaccgccatagcctccgaagctttcttttccggggccaccaaagtctccacgcgaagggccacctgagaagcgaggttcaggctcgcgatcctaacagtaggaagagaattagcttccgtaagccgaagctggaaaaggggcaattacctcgcggacgtaaacgaggcggttcatgagattctggttgctgagcgtgttgacggcattttgcgcttgctcccttgtagcgtattccacaatcctgtgcatggtcagcttgcgacacccggatatagtcacggtgcataactcacccgcatccctacaatgatcccggacagccaggcccaacccgtcaacccaaacagtccaagcaaatcgaaccaacgggggtgaaaagaaaccagaaacaaatgaaagaaaggaagaaccagtcacgctacgcattggcgcccaccttcgacattccattaggaagaagcaagacgtcggcgaagatgacatctccagctgtaaaaatggcgcggaaaaaacccccaaagtcagccacagattccaatcccataaaacactaaatgccctgccagcacgatatgaccctgctcaccctgtctcataaaaatcttttagatgatgccacttgacatcgtaggaaaggtttccaacatagacccgacggtcttgttgggacgattcgcgcacagattgcatcatttgttctttggcgactgctcgatcctcaaatgacctgggtggaggcgggtaactaccaccgcgtccactgtatcccgagcctgaatgacctcctgatgggccttgagcagcactcataggagagcgagaacggcgatcgctacggcggtaatcgtcgcggtcgcgactgcgagatcgactgcgcggcgaatacgaacggcggctgcgtcgaggactgcgagatcgacgacgaggggatcgagacctctcacgctgtgcgcggtcagtatcgtactcgtagtcgccgtaaggcattaagacggcgaaacaataaaggtcaggtgaatgaagataaatcaaagaaaggaccagagacaaagaatcgagtgtggaagatgctaggatgactggaagctgcgaatctgcgacttcgatctgcgcaacgtaaagcttgggtgcgcgatttcgaagtcgaagtcatgtgactgagaatggggcaggagatccataatggtgaggtgcaggaggaccgggggatagggcgcatcgaag

SEQ ID NO: 13864 - DNA, 590 bp, Emericella nidulans
gtttcacggcgcatcaagttggtagactgtggatctctgcgcaaatgcccatatgcggacgaaagcaggctaaaagttgtgtccctgcttaaccgctgatgtgctggtgctcccgcgtctgaaggtatacgaaaggaagaattccctaacaatgtggtcgtacacctgatctggactgattcggactattactcggaaaagtcctaacggagtccttacgttcccggggatcgcggagctacgcgtccgactaaactactatacaaagtgcgcgcagcacggtttctcgctcgcgggacacaaattagggcttagggcccatccgcgtcgataggctaagaacacgaactgagctgacgaaacccagacgcaggaccaacgagattcatttaattaagatattagattagccgcggttcccgaaacagaaaggcggatagttttccccggaaagacgcgcacccgatcacacaccctgacacgatacgatgccctgccctaatgatcgttatgacgcctacgaagatgtcctggcaagcgcccgcgaagcgcataatggcgataacggaagatatcgaaggactaccctt

SEQ ID NO: 13865 - DNA, 576 bp, Emericella nidulans
gcgcatcaagttggtggatctctgcgcaaatgcccatgtggtctgatatcttggttctcatatgcgtgttcatcgggaggacccgcctcgctactgacgttcttgtactgtgctgctgacgcgccctatgcttatactgagtatatttctacgttttcgtcgcggggtcttcacgcttcaataactgccctgttagtcgcgctgagttcggctgtggacgatgatgtattttagcgttttacaaaggatgcggtatgagtaaatttgttagtacacgatgcttgaggatacgtttactgttaattatccttgacctcgtatgctctatgatggtcaaagaagggatgcatgtattacttatggtactcaggacctttatatcgcgataacataaacaggatggcttttatatgacattttcgataatttttcgattacattgggattaataggattgttttaactctgtcaagcgaggattctgatccacatatggggtcaacctctggcgcataaagaaggtcgatcacgcggccgtctgccattggccgtaaaacgttctgacagcggagtggt

SEQ ID NO: 13866 - DNA, 1371 bp, Emericella nidulans
atcctcctgatgagactgcgcttgccatcgccagtagccgccgacatgcctcctccttcgccggttgctgcaaccggacccggagtcgcctgggccgtcttggccgcttgaatggcggcgctgagggcatctttgatagcgtccgcttctgcacgggccgtcgcgccagcggtaaatgagaaaatgtactgttccggagctgcagagggattgttcgagggtagggcaaatatcttcaacataactttcggactactcgcgggggtctgttgtagatctgtatcctgtcaaaatcgccctcgtgaagggctagggaaaagttcacgcactggtaatctgagccacggaaattgttatcgttcctgaagcaccacccgctgccggaatccaagaaaccgactggcgatccgccgacatcgtcagggtgccgtctttcttcttgtacgccgccgacccgctcggaggtgccatcgtggtcgaactcgacagcgtccactgtcctgggcggcggagagcgatccacccatcgggagggagaaaaaccccagtggaggcgctacgtaaggggttaggaaggtcaaaggccttcgagagttgtggtgcgcctaggagatatcgtgaaggtgaagaagctccgagaagtctgagactggagctgttgaaatccggactcacgtgactgggctagactttcgcgcagcagctcagaagactggagcttcattccaatgcttcctcttataagtctatgtcatatatttttctctctgataggcctgtcattgccaacttggtagattaaatactacttgacaaatttcattatcatctcaaactgcatcaaaacgaacaattgtgcaagtacgccatacgcctggaacaatcttgcttccgctatgcagccaaaacaaagcacacgctcaatcatgtcatgaaaaagagacgctcacttttatgctccagatctcgaaatgcagaagacagtcccgcccagaaccaaactcaaaacctaacatgaacaaacaaataataggacatgcaagaaaaataagggtataatctcgatctttgcgaacggaattagcgctattgcaggcttcattcatcgcttgaacatgtaatgtccatagagacccccgacgtcgccgacagcaacgggaatctttttcattccccaccatctagcgcccattttccaagaacgagagccatcgtcgattggtgtgtcgggcatcgaggcgggatcacgcacgtaccatccgcgacggcccagttcgcggactgtccagtcgggggaggtcttggtgttcttaggcttctcacgcagtggagtgatcagcttttcactgaactcgataacttgaagaggat

SEQ ID NO: 13867 - DNA, 118 bp, Emericella nidulans
ttcacggcgcatcaagttggtggatctctgcgcaaataccgattggcaggcccgattggttttaaccgaacaggtgtgtcgaccacctacgcttcgtgtaattgctataatggctgtc

SEQ ID NO: 13868 - DNA, 567 bp, Emericella nidulans
ggcgcatcaagttggtggatctctgcgcaaatgatttactaggccgcctactacgccgcggtctactagatgtgttagcagccgttcttcgagacgacgtgctctgctttgatatagtagaagttctctggagagtgattttgcctagttgaggtcctcgctttgacagcgaagttctaggctttcgccttctcgtttggtatggatttacttatggtcgcctgtttatcttcgacttatgtccgatgcctctttaaattagtatttctattttaattatccgattttcgcgtcgtcttacaaggtaagactcaggcttcgaggatagaggtatccgcgatttggcgccgtcatcttatagggctatgaacacgtttgtagctcctgcgaacatgaaggaatagtcctgattcgcctcatcgaaaagggccgcgttatcgacgtcaaggaactcggcctacttgaggagttactacttggcttcatcgtatcgctttgctttcttcaacgcgaggtaaaaggacaacgacaggctgattaacgatgaattgagggttccactgttcg

SEQ ID NO: 13869 - DNA, 1896 bp, Emericella nidulans
catctgtcatttcttgttatgtgcataccggactgtttatgtccgagtcgagctgtttatagggtcttaagcatggtcggtttctgaagtcggtcttgggctttaagatttgccgtagatgaactactcttaggctaccgctaggtttcgtgaaagaccatgcacaaatatgatcatatggccattactaagaactattagagagatgttaaaatacataacgtataaacacaggcaaggaagcgaagcgcaaaatgcagggtatacaagaataagaatccaaagaagtgatcatagcaaggcgttatcatggatgagaagtagttggagcaagatgtaaacgtggattggaaggaatgcaatggattagtaataatccaaggtatagagaaccctattttgtcagggaaggcttcctagagcagtctggtgcaagtggaaggtcgaaatcatccacagcctcatgaggccgagaagtctgccgttcaagctttcgatgaaactctccggcaggtgaatccagcgctggacctataacgatccgtgcggcgatgtgtattaagactatgagtagcgatagggggggtactagaactagtgtgcaggtcttctgaatgagggaagctgcctcatgtttctcgggtctggacaagattagggtggatggtggacgcacaggcccggtttcccgctcgcaagatgcttttgagcggcggcgaaattcgatgctcatgctacttagatctggatttgaagatgcggacgtcgcgctgtgaatgcttgagaaagaacccggtgtccgccgtaatttgagatcttgctcaggatataaattttgcggcgtatacatctggtctctggcgtgcaaagtctctgcatacgcgaaatcctctcccaagggttgtacctcgcgatgcccgtaccacatccgatgtgtgtcgtccggtgaggcgggagatggaggtgtcagggatggctccggcgtgacatcgatggagtggaaagattcaatgctcgaggaaagtgtctgttccgggctatcatgagattcagtgtcttcaaacctcaccagcaaggtctggaagctctgttgtgtctcagatactgatctccgcggcatttctgtggagactgggatattaataggctccggcagctgctcccgattatctggagtttctgattccgtcgtgcttgcctccggggtgaagcccgaattatcagtggcagcaatattaacgtcttcagctgcgctaagcgaatcgggagttgtggcctctgatatagtgaaggtctcctgagagtgagccggctgcatgagagcactctccctttgtcctttcgggcgccatgccctcttccgtctaggagccttcgcctcttctggtatctccacagtaaagccgcgtttgaacggacatggtgtgacttcatagcggaggatttttgacagcgcgtccttcatctgagtgacaagctctttgtccgggtctgtctcattcggaagctcgattcggtagtatgtgagggggcggatgcgcaaaacaaaggtggattcccggtccacacaccaacactgtgagttcttcagaatggcgtgaacgacgctgccgcatttcaagaacaccgtcaatccgtatactttctccagcctcaacggcgcgaacgcgaccgtccgttcggtaggcgaccgccacggtagcgtctcgatggtatcgaccgggtaatcgaagtcggacggtgcagtactcgatggaattggggctacagctctaggcgcgaaatggacgactttggcacatggatgatagaagagatcattaatcagatggtttatacgattcagagctgcgtcggatggaagggttcagcttgtcgtaagaattaagaccgtga

SEQ ID NO: 13870 - DNA, 396 bp, Emericella nidulans
tttttaaaagactctggcgttttacacccacaagactgccgggcctgtaaccatcaataaaccaccggtgctacacagtgagcagcagcgaatcactgctacaacgcacacgaacccaaacccaccaaccctaaccaaaagaccccgatcaacgtcagcaaggccatccatgtcgaccctcagaacttgacggtcagacataacacaatcaagatccaccaaccaggcacgccatcctctgacaccaacaagaagcatcactgaactacccatcctatacaaataaagacctccctcgagaagcctacgccgaaggctaacaagtgctataagatccaagggaacacaaacaacaaaccaccaccgtctagagaaaacaggaagcacaacgtctgt

SEQ ID NO: 13871 - DNA, 474 bp, Emericella nidulans
aatgctctcgacacccgtatacagggtacagacccacatctctttgaccatgctaactgacaaacacacctgggggcttttaaatggctctcgggtaattacccgcccgctacagctacatcgcggacttgcctcaggtctccaccggttcgtacactacacacgcaaggcaagaccagaacagaggcacacgcctcttaagaagcccacacacagagacgaagtccactgagccgcagacccatcataagcttctacgtgccgccagatgacgaaagtactgcccggaagaggatcccttgaatcaccaaccccttgagcacaagaccagaaaccgtagcctacacaaaagactactttgagccccgacatagaccgatccgatcctatcaaggacatcccaagcaacaacgcagcggacacgcactcaaagcgtcaagttggcccacgcccatttgcacatgattacatgca

SEQ ID NO: 13872 - DNA, 602 bp, Emericella nidulans
tttccggcgcatcaagttggtggatctctgcgcaaagtagggcgctgcagggccgactgacgtgctacagtctgctgaattaaacacagtgtgggaacttgttgcagactaaatggctggtgcgggaaataggtgatagcctgccagtgagaggtttgagctgatcctcagccctataaccggtggtaggcgtggataggtgacctactaggggttacgcgtactcgagttgataacagacaggcctcctgagaatagacacagttagggtactgtttaagggggtttagctggatattgattaggctggcaggcactggaggtcaaagcatgctggtgagtcaaattagactgccgtaacgcatagttggtcactcggttaatctgtttagtacgacggcgactcacgtggttatcgttctctggtatcgaggtcccttcacctcagatagattgtaggccaccagcctctagacctatatgattttagctgaggcttatacacgattttaataagcaaatcgtgtaaccttttgcgttaaatgatgttgctgctcaaatggtattgatatttttcacgtttttcctcactatgttcgttc

SEQ ID NO: 13873 - DNA, 134 bp, Emericella nidulans
gtttcaggtcgcatcaagttggtggatctctgcgcaaatgagcagctatccttgtagttatattactcatcactctggggttgggatttatacttcgctcctgttatacctgttggggaccgtgtgactgcact

SEQ ID NO: 13874 - DNA, 361 bp, Emericella nidulans
gcgcatccctacatgaacggtattaatggaattgcgaaccatgaatacaaagcacgccttcgtgctcgggttgcagatttcaaatcgggtcttgccccggcgccattcttggacctggacagcgccaacgcactttatctagacacagtactcagccacgtcatcggaacttttcgcaacattgtggtgaaagatgaatttttcgaactcgtcagggctagtggcgagaccgtgcatattcctcagggaacaaggctcaatcaggatatatttgacaaaatcgagcgcctgctatgtgaacggttgaccggcgacggcgtagacatcggccctgatgagttgagcttttttgcagcggcgt

SEQ ID NO: 13875 - DNA, 377 bp, Emericella nidulans
tatatcatgatttatctcattgtacaatgtaattatatacatttgtaagatcaatagagattctggggaaataggtacaaagtgcagcttaaaaaatactaggatattaaatattacaagtttatttatgatgaacacagatacataatatatctctatatgctatatatattataagaccttcagattcttcaaacatatcatcatttcatacaatctttagaggaattcatggcaatcgaatgaggatttaacaattttatatcaaaatggcactatcatcagatcatgctccgtaatatacgctaactttattagagttttctttagccttttcaacatgtatattttcacttattggttttttaacaagcttt

SEQ ID NO: 13876 - DNA, 1364 bp, Emericella nidulans
ccaaggtggtaaacatggaaatgctcttcaggctgctgtgattgggcaaaaacaccagactgcaaaactacttcttaacaggggagcagatgtccaatattcagtggcaggggcgtttgatgtaccattactgcatgctccagttgaatctcgcaatcaaaccttgcttgagttgcttcttgtgccagccgctgcagctcttgtaaatgcacctgacttccttggccgaacccctattcatttggccgctactaacggggacattggtatgcttcaaactctctggaatttcagtccggacttgattgacctcaactgtcaagacattgatggattcacgccactccattgtgctgtcaagaaccacacttccgaagctgtgaagtggcttatcaagcaaggggctatggtagaggccaaagattttaccatgacaacgccgcttcaactggcatctcaactaaggaattttgggatcttttgccgccttctttccgaggtgactgaggttaagatgagcgcctcagaattgcgggaatatttctccagattcagaagaaaacaaatacttctctatcgcaatatgagagatgagaattctatccaagctatggactaccaagaggtggttcgatattttgacgccctgtcatatcaattagggctttcaacttctgatgtagaggagagatatgcagaatgtatcacaactctccctgtgcaacagtcaattgtgtaagtcaagatattaggacatgaatttgtactgatactttctaggatcttcgacagaaaagcaatccccggtaagaattcagttgttgaaaactctcctgtcggagtgtactacttttggtggcgcaaaacaaagcgtaaagagagagattggccgaataatagtgatatattgatttggaaaatacaatcaagatcaatgccaagccccgctgctgtcagacagccacaccagacagaatgtttgttagccaatttggattctgtcctggttctcgttttgttccgttctataatgacatgctcataggctttcttgaatgtcacatggtgctccctgtgtacctgcccaacgacatcacgtcctctgagaatacgtcctttgcgatcccatcttctaagcatgtcattacttggattatggtcaagaacgccaaagataagacagagccgcaggaacagcagagtctgagaccgaagatatttctcagcactcttgaatatgctgagattcctagatccgaattggagctgttaaattattgtcttcaacagcttgagcaagaatggagtagcatatgccgtgccgcagaagaccacctcgcgcagatggttggtgaattgcatat

SEQ ID NO: 13877 - DNA, 571 bp, Emericella nidulans
tgaatcctgatatgcaaagcatccctcaaacggtaatctaatgaggactgttgggttcgttgagcacccatatttacctgattttacatcccttttatattagtaatctttccacttttttttaattcatcttactttctttatcacttctattattcttccatctcaaatttcatccctttcttttttcttctatttatcattcctcacttcactatcttctctattcatttttctttattctcactatctactttttaattttccatcatcttttcttttatttactctatatctattcctatattctctttccactctatctttttcatttttatatttctcttctctattttcttcttctcttcccaaacttttctcttttttctcctctttcctctcatcttatattctacttactctttgctcacctattcctcctatttatcattcattttttcttcctaattatctatatacatatctttttctatctatctttttattatctctactattcactattatttctcttatccttccacccactcactttttcaatttatttcat

SEQ ID NO: 13878 - DNA, 796 bp, Emericella nidulans
acagttacgttatgcttgtgttagcaaatgatcctgtttcatatctctacggcatgcctctttcggactcccctgtccaagaaagtgcactgccgtaaatcacacttccggcccagcgtataaaccgccagcttacgaaggcacctttgacctggaatcgtaggcgttgcggttgcaggagagccttcatacgcgatgacccaaataatctgtacagattgcatcttggtctaacggaacacgtccctgctttcttgggcaagaaaaacaaacctcgtagtctgtcgcgttatgcccaagttagggttacattagcactaccttttccagtgaactcgtcgcgagagattggttcgagggcagttatgcttcttgatttgctgtcctttaatcacaaaaacacgtcccagaaacgagaacccaacaaattccccttagtaacctcctcactcgctgacataggataatctggtaccacgcctctgccccagcaaggcgtttgcctctgacctacccaatttgctgcctgattgcttcgctattatgcttcgcaattatgctgggatatcttaggtattgcctgattttttgcgcccttaatggctagaagtggcattcatgctgactgaaccaaggtacttgatcagttctgcgagccaaaattgatatcgcttccgaaacagcgcctccagaccatgtcttcatgttacgaagctcagcaatacctctatcattgatttatcgtgattttgcggcaggatcagatccacgattctctccgaaataagagacaaaa

SEQ ID NO: 13879 - DNA, 328 bp, Emericella nidulans
tgagcagctccgcgactgtttcgagcgagctaaggtgcacggtctctattgttgtctgaccgatgggccagatggtgctcctctaccgcttaccggggcagcatgcctcgcggcaagtggctagaaacgttactgaagaggcttacggcaaggggcgggggtatcagcgatactgtcaatatctgcggtctcgaatggcatttgggcgtcgactagttcttggaggaaggcaaggatctagacgcgaacattgcagaggtggtcaaggtgcctgcatccggagagaatcatggcaagatggcctacagaaccggatgccgggctggtg

SEQ ID NO: 13880 - DNA, 1528 bp, Emericella nidulans
attaggatatctgatatcgtttcaggttagaggttttcgtggcttgcttgctgagttccttctcgaaaaaaggaaggaggaagtccggtcttctttcagactaacgaaagcaaacgaagccttgtcatcatgatggtattttgcgacgaaggctcagacttaagcttccagtcgtcccaatcatggcacggagttcggtgtggacctcgaagaagtcgttcgcactgaatccagtgaacgtggacaggacgaagaatatttttgattttttattgaggcattgtttgagaggatatatattcagatgacttgcctcgtccagcgaaggcgcaatgcaattgaagaagaaacaaccatgagcaaacggacaagcaggcagagaaaacacaataatgcagagcaagtccaacctagcgactcggaatcaagaaataacagagcagagaaagttgaaaagatgtcggacagaaacgagtcgagcaaaagttagtgaaagaagctcgagccatggccgcagtagaagaaaaaaagaagagaacgcatgcagagccggaatactgaatacaagagactggtgcatgtgtctagagtggatgaagctaagcaagatgtgaatgaacggtctatcagctcagggttgcggctacgggcagttagggctagctcctactccacagactagttctcaaacatgaccgccagaaacaaatcgaggaaaggacaaacatgcctttataaaggtgtagccagctatatgactgataaaggccagattgcgcctgcgtgatggacctaattctcccttccaagtcggtcaggcccttactcttgaagatgcatagtaggatgacatggcaagcaaaacgagtataatatcaagccctataccctaaacgctcaatctagctttgcagttatctcacttaccagcttgcccacctgcactgcatgttttcatgttgctaggcttctcctctcaccctcaccctcaaccctaactccaacccctcccaatcaacctgcggcccttcaaacatcttcctcccaccaagcccccaaaacagcaaaataaggccaaagattccgactgcaacagcaggcgtataatttgccgacgcaaggttcaccggaatctcaggcgggaggcaaacgaatacacccaggacaataatccacaggattgagaaggcgttgcagagtgaaccgagaaggggcccaagactcaggtacctgggaggaagaatgctcatatccgtattcgtctttgagctgctggtgagcagtgatcgtgctcgctggagcaaaagaattccctgcggtaccgcatacgtgatattcagaaacagcactgcagaggtgattattgagttgaaggccgttgtggaagctaggtagagcagcccatagagcaggacgaagacaaatgcggctgtcgtagtgcggacggggaattgaaatgtaggactgatggcactgaagtagcgaggaaagggggtgccgttctgtcctttggtcagatattacttaa

SEQ ID NO: 13881 - DNA, 276 bp, Emericella nidulans
tggtccacacgacacagtgctgcttgctcccgttcacagtacttgccagggactcctaattgaatgcggccataccggtggatacttcagtgctggatactgtggctgccttgggtgctgccaagctatacatggcgactaacagtatgacccgagcgcctagaaccggaccagcttgctaacactgagagtgaacctccaaggagggcgagcacgaccatgaggtggctcagccggtgggacccagcctcccctaaatactgtgcctgcgcgcta

SEQ ID NO: 13882 - DNA, 464 bp, Emericella nidulans
cctcaaatttttaaaccctcccttctttcccagaaccaagccaaaccctacggggagctctttaaaaaaacttggggtttacaaccaaaatattcaaatgctgcaaagatgttcactcggctactgggggcatgtgagacaacatgccgagtatcctatccccgcatatagcatccgcccaacatatacacatcccttggcaccgacctatctatgagtggcggaagcagcattacaacagagcaagatataagcacagtttcatagtgacctagagttatcttttacccttgagcacactatacatatattctacaaaatcggccttcccaggcacactacacataacctatcttcatagacctatagcagcactaaccgtttcaaacactgcctatattactaaagaccataccactcccccctgcaaacaagtctaaaaccccttaagagcgtcaaggaaa

SEQ ID NO: 13883 - DNA, 431 bp, Emericella nidulans
ccaccagcatacctcatgaccaagtcttacacggaatgttactaggacgtgcgtgatcacgcacaaaggtgcggttttttgaacactatgcggctctcaacgccaaatgcagaggaccggggctgtcgaagtcgctgctgatgcgtcccaatcacaaaacgacccgaggtcgggcggacgctctaaagctagccagatcgaggcaactaaaccgataacaccacccactagttcacagtagtcgtacgcagaggatccctcccctcccaaggagcccttagtctcactcagcccagatcagaaaactaaacccgagaacacctcataagcggctgagaacaagacctcacaagagtatacattagatctacaagatgtaaaaaagcagcaccacgcttcagctctgtatatggccacaagcttacaacaac

SEQ ID NO: 13884 - DNA, 1044 bp, Emericella nidulans
aaaaagatacctcttggctctaacgatagcgtcataacgatcctgaccacgcgatctacgggaacaacatccagttctacggcgagtttgttcctgataatgccgctattgcgagtggcgagttgaaagccacgaacaaaggctttgcgcacgagcagatgcggctgtacgaagacgtcgctaataagacggacctggttaccgaggttatgcattattatacggaagaacaggtccctgttctgactgcgctggtgaaaaactacttgaccttcaaccactggcactctgatattccgggagtacgtatctcaccaaaccaaggattctataaacacctctaacatcagcagaacacaaaccccaaccgcgccgcccttgtttctggctcatcccacggccacggcctaaacgacgacggattcaccaaccacgagctccccaaccgctcaatcttccaacagctcaccgaaactgggcattcatggctcaactacgttgatcccgatggcggcaccggcccggacgcaggcttctacgactggacctacgcgaccggaaacgacgacaagatcgtgccgctggcgcagttctacacagatgctgcggccgggaatctgaccgaattcacctacattaacccctcatgctgtggcgtcggcacaacatccatgcacccctcgggtcttatctcggatggtgagacgttcatcaagtctgtgtacgatgcgctccgggcgggccccgcagtggaacaacacgctctttgtcctgacctttgatgagagcggcggtttccacgaccacgtccctgcgcccttggccccgcggccggacgacctaacgttcacgcttgagacaccgaacggcgaaaactacacttttccctttgacagactcggcgggcggatcccaacactgctgatatcgccgtgggttgccaagggcgctgtggagcagaagggcacgaaccacaagaacgacgttggttcgtactctgctacctttattctgaggacgctggggtatttgtgggactttgag

SEQ ID NO: 13885 - DNA, 569 bp, Emericella nidulans
tgcaagcagccatagagacgctcgcgctgtatatgcagggataggtagaaataattgaattatactattgtaacgttattactattctttcttacacaattccacttaccttctatctaatacttctctctctacatcaatctccccctatctccaactttcttttcttcctccacacttctctttttctcctttcttcacccttcaatatcttcttaccttcctccatcctccaatacctttatcattttctctaattttttccaccttctctaccctttctcactccttccacctctctcctcatttacctttctcccttattagtatacctctatctcttttccatatactccttaacatcttccttctatttacacacttccattttctatactcaccactacctctcatcatactttctttacccacccattcctctcaactctttccatctctcttcttatcttctatttcactcttacctatattatatctaatttgcatcccctccctctccaacattttttcttttaatcctcccactctctccatcctttctttttatt

SEQ ID NO: 13886 - DNA, 1085 bp, Emericella nidulans
attcgcggccgcaattaaccctcactaaagggatcatgaataaaattgctcatccggtggtatgtctcaacggacaaacagttcatggtgtagtggcatgtctttcaacgatgatgcagtcgcggcagtgtcaaactgggcgtaggtttcgttgtctcagttgctttcctctatgcgctctggtgcttagggcactcgccaatctcatccaacacagaagtttgactgcgttactttgcaagggttctgctcgtcatctgcgctgtgtctgtgttcggagctctgttcgtggctgtgcgaccattttagagcgacacagagttggtaggttgcatgcatcagtacagaccgagaatagaaaaaggaaatatagttgaacagatggaaataagctggttcagtaatttgagataataggaaagtggtcacagcggagtgaagatgggcggtatcagatagcacccaactgatgtcaccggcataataaggatatataatggaacaagtctacaagggtccgaaactccagcttgtcaatgggatcgtgtaggtcataccgtttgcgcttgaggtatacggtaacatggccgtattttccacatcgtccaagtcgacgatccatcttaagggcactagcctggtgtcaaaagcattacaattacacacggtatagcacagaaagcaagttgtaatccgatcagtaacactcgatcaccagccctcacgaaccaacaacagtattcctcctcggcaacgttccgttgaccaaaaacgcatcgatcaggacacttgcctccccgcccaacgagtaactcgtatgcccattcccatccctggtcagtagcaccccgctcgggatttgctctagcagattgttcgcccagacgtagctcgtctctgggtcgtggaatgcattgaccatgagaatcggcggggccttggccatgctggtctggttgagtttgtgaggcgggttgacgagcggcgcaggccagccgatgcacgagacctggtaccggtaggactgagaagcaccctttgtgtgcggcgcaaggtaagaggatagttgcaacttgtagaggatg

SEQ ID NO: 13887 - DNA, 1015 bp, Emericella nidulans
gcagagcagagggtcatcaatcgtgctatgtcaatagccgagtattgctaagaaaatccactctcattgcacagatacgagtgttcagcctgcgtagctgccaaggaagcaattagcttgaccaacgttctcgctgctcgaatcagagttgcatcacatggtctacatacgtagcatttatgcagttcgaaattgagaggatagattaccttatagtcgccgccgaactcataccatgtctcaagctccgtatagccgaacgacggcatgtcggtccagagggtatcaccctggaccttcagcggttcgttcgttgagggatcaacggccacttgtttctggagatgagatataaacccaacaagctttgtgtgcttggatggttccagacgttgggccagctccattactgcaagagagacgttgtagtctgcgagaccgatcccgccttgtttcttgggaccatgaatggacaatgcagtcattgtcatgctgatgatttcttggactgcatcttgaactgtaacttcttcttttatgactctatcgactaatttgaactcgacagagttctcgatttgtcggatgaagttctctcttcccatggtgaggggcagtaggtgaccgaaaataaataagaaaaaaaagatgtgaggtggtttgggtaactttggaggatgcttgagatgggaagttacggaaagtagaaacgtgacggactggttgataaagaaagtaaaaggcacactaggtctgcagaagggaatgaggctgtacagagccgtcgggctgtgttgagaatggtgggacacctgacacagcccatcttgggtgtgggggccaagacttgcttctaagtgcttgttagtgcttgctttcggcccccactctcgggcccaagggtcgaagctgtataagcattttttagcgcctctaccaagactggaatcgatctgcgccggctctagtactgcatacacagaagtatatgcagagaaaagaaccttggggccaa

SEQ ID NO: 13888 - DNA, 1260 bp, Emericella nidulans
aagaaattgaatcatagttcacatacaatcagcctcttgtatcacagaatatgtgatagtacgtaattacaggcagtctgtttgtcagcccaaagccgcacctgtttagcatctcgactttatcaaataaaccatagcccgtatatttccgcaaaatacagcccagaatctctttcattaacaaacggcacattgatgctctttcaggatattcaaaggatagtaggggacttgagtgttgtgcttaaatatcttttgggcggcttctcaaatcgcttatcacaatcgagtccccagctcccttccacatccgattctcgacgaaagatggccgctcgtttcccgctatttacagcctataagaagcatatatcatgagttgttctatacatcttggacagaaacacttttctacttcagtttcagacttaacgttatccttacaagcctctgtgtcaatgctgcccccccaggggagaccaaacttgcacaacttggagctcttgaaagagctactgctctccggggatatctgggtatctcaagcacccgagattagacttgatactcgcattacatttgtacctgatatgcacccatccttcgcacgatttgtgtcccagctaggtgactctatttgcaaggcaaaggtacgtcaagtcaaactagcagcatgctccggcctgttgtattcctctatgctgacagaccacagatgtggtctgatctagagctttctgtttcctacaaaagttgcgtttacggacccgaacagacacctacatatattctctccttcggaatacaaagatctttcggactggtacagagggcgacgcctagactacccaaaatcttgaaggatgttagcgacgcaattcctccaggtgaaataccggctgttcatatgacctccatcgacgtccgcatggaatatagtcacaaaacgagccaatgcacacgatctgggcaacaagggtgtgatgacggaggcaacaacatagtacaactggttcggttcaatgatcgggtttgtcaagggacatactggccggacgacaacttaactgtcatagaagccgacgacgggcgactcgaaatcgatgcggaggaaatgagcgaaggttggcagctttctgaccactcaatccccaaaaagtccttctcagaatttggcgctctgttccagagggactgaagacactgatctttggagatactgcactgaggcgcaagataaaccggacagggccagacgac

SEQ ID NO: 13889 - DNA, 404 bp, Emericella nidulans
cagcctggtttccactctcaacaaactgatttcaaaccccgacctgagccccaagacgcgtgtcctttttacagcgccctgaggttcctccccggctgccgcatctacggtaaagtttccagcccctgaagcacatagactgtaataccaatagcacaccacctgcaagcccaatcatactccatggcaggcgaacccgcccatgtataactacaaaaccctaatcccatcgaagtggaatggcccaccctgactgagctaggagatcgaagtaggccatatcgaccaacgcgaaagatcagcgcgtccgtttagagagccatcgtagaaccctacactgccacaggcaatgcacctactcatgcagagcgagcacgctctccaaagctgtggcaactaggcag

SEQ ID NO: 13890 - DNA, 530 bp, Emericella nidulans
aggatactattgccaggacgatgaagaccacgggtcttactggttccgtgggtctttttgcatcggtcgttcaaaacaccctcgctcggcagaacgtgggaccatggggagttttcacgaggagcggtgctacagttggtatccttggtatgtattgattcatgacaatcggccatgcttgtgggtagctttctgacttgcctgtccagccgctatgggaggtacctatgaattcgtgaagacattatctgccaacctacgagagaaggaagaccactggaatgtcgctcttggaggtttcttcttcggagcaatacttggtctgcgcggcatgtcgtcaattatgcgatatgagctcctatgctaatgattgtagcccgcacattccccgctcttcttggataccgcgcggcgctggccaccgtagtgggaggatatgagtatactggtggatcattgttcggcaggaagagagaccccaacgttgacgaattacagcgccgggagaaattgagaacacaatggaggac

SEQ ID NO: 13891 - DNA, 481 bp, Emericella nidulans
agcagacacaccagtagcatgtccatgtcttacaaagacattgcggacataaccatcgttcgtcatttgtgacaatggtgcactaagacatggacaccatggtagatcctatgaagaccagatagactcatgtccacaagagtgcctgaatctgaaactcgtctccatgctaacatactgataatgctaggccacaccacaacaggctggtctatggagccttggctactacgcataggaagaaccactgatttctacagactaggaccaggacctggacctcgctgctacaatcggaaccggcatcatggaccacaagtgggtagcccatcagggcatagcatacaagacattcccggacatctgaccatcatccatgtactaccaggttgacagctcagggtgacgcatcacacggacactcatagacccgagcatggtgttggatgccatcctacgactgaagatagcctcactgcga

SEQ ID NO: 13892 - DNA, 522 bp, Emericella nidulans
gtgcttgcgatgtggttttctagatgatattggccagaatctaaagcctgcgaaggtataggaatgaggactatcaaggtgaatcttggacatatagttgacgcatcaaagagctggagaaggttactgggcttcagttgttggaaaatcaagccaagctttgagagccaaagcatgatgatgagtatatactatgcagcacgcgatagattttcgagcatagaacagtgatttcagcgaaattgatttatatcctttaggaacaagaattggtgttccagacactagttcctaaatcttgaggtcgagtcgtcgcccacccggagaccacaactgctgcgggacccagctaagcgacagtccacaaattgcacaaatagatcgtcccacaaaatttcttgatctctctgcaaggcaaccgtcgacaaccatgccaacagtcaaaatggtgagtagatactgccattcttgagaaatggcaaactgttgcattgtgtctggcctgtctctgaaacatgagtt

SEQ ID NO: 13893 - DNA, 986 bp, Emericella nidulans
aaaaaaaaaaaaggccttcttaacctttcagtcttaaggttaggacaacccaaaaggggcgctccccaaaaacacatataattttttcccggcacaccaaggttttgggcttaattaaggtaccccaatcttatttatgtccccggtgtcccataacttttcagtcttcttttaatacccccagcttaatcccgattataccctgacacgacgtaacacgatcgcttgactttttaaaacccatctttaaggttccgtgtttagtctccctccacgccaaagtatgtaaacctcttatcctttcctggacactgcatacccctccgacctccttgacctagcatggccagcaccatgatcctgcctaatcttgagccttgacccagtttctttctttttttttttttttacactgttggataccctatcacgtcattccttggcttcttctcccttaccccccgctccaccgctcctccccgtcttgacggaccgtcgactaaccacgtattcaatccaaaggcagagcgatgattatcctcagggtggaacactcagtttctccaagattgcgacaacatcacctttcccgtgtcatcgataacagagccatcgacggcgatgcctatagccagtgagagcaccaccacgacgacaaccatgacaacgttctctgctccggtcactgcacctcggactcctcataatcaggctgccctggccgcttcctttacaaatttcctcaccgtctctgtacatcagattttatggctccggtcggtctatccgcgagcgacatttttacccgttcgggcttacaactatcccgttcgacagtcccgccatcccaaggtgtgtgactacataaacgacgcctcaattgcagtcggatcagagatcctcaaaggcacgataacggctgtcagcattattctgtcatcatgcccgcacaaatcagcctctcgaacaatatgcctttatctgca

SEQ ID NO: 13894 - DNA, 838 bp, Emericella nidulans
tggcaaataagatcctatctgaattagaaacatataacattcaacttccaaatgagactggatacttactctggatcatccctggctggcacctagccttgatctcctcgtgattaccttttcccataccagcacaaagagcggtagtcttatataaaacaatgaagctggtacgtttgagcataagggcaatattctacttcttcaagctaaaacgtagcgctcttgagttcaaccaagtgcacatgaggagcttgcaagattaaatgtaagcaaaactggatagaacagtgcccggcgatctggtacaaatacacctggaagacacactggaaaccaacatgaaaaacacaacacgcaaaaatatgtacaacacacacacaactagttgtcaatgcgtataaggcactgcgtaagccagtggttttgcaaagccaaaacagataggcagcggcactggtagtgattgagttaacagtctagagtgcatggtaaacaataatgcctgaaggacctacctcctgggatgtcaactgcaaaattcaagctagggatcaaacctgatttttccaacgaggtttgcgaatggtcactggaggcctctcaaccacgcccctgttgaatttagatcagctactaccgtcagtgcataaggagaatctgtcaagactcacaacctggccggagagtttccacgtctgatgtttgctaagctccgctttgcttcaaccttgggcagcccacttgacttgagctctgctacgtcggcatacagtgagcgacaacgagctcgatgagcaatgaccacccactgcatgcaaatctccgcacgtcgagc

SEQ ID NO: 13895 - DNA, 563 bp, Emericella nidulans
  unsure (1)..(563): unsure at all n locations
actgtaataacagaatggccaatctatgtttgcaatgtaacagcttggtttaacccttttgttagaccgtcagatgtggggagtagggagccattaggccatttaatacatgcgtagttctgcatccacgcgcttttgcagaaaatcaggtgttcagttctatgatataacgcttatagttcataggcaaagttggcatataatcacaatactcagcgtacgttcaatcgcgaaatcagaggaacagaatcgnaattggctgcgaggggaatcttaagagaaagcacactcctaatttacaacgacagacaaataatgatcactggacgctctaaagacttccactatctgctggggcgtttcgcgcgtcagtcatcatcatcatttaacaatcagctgacccgtgggtgagcaaacggacgttgtctttatctcttcggagcgggcggcaagctgcgctaggctactccagactgtcgtccgacgggataccctccagcatgccttgggcctggctgaaccaatttgacccgccactggtggtttacaacagacgtgagccc

SEQ ID NO: 13896 - DNA, 859 bp, Emericella nidulans
ggcgccggaaattcccgccggccgcctattcatcgcttctcgcgtcctgcagtgttcctgcttccagttacccgtatacctacactcccttgccaaccgcgacgccaacctcgacgacgccaaccgcgactcccacgcccgcgtgcaatggaaagacgtacgtctcccagcagagcgatacctgcgaaacgatctccaaggccaactccgtgagcaccgatcgcctgatcgaggcaaaccacctagactactcctgttcatccctcacgccgggaacgccgctgtgtatcgaggacacctgcacggtgtacactgtcaaagcaaatcagacctgccaggacattgtccgcgggcagtcgttcgggctcgtgcagctgatcggctggaatccgtgagctttgcctctctggctcccatcgaggcgtctgttttctgacatgctgcaggacgatccaccaaaactgcgacaacctagattcgatggtgggaaggagcatctgcatctcgtaggtctattcatcagccattctggcgtcctgtctgaccttcaagcgaacagaccccccaggggaggctccttcagtatgcccgacagtagcaactcgacctcgaccggtctcgcgtcctccatcgtcacggcctggacccctgcatagtcactgacattgacaaaccttacgaccttgtggtactcgcccacgatcgatcccagctacaaccagtctatcatcacctatacggccaactccacgctgtccagcctgctcgcggagcgaactcagtactgctgggtcaccgacgacgactgggacaatctcttcaacccagacgaccgtgcgcaaatctgcagcaactctac

SEQ ID NO: 13897 - DNA, 1018 bp, Emericella nidulans
cccggaccgactgataaccagccattactggtacctaagaccgacagggggcctaatttgttcgtagacggagagggctcaagaccaatcggacaaaaattcccgagataaggaacaatcccgctggaagagttgctgttgaaatcttatcgaagcggttagaacaaaggatgaaggcgaagaattgagacctcttgcagtccagacctagcatatagcccctatcgaggtcacgtgagctctccgtaacggcgacaacaacgccaagccaacaccaacaaccaaaagtctcaagtcctagcttcaattccttccatcaactaacatcaaataacagccatggacattaaaccgcccctatcctcctactcctcatcacaacatcttcgcccccctccacaccatcgcccctctgcatctccagcctccgcgcaaacccaagcccaatccgcgggcgcgccccgaatccctgcaaaaactaccgccgaccccagcgccgtcatcgccgaacaaacgtacttctgcggcccttactctatctcaattggccgcggcacagtaatccacccgcgcgtgaggatctgcgcaacagagggacccataaggatcggagacggatgcattattagcgagaagagtgttattgggacgtatccgccgccagcagctccagcagattccacgtccagtggcagtggcggcagtggggaggagaaatcgattgtgatctcaaataatgtcatcattggtctgcaggcggtcgttcatccgggcgcaagggtacactcttttgcggtggttgataaccaggctgttattggacggggcgtggatgttggcgggcatgcgaaagtttgtgcgagatgcgagattttccagggtgcgagggtaaaggagtggagtgttgtttggggaggagggaaggggactgggttgaagacgagaatgaaagcgcagaagaaggtcgttagcccgtttgcaatgggggagaaggggtttgagggtgtgttggagggga

SEQ ID NO: 13898 - DNA, 1390 bp, Emericella nidulans
aaaagaaacgccttggtgttcaggacgaaagggatatttctaatacccatggacagtctgaaaacacagatttgttggatcgcttattgggaaagggaaaaacgtctccatcggccaagccgtccattcaggacctcggtgaatgaggtcttaaggcctacgactttcatgcatatattggcgttctagtgaggaccgacagcgtctctcgcataaatgtatactggacgatggtttacattgggtatcttgggcgttttactggtagggaaaaatgcagggttcctcgctgagagaagaatattttctcgttatatttctccttatataaaaaaaatgataataattctatatccaccgataaccagaactcgcctgtatcgtacacaagaccaggctacatccaattgaatgtgaagaatacagtaccaaaggtctagcctgttagcatgcagaaggagaaacttgtatgcactcatttaaggataattaaaaaggtataactcaggtcattccggcgtcaccatcatctacgagatctccttcactcggcaagtccagcctgattcctggctcaggagaggtagactactcaggcgttagtgcaatggaaatcaaagagaggctgaaatacttacctggcaccaagacaccatccaagctcgttgcctttgatctttttcgcaattttgacctctcgcgacaagggcatctcgtaccccgtgtgaaggagaccaagctggaagttcaagtccaaacaccactcaggtcggtcacgtagttccttcagtgcgtctgggattccttcaaagacactccacgcagactcgccagcacatacagtctttgtaaggtcgtgcagttcatctagtgtgaaagagtccggcatgcccaagggctgcgtgcgctcgtagaagtaggaaaagatgtaaacatcttctttagcgaaggtcttttcaagagacggctggtggacaccattgaaggaacacggagctagtgtgcacgcagcatccttgttgaggatcttctccgtcagtccgcggcattgagcggctgtcgaaggagctccctccttagggccaaccattttgactgtgacaccaggcgcgagcgggtggtttgcctgttcaccttcatacttcaacttcacttcacgttccattcccggtccaatgcaagggttagagattggttgcttcagccaagagcgatcgtctgggggcatagacgctaactttgcctcgacaatagccttatgcaccgcatcgcgagcggccatgagaccataaccaagatgtgagtgctggtagagctcaaagtgccgtccaccaaactgaagatcatacttatggtcaccctcagccaggtgctcaggcataccgccgga

SEQ ID NO: 13899 - DNA, 1092 bp, Emericella nidulans
gcggctaatctgatcatcgttaatgtcctataggcacgaaagaccgagtacgagttgttctgcgctgctcgccgtcgcgagctcgcgcatgtacttccacccggctcgggatgcttcgaaagacgattggcacttttatcgtgtccaaaagttgttgcgcttgcttcctggagacgatgaactatccaaacctggggcaacggtgcaacgcatccatgcatttggaggtgctgagaagtgtattcggcgccatttttatcaactgtcaagataccgccaagagctcctatcaaacggctgtctctctatagcctctatcatgcttcagtgcatatatcctatgcttctttcctgctaggagtccagttatgctcatctcccaatatcgccatgcaaaattgtcaaggatgatattgcttctagcagttattgtgaattacccagtacctataatctttctttcgagttaaaagatataatcggcttcgttaagtgtcacagcgtatcttccccagtagtacaactcctggcgatcctcaccgctacgaaaaatggcccccaaagataggggactacaatcttgtacaggatgagcaagggtgttaaatcttgaataatgactaacgcaatcattatgccttgctgatgtacccgtttgctaggcagtcctgcattgaagcatttggtgatctgtgcccgcgtgcagtagtatatatatatttttcgaatgcgtatggacccttaatagttggaatggagtaccctgcgcagcacatgcggaacatactgagacatctaaaagatatggctacagcagctcaaaagctggtcatttatttgtcctatctatttgtcctatctaattgtccgtaatctctactttcattcgcagggattgttgatgcacgcctcctgcaaggtatatccggagattgttacaagatatagccgatgaggggcagatatcgcaattcgtaaatcggatagctgatactaggcgcagaaactcgatatcgacatgtcaagagcagatatttggagtctatagcgcttcctaacctgtcctcatgggaagttctgtaagctagctgc

SEQ ID NO: 13900 - DNA, 2043 bp, Emericella nidulans
ccccggggatttccttgttccaggtgtattgcacaggcgaacattgaaagatagatgcgaagaagacgccaattccgtgacctaatactaggaatccggcggtataagataagatccggaaagtgcgggtttggaagatgcggaggtagaaaagcagaatcgacagttttgccggggttactgtgaacgggaagtccaggatctggtttgcgaagagaccctacaagtcgaaagatacctctctgttagctgtattctgccgcgaatgggttctggcgattggcaaaggggaaagagagtagggaagagactttttgcagcgcaactagtttctcaggtgtttgttgaacatattcgtagtggtatcctagcccggcgaccttgagcactatacatcgaaaatatgcattgtcagtctggatcgttcaattccaatcgtatttaatctcagcaggacccataagtgacaaggtacatacaaacaatatacagccctgattgcccaaggcttgcgatctgcgcagccccatttcttattagcacgacccacagctgtaccagaggggcaatgaccgactaaggcaggaagtatgagatagtcatcaagagtgcatttaatgcgctgaatgtaccgcgtataaaaccggacgggaaccacaattaactggacagccgcaatggcaatcgagacgccaaggagtctgtcgccgcagtacgaggagtccacggtgtccgtattaccagataaactactcatcttgtgtgcgcgatgtaccccacctgcgcctggtcccgatagagtgaaagaagtgattctgggaaagggatgaatgctcacatcgaaacctataagggatgatctcggtcattcccatcttacgtactccaatcccgctatattcctttaatctcacttgatgctcgattccaggttcatggcgtaaagattttgcacacgagtaagctagacaggaggctagacatggatcatgttgatagtgctgactttggctgctggtcagatcagggattgtccctcgggtcagattagtgcccttagtgccttgggcatatattatcgttggtttcactgatactgaacgaagaaaattagtcggattccttctgacgaacctacccctcttcttattttattagatgacattcgctgttattctctcgagctctagacccggattttcgacttcctttccttggtcttcagctgggtgttgcttgatataggcgttccattcgaattgggtcgttgaatatagcaagaaaatgtcgcactacatagagaccgaaattgctgctctaacacagagagtccaatcagatccagaatccctcgatgccgagtcgcgagcaaaagccgtaaaagccgcaagagatctcctaaacgccctcactccacccccagatgatcgtcatccaggatgtagtcctcaacccacctctcctgatggctctccgcgtcggtgtcgatctcgacatatttcaaatcatttgcgaagacgagggcgagggagtgactacacagagcattgctgagaagtctggtgcgagtcttatggttgtcggtatgtttccccgggttatagggctggatttggagacgcgggttacctcagcctatgcagtcgaacgcggttcctagcctcttatgcggtcagtgcaacttgataacgataaataataagaccagattctacggctacttgctacaaagggctacatcctcgaagccggggtacagacttacaaaccctcgcaattgactaaaacaatggcagcacccccatttactgctatgacacgggcatggtgcgctcttatttaaccttccgccacttattcttggattttcactcttctaggctctatttatctgacagaaactacacaacagtttttgatattggcaactacagcacaacctacgcaccggaattcttccggcagaacaagcacggttttcccattttcaccacaaacacgcctttttagtttggcaggatacctccctggactactttgcct

SEQ ID NO: 13901 - DNA, 1467 bp, Emericella nidulans
gtcaccgaaagaaaacgccatgctatgcttcgtttcttcgagaagagaaaggataataaaggacggggtcaaccccaacccattccatcaccaaagcatcaaatcaccgatctttgtagaccttcggcttccacccttctttcaactctttctcatgtgccgctttcctctctgcctccctaacctctgcctctatccgctcgcgcgccctgagaattttgctctgcaggtagaaactgcctcccttctgtggatcgttcaagtcaaaaagtttcttgaaccgctccatcacttgttccagatttgtttcgccggcttgtgggggcttaacgttcaggatcttgcatgcctcatcgagtgtgatgccggaggaggacgaaccaccggcagattttccggtcttctgttgatatttcgaggccgcagaggcttgcttgtatgcttcggcgaaggcgcgaccgaagacacgggcgccggtcacgacgacttgggttacgatgcggtgggcctgatgagtttagtattagaccttgcgcggataaggcgatgcggacggcgatgcggatggagggacagcagagggaatggacagaactggagttgttgcggaagagagtggtgaggttgtcgtaccattttagagaatgagagacttgacccagctaaggatgatgttttaggaagattgcgaggtttgatggtctgcagtgaaaggcgatagacagacggagtctggagcaagaaccaaagggaaaaattcggagcgtgagcggcttcggtcggttctgccaagaccgagaccgaagtacgaataacatacataagagcagtccaaagggtgtgtttatacgtcttgtcgtacttattatggctgtttataatgtgaatcttgaccacagtggcggttacttctcgtctatctcaaatcttacacaacctcccatgatctagaacatggtatacttaggtccaactcggcagatacatcccagatcacatgtccaaagattcagctgcaccgcggatcaactatcgcgatcttctttcccccgcagtccagctctgcgttcatcgtgtgctcgtccggggcttttcttgcgagtacttctcctttccctctccttccttccttcctttcccttcccccttcaccgcccgcgatgaccttgctggttgcatatgacgtctctgttggatggcagcactcggtatgttatgttgacggagtcaaatgcgtcttattacttcacttttatgctagcatcactctggactgctttgcgatgtagcggtcggtactaacggttggtagaagatatcccgtggatagattccatggccccttcaactcacctcaacgaccatgctgactctcagccgccgacggtcgccgctttctcgcccaccaccatatcgggttcgtcgttgaccttagacaacgcttcagcattatcgggcaccggagtc

SEQ ID NO: 13902 - DNA, 1444 bp, Emericella nidulans
  unsure (1)..(1444): unsure at all n locations
tggtgaaatattaaccaacaactagtgttgagttgggagaacttccgtcgaaaaggatttaaattaagggaggggtacttggaagccaatatgtattcttcaaaaaagggggagaacggaaaatcccaacttggccgggaaataataagggttatttcagaaaaaatgtcctgcgcttaaaaccactttggtaggtgccgtgttgcccataggacagctttttggtttaacgcaaacgttgaaggcgaaaaggagaaacgcaatagggtcaaaccattatttcctggaaggcaaaaagcccttgcggccgtgatcgcggcagtactggcggtaccgggttaacgttctgccaagacatggtttcgaagtcaaggcgccattgtttggggacgttggtcttagcgataatgatcgcgccagggaatgcagaattaacactaacggtgcatctttctctaaagggtgcaaagctagagcggcgatgccgactgtcgaatcgacaccgcggatgttgaacgaatccttgactgagaccgggaggcccgtgaagagggccaattggggagccggtgcggcggaggtggtcgtccaattcttgagctcgttggagagcaggctcaaaaaggggctctgttaggcaccgtgtcaattggtgagcgatggcagctctctgggtcgttagctcatgcgtactttagggaaatgtggtggtaccttgcagaatgcttgaatgacctcctttgctgtgaaactctggctgtgaatctgtctaagaagacctgtgatgtcccatctttcggtgatctcgatctcttttggggagagcaagccgcatgaccgagggatatccatcacattgaccctgtcatactgaacatttgtaacagattccgctggggaatgcatcccgggggggatcttgtcttgggcaagacgccattcctgaggaatgcgctcccaaagctggtcttgcttgcgttgggcgatcgaagagtactccattacagatacttgagtgtctgatgtgagtgtaaataagtaagccgtgggcggggaatttatcttgttgtcgatgcggagaacctcggcaggtcataaatcataagtcatttccttagtcatcaatgtatatacaattatacagtcttgtcaaactccaggtgcaacacttctgtcttcctctgccttgtgctctccctggttggcaacaagcgttcgctctcgactctgtcgctgcgccttcattctttctaatagaagctggttccttgcatatctaccagtccgaacccattcttttgcttgacggaggtccttcttggaagatatcttcaatatcattcaggaccaaagccaagcacaccagtggaaatggagatccaaagcccgatttcaacgtatacttggncacatatcccatggtcagttgttctcaaactcgggc

SEQ ID NO: 13903 - DNA, 1553 bp, Emericella nidulans
tcatataacccaataaatcacttaaactcaccccaccgtcggtcaacaatttgagttttttcttctctgcctggctcgcccacgttcagctcttttagaaccttgtgcgccgtcattaaagccttcgaagcctactacctccgcaattatacgcactaggagccgccggcggctaacatttcatgttccagcatttctggtgtaaatgtagcctgggcaccgagcacacggggatgaggcagcagacctgctggtcgagaaaggtacagatactcagcttgagaaaaggctgactctaagaattttatgtctataatcggttgtttgtcggctttagagctatagcagctcttgcgaaggaagggagaggcttcgttactgtatttgcgttggaggcatttaggtaatattttcaactgtgagtctaggagattcgattgcttagagcaattggtatcttaccttattcgcaagtggacagtctagctcgagaactatggggattctatgactgtctgggctaagtaaccgaggaagaaggtataggggtagcttgcgaacccacttcggcactaagaaccgccaggtctccctactcttgaaatgcttttcgttttttttagagatgggaattgaacaagacggaataaacacagggtttctatccgcatttgaggttgattcctacattggatgcgtgcagccatgaatccgaaatccaactacttcttagggacgaggtgaaaggaatacactcccagtttacttaatataaactacaacaaccgactattcatcaacttataacagtaggcactgactcctgaagatcagcgacaagcaacaacggcgtagttgttaatagtcacttcgtgtttcagctgtcatggtggggaaaaagccggcggagactccataaggctgctgtttcagggtgcaggatgggacggatgcggagactggcgaggtgctctcggcttactcgcatacgtcagggccttacatgactgggtggctgcgagagtttaaaagagtgggtagatgaatgctaatgactctatagatacggcactggcactgagtgcaatgaagattgcaccggtacatctttcgaacaaaagtcatcaataccgtgattaccctggctgaagccgattctacgtttagagataccattgcctcggccggtggcgccacctacagcggactgagctcgagcgagggtaggaaggtaaggacgatcgagagcattgttattcctgctatgatctgatctgttctatctccttttgtacataaactgtgctcgttcgcggctaatctgtatactggaggatgtatatattgttcattcaaactgaacttgcgactctggtcttcagctccattcaccccggtcctctttctggaggtagtaaagaccagctaacattagatgcagtctatggcgaatgccagctattgccatctcttctcttacgcatgaacgtgaagccgttcaaaggcaggccaatgcttggcttactgcactccattgaatatacagtttgtaa

SEQ ID NO: 13904 - DNA, 256 bp, Emericella nidulans
tatccatttttgcgtcatacgatcaccagtgtacgctctgcgacctccatgcccacagtacgtttcaagggctcgacggctagggcagcaacgaccggttcgacagtacagcaattcggctggttgtccagtagctatcggttgagcggaatgcagatcctcacacactctctcatcaggggtggctagagttagccaaatctctcgtcagccttggagcgattctatctgatggggaatcgtcgcaatagatgca

SEQ ID NO: 13905 - DNA, 369 bp, Emericella nidulans
taatggccagcttaggctcggcggagctacaacagactttttgtgtttctgctgctggcgtgcctatatcaacatactggtggccggtgtagcggccactcgcctgctgagttcaaggctgaagtcacctgtgctgactcaatgaacctggaggacgatattatggagccgcgatccgattagtacacatattttcattctccccatagtgtgcctagtactctagcttgcgcggggagatccaacacgccccgggccttgtggacggcacatctatacctctggagcacctgccctaagctttatcagggtaccaacgctgcaatcgcctctgaggcaggatgcgacagtctccgtgtacagaggcca

SEQ ID NO: 13906 - DNA, 351 bp, Emericella nidulans
  unsure (1)..(351): unsure at all n locations
taccgatatgggaatattgcctatacatcgacgtgagaccttcctgactctttgtagaataacagggttctcgatttggcgagccacgtacaagaggagcttgcaagatcggtatcttataaagccgatggggtttagagattccttatagcgcattcggctcgtgtacatatgaagggccatgtaaattcgaccttaatcacacaatgtttgattggcgcaataacaagtgaggtggaggctaacaaggatggactggggaggcccacaaggatattcttatcggngcaaggccgatagtgcggtgcatgaagacatctccactgcggggagaaactgtacatattgctc

SEQ ID NO: 13907 - DNA, 898 bp, Emericella nidulans
cgcgcgacctcggagtccgacaggcatccttaccacaacgttctttctttttcgcagaaaccttagcctttgacttttgaattaatggctcttgctctggtccgcgtctgctactgttagccacattgtgccaaagatacagaagatttgaaaacgcacgtcacactccgaacctccacaagaaactcttcggcgctgctgattttctgcgaataaaccctgctgctgctgctgctgctgtgaacatcagagctgagaaggctaaataaattccaacttacaggggaggctgcttaggtctagctctagctttagggattggagcagtttgcgcactcttagcaatatcttcattaggtccctcacagtaagtggctaaaagatcaatcccttactacgagcgggcctgcctgagatttgggacgttaaggaattggtgccagggggccaaacaatttgggggaccggtccgtcagacacaataggtattgttaaaactacactccaggggtttcccgaatcgctttggcgatgacaaatttaatggggaggttatgagaatcttggatatggactccagcccattttattccccataaacacactccctctgagatagtttctccagatacaaccatagactggccccctctccccagtatggaatattgtatatttcacccactctagggagattctctcaaaaggaactaccattaaaactacatttagcattatcattattatactgaactgtttaaaaattatggctcttttatttccaattctcaacttccgtcctttacctactcaactctgggacgcccctttttattatacctccatccaatttttttcttccacttattaacttacacttttctgttatgctacttac

SEQ ID NO: 13908 - DNA, 791 bp, Emericella nidulans
tttccccacagattcatgcgcctgagatatatttctactgattaggcgtcaacttcaatcaatgtatctccaaactccagagtttcccaatgcaatggctcggacaggccgctgacaactccagatattgcagcttcgacaacgagtcagcagaagaatgtgagagccacttagctggcagtcaattatttcatatatatactaaaatatctacacctgctgctcgcccgggaacaatgtcacgctcatagtcaccgatttataccctatcatctaggccatattgtgcttctgcaatacagcagataacaaaccattcactttggatgacccaatttcagttgtcgttgtgagtctttaaatattggtttaactcaagtactgcgacatttatacgtgtctttaggtatctcaatcactgcgatgacgttcatacaagccctgagtgttttcagggcctgaaccgcacggattccagcgctttgcagagactttgacaataaaccatcaataaatggtcaaatactaactctgagctggactaaatgcatgcgctttgaggagtgagaaaatcgtcccatgtcatactcatcgggactttggtgaaagcatttgtgtgcttgtacgcaggatttccggtacgttgcttcgagattgtccaccgtcataattgccatggcgttggtatagatatgcgcggtttgagctttcaaggtggcttccaagatgggtcgtgacgcaatcagcagacgcttatggattgatggaggagcggtccaggtcaagtccga

SEQ ID NO: 13909 - DNA, 1165 bp, Emericella nidulans
acggatccgcatacaggagagactcttgactaggtacccaaccacttatgaccggcgagcattatggattgtttcacgccacatcgaaatgcctatattggattacattgtattcagggctaccttacgaatagaatggctttctctacctatccgacgtcgcggctctctgcgttctacaaaattcgctagatgatgtgtcgaattatttactccgcacaaagttaactttaacttttcaactataccccaaagcgtcgagtccagaccgcactctcttttggggagtgattatggagaaatggagatccgcctcatcgtagattctcctagctgtctgtactttcgacaacaagtctggcccttttttcgagagtttggaacctaccggtacctgtcgatataatgcatggcacggtgccactccgccttactgatctgctggctcagcaggtctcaaaatgacttcactttgttctcatcatgataggtatagagtctgagaccaaggcgatcgagtcttgcaaacagcgctgtaccagccaatcgcatagtcggctctgtacagactatgcacattcctatgctcgtacataaccgcagcgacgggtccaaatatagcttgacttcttgtagaattgatgcgatatctcaatcagggtacgtgtggattgatacattatgaataggacgcctttatcgagaccaggaatactcctgtaattgcgtggctggcagtaactgagtcgaccgtgtctgtgtcagattgtcttgccaaccctctcgcagccgcgtggagcgagccacgaatgtgaggatgtaatgcgtcatcaattcatcgggagtggatagatatcttgtaacctagagcgaatgttgaggcgaagctcactctgaaacgggacatggtcaggcactaggtgtcatgaccataactcaagctggcactgagttcgttgcataataggggtgatcaggccattcgggattaacagggaagttcttgaccattagcagcataccgcgatttgtttttgtttctaagttgaggatacgtgagcgtaggggtttgacgatgaagaccagataataactgagcagtggctgttatctatcgtcacgtgcactgaaagctgtagataagatccatgacgtcaaaaatgcc

SEQ ID NO: 13910 - DNA, 113 bp, Emericella nidulans
gtcaagtgactgtaaatagttcgttctacgcacggatggcttcagctgccctcgcatgcggtgagatcatatcatcatctaactctgcggcatcgatcgggccgtctgcttga

SEQ ID NO: 13911 - DNA, 934 bp, Emericella nidulans
actatcccgtagcaaacgcaggttatatatccccgccataccaaggatcgccagcggcgcgatgtagtcatttacaagaccttctcgtccctgaacggataaagatgccatgacagcctggaaggccaacgtcgcgccacaagagtgtccaacaagaatataccgcttgccgaacctgtatttcctctgtagaaacgagagcgcgagctggatgtcattgatatgttcgggatgcttcgcgttccggagatggctttccattgtcgttgacgcatcttgcgagtgggatgggtgtggactcaattgttacgagatagatgcttgacctttgatgtgatgggactgacactttgaagtctagtatactgtctaggagaggtttcattgggtttgtgcaagatactctttttattttatttttttcttcttttttctattttttttcatttatctttattttcttattcttttcatttattatttactttattttttttattaattttcctctctctttaattatactctttcttattatattttatttcctttttttttctctttattttatattttcattatctatatttaatttatttacattctctttctcttttttttttattcttcttctcactatttatttatttctttttctcttttttaatctcacttcttgcatttttttcctttccctattctttttttttttattattcctcacaatttttcttatcttcattttttcacccatattttttcattattcttatttctttttattttcattttacttattcttcattttatctttattatatatattctctattatctcttctttttatttttccacctttttattcatcttttacttttttattacttcctaatccctctatattacttcattactcttcttcttttatatttt

SEQ ID NO: 13912 - DNA, 605 bp, Emericella nidulans
cccgggggggacagaccaggttgcccattgcgttttagcccccacggataaaggggaccgcgacccccggcaaaagaggggcaatttagaaggcggacgcccaggagccccacaacaggatgaggaaagaccgagcccgagcgcggaggcaacgggcagacagcatagagatacgtggccagggagcaaagggaggacggcggagacgaaaaggccaaaagaccggcgtgagaccaagagaagtcggtcggagacatacagaccgccagtcattcaacaggaccgcgggcagggagagcagggaagagcaccaacgaagtagagcctgcacgacatgccgcacagacccaccaagccgagcacgaggcaggtcccggcgacgtggccatcactgtcaagggaggcaaggaggcccagcgaatcagtgagcctggccaacaaaacaggcgagacaaaggtcaggcaagactacacactgagatgcgccgcatgactacgcccatgccacagaggagacagcaccctccactccagccacagaagcttcgaccgcaagtgcaaggacagacccagcctgtccactgcgccgacccacctggagccat

SEQ ID NO: 13913 - DNA, 443 bp, Emericella nidulans
gatgcactgttggaatttgccgtagtgtctcgggtgccaattgcgctttatcaataccagcacgcatttcgcaatttggatcatgggccccttgcgcgcggccgagtcggtgggagcccgggtcgcttgccggtggtatagactgtgagattggggacaggggctgtttgcacgtagaggcgacttagcttatatggtcagagtgatgactgcaagacagatactgtacgtgccgatttcaatctgcttcgctatgaggctgcacatttaactatgatgttggggtgacgttaaaggctgtgtacaagtgcaccaggctgagtagcctactggtggcatcagctaatacgcacatgctggctctggctaacctggcagctgacgaggaacagaaaggtaggatactgaagtgcttgaagcatcaagcttctgatacaagttga

SEQ ID NO: 13914 - DNA, 1120 bp, Emericella nidulans
ttttctatctatcataactatttgaattggtcagcaatgaaaaaaacaaaaaacagggtgagaagttcaggagtggcaagacatcagttctccaaggtgaaaaagaagtttcttcaaaatgcattcagaagtaacagcaattaaagaaatcatcatcataagggaaagcaggcagaaggaatactcactctattcagtaaatgattaatgctacgctgtttgcgagtccctactgatagtcggcgggtcagcacttgtccgcgacacaggttggtgtacaaagtggttgaatgtcaactaagtcaggctacagaattagcatggttcagaacatgacaattcaagcggactcacctcattaaatcagatttttgtaagtgatgttcattcccagcacagagtgcagggtcaaacagtgtgaataaacagttcatcatatgatgttgactaaacggtgcaatggagaaagacgaagacaatacctatccaggccagtcagcatcatccatagtcaaatcctgaatatccatgaatggttcgccaaaactcaggtgacgaattctcaacaagcaatacacctcccagcacccgcaaagtttgtacgcttcgctttcatggatgaagagggatgcactattatgtccgcccgttcgttcaaggtatcttcattgaggaatgggagtgaaaaaaaagttgatgtttacctaacaaacggattagtcaaagctcgatcaccaagactgagtcgagtaaagcagtgagaaattttgtggtcagacaaggctgaaacttagaataagacagattccacatggtatattaagtttgaggaatgcctatagcgtgtcgaagaatcatcataccagggagggttaagggagggaagaagaaaaaaagcatcgcttaccttttacaaaatgtgatgatcaagtattagtcgtcgtacaagtttagggaaacctgtacacgcgagatattagcaacggatacagcagacgccgactatatcaattgcagttgtcttcatgagtcagagtaattctagagtctttgaaaagatcttcatgtatttcggacgtggatatcctgaaggaattcattcatgaaacaagccatgcag

SEQ ID NO: 13915 - DNA, 255 bp, Emericella nidulans
ttttatttaatatttagctagattaaaaatcttattagagttaaatagaataagtctagtacttataaagttattctaaataatttctacttaaaaaatatttttataagtttataaaaaagtttttaagaaattaagtttattaatatagttaatttctaaatatattttctgtttaactaagctcttttatacctactttaaaagtaaaatataatctatatttaaagattaaaatttataagaatatatata

SEQ ID NO: 13916 - DNA, 604 bp, Emericella nidulans
gtttcacggcgcatcaagtctgtggatctctgcgcaaatgacggatgctctccttgctatacgtaaaaacgctaaagccggggatttagtccaggatccgctgagactacaggagcttagctcagcttagagttaggaacagccagactagtaggggtaggttccgtcctggatctagcagactcaggaccactctgctcgttagggagggctatagagaacgagcagcgcaccggtctgaatcctgaggggctcccccgtacttaggacagagtgtatagcttctggtagacttaggcaggccttaggcttagttgcaggtacaggggatagatgctatagtgaaggtcttaatggtcgatagtaccgacactgaactacgcgcttactatggcgggtactaccgatgacacacgtggaaaggttattgtggcgtccccgttctagtttaaagaattcgcagcttgataatcttgtcccggtatctttaccgaagaaggtctacttgccttcggcgcagaacgccaggcagtagaaggtgaagtcccctcacgttgcccggacgcgctaaactaggtctgggcacttattctatccgtaagct

SEQ ID NO: 13917 - DNA, 1592 bp, Emericella nidulans
ccatccgtctaaggttgacctataacgggctatataatcgaacaatcctaaccagctgctgatggtcctcgccttcctttcggtgtccagagaatctactgcggtttgaacagattccatcaatacctctgcgattcttcttcgacgtccgtcaggttcgactgcaatcgccgtacggaatgcctcggacagcacatcatcaactgctctcttgccatctaaagcatcaggatggttttcaacatggttctctttctgcacacgccagccagcccgagatgcggcttccttaatagtcggggtatgtagggagagagtgttactctcctgtatacctcgggcaagatgatcgatggagtacttcatggcggatagacagatgctctgggactcgcaaactctgttaccctctctgatatatactgttgtgccgcgatatttccgaatagataaaacggcctctatttatttttggctgataaggagtgtgttgacaggaaacgtaacttacggagttgatgctgccggcttcttcagtagctttgcagccgcgtttttctgcagatattgatggattgctgcggggtgaaggaaatacttgggtttactgcctgtctgtccattcactggagtctggtcggtgcaacagaaagcgttcgcagaaatggggcggagggaggcttgcatgacttacaccgaaaccgacacatattgtgcataatcaagtcggacaacggatattggcgttcttagagaatatggttgctcacatacctcgccgagaacgttgttgggcctgactactcccaatgctcctcctgctttctgaccggaaccggcatcacccaactgaaaaatagtcacggtgaaagagcaagattagggaagtgtcctgaaacggccgatttattgctgctgaacatcttgtcttcccatctactccttcaatgagatttcaaatgctacttaattcagactcagcgcccccgaccagagaagatgactctgatccataccattattgaacaccctttcgcatctattcgcaggtatctttcacatgttgcaacactcaaaagtcgaggggattacaaatttgacggaaaatgctctggtgagtcagtactccttggaatgttgcaaaattccagctgatgcggtggactttcctctctttcatggttcagtcaagtcatgatcgagatgacgatgtccctgtccaatttaatcctacgtaagcagattagatgacaggacattccactcactataaacaactgacggtcaagttgtagcgagtttggtatgacagaggaagatttggaggcggcaaagcataggattgacgaagtgtcggattcccaagtcagagaagtatgtagatgcgaatggcatgttggcagccacagattttttatatctttctgctgcaattgctaacctcgtccaggttgtccagaacgtattgcaatttcacagaaacgatttcaatttcccctctgcgattctgcaccggttttctgagttttcccgaactccagaagttagccagtcagacaggccagaaactgtccttctgcgggcacaggtcc

SEQ ID NO: 13918 - DNA, 474 bp, Emericella nidulans
tgggtcacccccgctgaaggcccaatacaagaagacggtttcaacgccagatgggaggactcgcaccatgtcctgatctatgctgagtacagcaatgctgccctgactcggtcaggctgccacaatgtgccacggacgatagtactgttgtgagcaccggttatcgaaacagccttactgtcacatgaacagtgatcaccgatagtcaaccaatggatgtctgggtttctcccgaatgacgccacagctccaaaataccacactggctgacatggaaagctctcaggtgtgtgctctcatacactgccgatggcacgccaggcatggtgacgcgaacacaacctgccaccgagagccaccttagatgcgccagatgcacaacattcctgggcgaggactgaccagacatgggagaaccacacacatgacatgattaggtatatcaattgaaaacatggacactcaaggcttccg

SEQ ID NO: 13919 - DNA, 884 bp, Emericella nidulans
gctcagcttgtactttctcctcctgttcctttgcctcgtcgttttgcgcatcttgactgggctcttgttgctctagtttctcctgagcttcttcaggttgttcctgcctatcggtctctggctggtcctcttgtgcattgcgcgcatcgaattcctccacttctcgtgcgattgtggcctcggcttcccggacctgatcctgtataatatcttcctcttcaggccgcagctgccatggtttatagtactatagaaccagttagaaaatcaaaaagacgattcggtatgatgaccataccaatgcaggcgatcgctttgtttttaaagagtgagccatcgccaaaaggttctcgtggcgagtaagcatctaaaaaaccgagtatacattagcaagtcgtcagcagtcaggcgtagttgagactcaccatctccttctcgtatgacttctgctcctttttgcgcgtagcaaccgctcctcccaccttttcttcttcagctccccatactcctcatcttgcagctttagcttatcctgctgcttccgctcaatatcagctctccgccgttgcgccgcagaattggatgtctgtgagagcgttcctagcagagaaccgaataaccgctgtccacgtttcctttcctcatctcggcggttgcgttttcgttctgtgtcctgaacttctagtttcggcgacgattgtctgcgcgctggaggttcttctgaatcttggtcatcgttctgggtgctgagacggcgacgcttgatgtccgactcgagatcagtagttgaggattgtcttcgcttgagtcctgattctggagaggggacgtgattttcttgttccggaacaatcactgcagaagctagcgtgctaaagcaaagc

SEQ ID NO: 13920 - DNA, 800 bp, Emericella nidulans
accgctctttgacagcgtgttccatgtcacgaatagagggtatttctgctcgctcagacgctgtcgatgcccggctggtgtgtcggactgtgaagatatagagctggatgtagtagcgctcgagaaaatcgagcttgatgatatgttagacatcgctgacggtgttgtggatacgctagagtcagatgccgcttggttttggaggcggtcgatactcgggagctttatagtctgagggcgagaggtggtctgccttgaatcctcactatcgtttacaggctgctgagggggagtgtcgtcctcccctggggctagcgagtcgtagtcttgcagctcagaaagtttcttgcactgctcgtatctttcccataactcctcaacagcagcaaggctaatagggtcgttcccctcgtacgaagcagccaggctctcgaagcaataaaagcaatgtgccggagttgccatggttcgaaataggtacaaagacgccgaaaccactcgattgcaataactctctgtttgtgactgaaatggccgctttatatacgttctggaggtgcatgtatgtcacccacatcacaccgtggctccaccaccaccaccctggctgggaccggactaaggcccaggtagatccgaaagaagtgcagtctataaggatctcgagccgctagaagtaggattgactttcaagttaaccacgtctagcagcgcagcgcacctctcgaagtttatcagtactagaaccgtggtggggtggaaagaggggagaaggaggttgaaagacggtcgaggcggga

SEQ ID NO: 13921 - DNA, 1133 bp, Emericella nidulans
gtaaagagaaaattaataatgaaagataaaaagttgtaagatcaagacgaagaaatctattgaaaatattttagaaaatagagtcgaaacatatgatataggctatatttaagaaatatatagagccaaacacaaaaaagcatacatagggaaattccggttaacttttccaaggtagattcaatgatccaaatatagttttgtaggcataaagatggagataaattatcaatttatcaagtcatgtctgacaagcttctagtaagatgattgtcttgacgaaagcctaagtatataagagtgagtgtaagtataaggactgataaaaaaatgctttgctccctctacctgtcgagctttattagtggctagagccaccagacaactccaaaggacagtactgcccaaacgaattcaactttaaaggcactgttacggaattagcatattgcgcaaaacaggagcgtggagtggccctacacctgccaaccatagtggtccacaatgtaccctccgccaacggcacccaaaagttgacctaaggggttgatgccgtgccacgccgacctggtcttttcactgcatatatctgtgcaagtacatcagtagaagtagagacgttgagaaaaaaggagatatttaccgttcaagatagtattgagcatcaagggcatgcctgctgtacctagccctgcaattgatcgagccgcaactatgaaccaaaaatctggcgccaggctggtgaaagggtcagaacgcaagcagtaaaggacaggagcagcgattgaccaaccactgacaaccaatgcctatgatataaagaaaatgcgccaggagcataatttgcttgcgtccatgttgatccgaaaggcggctatactgttagtaacaggtcagtatgggcgtccgttaggtcaattcagcatgtgagcataaaaaaagcaatactcacgactgactgtccgaatataacgccgacttggtaggcaatcatcccccagggaacgtcatccaggtgcccgaactgtgagcctattgatgttattgttcgttctttgcggcgtttatttgggattttggctgactacctaacgttggaaaagacgcgagtatgaaagcgctatcagccgacg

SEQ ID NO: 13922 - DNA, 682 bp, Emericella nidulans
aggctagcgctggccatgaccggcttctatgcagacaagaaccgcgccactttcgaggatactccgtgcggagagagaacggttctatcagtctctgtgggaccagggaggacttgccttctggtttgggaactactcggacctgctgacttcgcgcgaagccaacttggaggcgtacaatttctggcggaagaccgtccaccgtcgagtagcggacaaggctacggcagagaaactggcaccagcaaagccaccccatgcattcgggaccaaacggccgtcgctggagacctcctacttcgagacattcaacctgccgaacgtcgacctggtagacgtcaacgaggaccccatcgtcgagatcacgcccgagggggtccagaccgccaccaaactccatgcccttgacctccttgtctatgccaccggcttcgacgccttgaccggcagcgctctagcgatcgatatcatcggtgtcaacggcatgcggctgggttccaagtgggatacgcggatcgatggtaatggagtgtcgaccgcgctgggcatgatgacgggagggttccccaacctattctttcccatgggaccgcaagcacccaccgcgcttggtacaaacccacagctggctgagatccagggcgaatggattgcgaattgcagcgatcgcgctactggcagg

SEQ ID NO: 13923 - DNA, 711 bp, Emericella nidulans
catggatggtaagtaggcctggcgaatcattgacccttgctaacttcaccagccgacacaaacctctggcaagactacttcactgagattcgacgcctgcactacgcccatcccaccacgtcaaaccgcaccctctactcttgccccataatcttcgaccgcaattccaatgacagccctattctggtccgctgcgccgaccttctttggagctttgccgggctttcgaccatgtaccccggctcaacagtatcgattccaacgtccgtatattcgctcccactcactctcgcatccaccgttggtggctgggacagcgatcccacctccatcggcgaggatatgcatatgatgctcaagtgctatttcgaaacgaacggcgaccttgtctcgcaggtggttcacgccccggccagccagtgcaatgtctccagcgagatcaccagaccaggactgcgccggaagctggatacctgtgttgcgcggtaccggcaggcattacggcatatgtggggggctctagacacggggtttgcggcaagaaacacccttcgctcggtaaagtctagtgactggcgctgtctgcttctcagaccaagacatcttggtctcatgcatctcctctgggaagcgcatttccttccttgtcactttacagtccttctaaacttctccatgatctatgagcaaaagcgcccggtggccgtcccc

SEQ ID NO: 13924 - DNA, 1481 bp, Emericella nidulans
ccagatatagtcggttgagtcaccctccagtttgaagcaggcttgacgtcgcacccaggaatgagccccatcgcaaccgacgaggaacttggccttgaccaactccacttgaccgtcgcgactactgtcggctgttgctgccctgatgagatcgtctgtgtcgtcggccaccaggttgcttcggaagagtccatcatcaacaacagcgcgctgtccatcggcagacttttggtgctgctgccgctgctgtggcgtggcttccttgtcagacaaggtgcgcagcgtcacactaatgggatagtcatcgaagtccgctgctttggcctcgtcaatttcaaaggagacaggcaggacgccgcgctctaccgtcagattactgtgctccttcattgaatcaagaaaaaatcgctcgatacggccctggtgcaggaccacctgttggaagcgactgatttgaggaatggtatcaggaatccggtcggatcgtcgaatacgaccgttctcgtccggattccagaggcatatctcaatcatatgattcgactctcgccaggcgcggtgtgcaaagccaaaagagtcgaaaatctcgagagtgcgacactgcaagccgtctgcttgcccgttgaagacctacagcgtagcagtcagtcgtcgtcccgctctcaggtgattacagtagggtcatgttatgttccagatcagcctcacctttgtcccacgcttgtcaacaatgcgtgtcttgataccgcagcggcttagccacgtcgacagcataaggcccgcagggcctgcgccaacgatgaggacatcgacatggtcttcgtgggtggggacggttccaggcatgataggttgggaccagtctgagataggtaattcgtaggaatagctaaatatgagagggaaaaggtatagtctgttaaaggcgtgatccctttaaattccttagttcaaagagtacggtgaattgggctgcgaaggctcaaatccacagtcccttcggggcgcgggaatcgagatctggagtaactgacagtcgtcgaactctgaaggaaccagtcaatcttatatcagttaatactttacttcagctgatcgtatacctcagttgaccctatactgtccacagttctttccgcggggtaaacgggtaagcgtggggtaaggttccgactccctttcggaagcccgaaagtcttcggatcggatggggtcccggggttcatcaacaaggcaacaggccgaatccaagactcctaattcgttaattcgaacgaggactgataggcgcccgcagcttggcatatgggtattccgaagtgcagatctggatcagctccggcctcagcagccacactctcttttcggctcaaagttatcggactcagtgaggattgcaccggatgatcggagctctgcagagcgaccattttcgactagtgtcagaccttcactggcaataactgggaaataagagagag

SEQ ID NO: 13925 - DNA, 1473 bp, Emericella nidulans
actcagagcttcagttgatgtgctggctattgtgccgtcctggctgggttattactctctatgacggtccctttttctcgcgcttgagtgcatgcgcgaggacacgttttgcacgattaaacgaaagaacccccacgattagaatcatgattagatccgggatatgtaaagttactggataatgaacagcacatgatcaacttgaccatcttctcatattgtttgtaactactatagtgctcgtcaaggatggaagcggacaccttcccaacgtctaaccacgccttcgatatactactaaactgagttggaaaacaatttacacacctctgagacctaaagcttgccatgataatgtataaaggacaaataagaaacatctatgtaagagttatgcggcccatatacgtcggatggcagccaggagtttcttacgcagagacggaaatatacatacaaggggttaatctcaaaagcacgtggcgcacaagaaaaagcgctatacgagcggtagcacgtctataatcatatatcattctcgtagaatcctattctatcctttttataaatggacatttttagatcgttacaacttccgcaaggaaggcattcacagagttttctcgatcatttcaataccatactcctccttgagggtcttctggataggttcgcagatgtcccaagtcatgggagcaagaacaccagtctggttaatagtgccatcaaggaccagcttcacagcaacaccacaggggatgccaacaagcttggccatggcagagtaaccaccagggacaccgtactcgcagagcgtgctggtgcggacctccttggagccatccttatgttcgatgccgaacttgtgctggagcatgacgaggtcccgctcctcggggccatactgcatcttctgctcgagggtggcgcagagggtgtcgagcgggttgccgcggggggtgatcttctcgtcggagaaaatcccaatccagcggagaccggagatgatacggtcacgctcgtcattgttggggaaggtggtcttggaagagatggcccactcgaggtctttctcatcggatgaggtcgcgccaaggatcttctgggtggcctccttccaggcgatcggggtgctgaggtaagtctgaggctcgtcactcaggaagcccatgtccacaaggaccttgatgaattcggggaagccctgatagcggagagtgccgcgctcgagggtctgagcctcggggatgttgtagcgctcacggaaaggggtagagtcgcggttagggtaggcgacgaaagcaaagccggggtaaatgtagtagggcttggcggcagccatgagctcggggccggcaatgcttttttcttgaccgtcctggtagaacttggcggcgttacggaaggcaaggaggactccacggctggcccaggagaacttgagcccagagggttgtttagcaccgggacggg

SEQ ID NO: 13926 - DNA, 1115 bp, Emericella nidulans
cgtctataacctaactaatattgtttgcggcgcttagtgatcagccccattaactcttggtactccggggtatgcgactgataattatactgagctatctgcacgccaataatgggcatctggcacagagtaatattgtgcggaataataaagtcctttggagcatcactcttccgtaagaatgtcgtgtaataatatgtaaatcttctagcttgtaagggttgagacgtgccaggagagccacgtgatacgctaagtctaaaaatggacaagatccattctgtgctggaaattacgcctctcgagagatcctggtgtaacaactgatgcatcgactttggatcagtccatcaattccgacacggttcttcatcattctcgcgcggcgtgataaaaacactgtcggttctcaaaatccatttttctttattctctggactcattggatctagtcctatacctgcttagtgggggggagttaactacgctgtcaagcagctctgcggcgacagagacggagtccgccttgcctgattgcggtctctcccaaccaccgtaagcatcgagtccgatctctactctctacaaacatcgctatttcttgctgtgcgcattgctagcaggtgagtaagctgttacttctgctttattccatattttgtcttttccgttcctccttttttcgcggttgtatcactttcgccgctctggctgcatactcagatctacgcttggcagcggcatctcccagccctcccgccttgttccgggcaggttattccggcccgaacaagcgatttccgcccagcagaaaggaagagggaatcaagcagcgcccaagtctccaagtcctggaagtcggtctgagtctctgagaacttgaccttgacttaccactcttcttcaggcaccgggcctgatatccacgccctccgattctccttctccttattgcacaactcctgcactgcctctcccatttcattgaactcttgctgcttttctaagatccaccctatacctgatccttgacggtcgcctactttaccaccccaccgcccccctttttctcttggttgccctgatctcgtcaggttgttcatcactttgcttta

SEQ ID NO: 13927 - DNA, 557 bp, Emericella nidulans
tttcacggcgcatcaagtctgtggatctctgcgcaaataacagcctaccccgcttactcactataatgtagccagtatacatcaagccggcgacggaatgtgaatccgccggtgttagtatgctaatcacttagacgcgaccacaactggcagagacagatttagaccggatcagtaacgatagtgctaccttgacacgactgatttggacctactggacagggttcatacgatgatgctagtaaaaaatgtgatacaccgatcgcgttatctaacacgccacggaggaatccgggttgagaccgtacatggaatcttcgcgtgtaatactgcgcaaccggccccggatctgcccaacgccctggcgtcattggatggcgaactagtcgggtgtcatagtgcggatgcgccggacctcggataattcattcaactccacaaattagttgattaagcctagtcaccgataggaatgaccttactgtggtaccccactcccgctcggatgaattcggttatactaactgtatacgcttacaatgaaaaaaagcaacacg

SEQ ID NO: 13928 - DNA, 1371 bp, Emericella nidulans
agaatgagtttgaaccttgctgcatcgaggtcgggagcgcattccccaggttttggcctggtgttccggttatggacccattgcgaaactctagttttcccaaaggcatagcatcgaccgaggaccaggatagacatgaggacaaaatatcctcgagttcagtgctggatttcttcatcagccgcgggttccggatgcgtcctgatccgccgcgttcggtggatctgtatcgagatatccgcactttcagccttactgaaatggggcacgatcgtgattatgggcaacgggctcgtgaggcagggtatacattctccccgcttcaggaagccgggtatgacgaatgtctagctggtcagagcaggaactttgcggacaatccggtttgaatccacactttctgatccacgaatatactccttaaccaagggctataggactgggtcgacatctaccgtaaactaaacccggtctctcacccgtactctatcatgacggccttcgatgccaatggtgcccaagccggctggacactaatgcttccgccctcatcgagtatcttgcagtccaactgggttatgccctctgtttgtggtccaaatacaggcctgataggctgcgttggtattgacaaaggccatcgcaagtcgggcgtgggaattgcactcgtggcacacgcgttacaagatatgaagagtcgagggatcgagggcgtttttgtggattgggtcagtgttgaaggattttacgagaaagtcggttttcatatctgggcccgttaccggacgggcgaaattggctagactcttcatcagtctatccaagctcccatacacgggcaccatatcaagttataatgcataacacgcatactgcttaacactcgcgcaagaacaaagatgcatgccgtcattactaacaaacatagagtgctggtgagagtatcaaacctatatcccatctatttcagaggcgtacttacctggcgcttgcttagtgataatgaatttatgttttcgtaatcaagtagcctgtagtaagagaagaagaagaggagggggaggaattcagatggaagaaaacatacgaggaccaggctcgaagctggcacgcccgggcgatttgctggaggggtatgctggattctaggttcgagcatagagttggcccgtgtctagtgcgaaacagaagtaaagtgtcaggttaaagattcgatatggttatttccagcatccaagctgattatatatccagcacagtgagaagcgccttcctgcctcccaatcaaaaacaggcattcgttttcaaccctaatcacatgctgatcttaatccaaatttggattagcgtataacaggcacatagcaacgg

SEQ ID NO: 13929 - DNA, 439 bp, Emericella nidulans
tttcacggcgcatcaagtctgtggatctctgcgcaaattgcctatacataaatagcatgacacttgataaaagtaaagtaaagaataagcaataccgggcttcccaaggataaaaagggctaacgtaacagatatggttcttctcattattctccttattctcatattcgaaaacgtcgatcctacacgtctccctaattagagtgcgagcgtgttcagtaggtttggaccaacccggattggtcaattgccgatggacaccagatgcagaattgggtttcgcatgaagctcacggacggcacccgtcatgtaaggatccggtggacgttgatctttatcgtgctgtctgggtcactgtcgttgagccacgaaaatttgattacactatacgtactaaagtcgcgtcaatgcgcgtatctgcatagctcacgtcactct

SEQ ID NO: 13930 - DNA, 873 bp, Emericella nidulans
accgggaggggatatactgggagatctcgagacgctgcgatgtcggtcagggcatgccagcagtacacgatttttacatgcgagagcctgagaggtcgacttgcgagttccgagtctgccaacattctctggcccgcagggaacaaccggggaacttcccggcagctatttcacctgatggggctcatgtacgtcgactgcagaataactgcgattttctggtcctgagcggcggagatcgcgatcagctgctttgttcgctgtcctaacatacatacgaccaggcgccctgtccatgacgtaccactttcgccccagacgccaaggtcgatggttgactgaaacagtttatggttttctatgcctctgacaacaggcaggctgagcagatggcggcgcgatcgagtcttgatagtatggtctccactgccaccgagcactgttttagtggacaggagatctacaccggacgttacacggctggcacgtcaacggtgtacggtgtagggaaccttgaagggttcagtgcaccaatgaggaaccattactgctgagggagtccataagaaggttgagcaccgttgtgtatgccggcgcaattatggggcaaaccgttcaaggcaaccgctagtctaattcccgaaaagcgcccgtaagaaggtccaagttgatagaggtttgttttgaggaattttgaatttaagaattaaaacatttgttattttttatggctgggaccggcccagggggcccttctaaaaactgagagaaggttttctttttaacccccaaaagaaggcccgtcctgctccaaagagggtgtatatgtgaaggcctcccaccccccacccgagggggtgtttaaaaaaaaat

SEQ ID NO: 13931 - DNA, 534 bp, Emericella nidulans
gggcggcccggaggcgctgtgacatgatgtcccatacttagaggccaggcctgttgttagccgacagcgcaatcaacggatctagggtgtctagagccaaagataggacaagagcctcagattgatctatcaaggatctgtactggagcaccaatcggccgcatgagagcatgattaatatgctgcacccactgaatcttcgattgcttacacaccaggcagccgccgagatgcggatgtgaggcggccgcccgcggagacaacacccgaggagtgggtgcatggtgcagcgcacaatagacagtgaggtagagctgcttatagaccaggggttaatccacgagacgaaataggagctatgtgtgtcgccaggagtcaagcggaccgctaccacgatagggtgacatggggcctgctctgagctgtaccacgccacaggggatatggtgagcactcgaccaaacggcatgggctgcactaatagggaatctggcgagagggcatgatggatgacacacagttattaggatactg

SEQ ID NO: 13932 - DNA, 2185 bp, Emericella nidulans
tctaaacattatatacccccaaagtttaagactcccgagagtttaaaaaacctaaaaggtgaacaatcaggtttgccggacacctgggcccaccaagggcccaaagtccgcgcccccccctttttaaaacccccaggtaaccgaccgggaaattttgggagaagcccttaacccccccggggtgcgccgaaaaccaggccaggttaaaatttccaaaaggatggtcaagtatgtacgggacctgcttaaaaagatccgagtccggaaagcctggatccccgggactttttctacggctaaactcgccgtcggaaaggtatcgagcttctgcatgccccagggataagttatcgcgtgaaaaagtccggcacgtctctctccaggagagactgaactatctcgtaaaggttgatcagaggggcagattccgttgggccagagtcacggagctagtatggactaccaatagtctgtacgagggcggtccagacggcatctcgcctattcgcgctgtcagtcctccgggaaagggtagtagggatgccaggtcaagcctgaaattaggccactgttcggcaccagagtccttgctgtacaaggagacgcaagtttcagataccgaatctgatcctgctcacggcctctcgagtcgcaggcggcagattatcaacagtatcaaagataaactctttggcaaggacgactggtggatcttcgtgcgttcccaccaagccgaaaagtaatgtatggacgtgactgactcgaccaggttgccgacccttcttatcgcttatatatcggtatcaaacagcgaggttctttccagcactcgtcgtttctccgcgggggccggatagctgctgctgggctgatcaagatccgggggggaaaactgcgagatctggctccgctgaggtacgtcagcgtcgggtattattctatttcagaatgctaacagatgcagtggtcactatcggccccgttcatctaatttccatgcttttgtccaagcgctgcgagatcagggcgcggacctatctcatgtatccatcactaagctctatgccactttagccgggatggaaggatatgtcggcactaagcggaatatgattcgaacgcgagagaagttggagcggaaaatacattgcgcggggaaaagcgatgacccattaacagtggacttgtgacggttgttttggagacgaagacgtgatttctgtatgtctgatgccatcccggtcatgccagaacggcatcgcaattccgatcgcatcatcgccgaaaatagtgttggagaagggtacaaaaggatgtcgacccctccatcgatgtcatcagtcatcatcgtcagtgacaatcaagatgcctaccgagttcatcagcctcacctttcctaccccgtctacggagatcgacccgatccccaatgccgccattgacccggcattcctggagcgctatgctcgcaatctagatgattactcttacaactatacccttgtcccttatgattcctcttatttcgatccttggactgtcggcgcgaccatcgcctcacacacgaaaaacctcaaaatcatcatcgcggtgcggcccaacaccctttatccgactgtggccgccaaagccctagcgactctggatcagcttagctccggccgtgccgttgtccattttatcgccggtggcagtgatgccgaacaggccagggagggcgacttcctcaccaaagaccagcgctatggccgactggaggattatatcaaaatcctacgccgggcctgggagtctgccgacccattcgactgggagagcccctactacacatttaaggatttcagcaaccgggttcgtccggtgaacggcaccattcctgtctcagtcggtggatcatctgacgaagcctatcgcattggtggctcactcgcggacatcttcggtctttggggagagcccctgaaggagactaaggagcaaatcgaccgcatctatgctgaagcggagaaagcagaccgtactgacctgccgcgcatgtgggtgaccttccctcctatagtggccgagacggacgagctggcctgtgccaagcacaccgcacccttgatgccctacagaaaaaccctgcccctggtcttggtaggcgcctgctatgcacctctcttagacgtcggctccaacgttg

SEQ ID NO: 13933 - DNA, 274 bp, Emericella nidulans
  unsure (1)..(274): unsure at all n locations
agcgcgacggcacacgaaagcgcacgttaccgaggccagagagcatggactatcacaggaggcgacagcgggcagngacacgaggcgttaagcacatggagggctgatgcacagagggccacgacccaactgcacaagagcgaggacgaccagctcacaccagagccgacaacagagaaccgcctgccgcaaacggggagtgacatgcgacgggcacagggactgggaccaaaaaatcgagacagccaccgaggcaatcaaaaagatacgagca

SEQ ID NO: 13934 - DNA, 1475 bp, Emericella nidulans
accctgacatgaccactttcgtatgcgtctgtattgcagagttcttgtctctgtacgagactgagcgcatgatccaggagctgacaagctaccaaattgacacacatgctattgtagtcaaccagcttcttttccctaagcagggcagtgactgtgagcaatgcaatgcacgcagaaagatgcagaagaagtacctggagcagattgaggagctctatgaagacttcaacgttgtcaggatgccgttgctcgttgaagaggtccgagggaaggagaagctcgagaagtaagttaatttcttcgcatacattgtcactactttgctaatcctcctgatcagattcagcgacatgctcatcaacccttatgtgcctccaaactaagcgtgtgttaatgataagttcggttcaaatttgatatcgttgtttggcatgagttatgagaacgagatagacagtaatatacaatcattctgatgcgttgctatctcattttgcctgactgtccgtcaagggcttgaaactccgcctcatcagtggtcaaccatgttgtccttctactactatgcttactttgtttcttttttactggccgttgaaatttcgccacagcgccttgttctcgccttcataaggctgcatgtttcgtatcagcggtcacacagtcactcttctgaaagtcccttacgaccaacccaagaacgctcgaggcaagcttctttctgcgacaaaccaagtcatcttcggtcgcttgggtatgctttgtatgattctgcaaatccctccgttactgggcaaaagctccgatctcaattgtcggaagctgagcattttaacggtgcactgtcgtcacctcgagaaaaccttctatagccggcaaaatattgttctccgcgtgtcaccaattacaatcctcaacttgggaaatctttgtcacagcagccactttgccttttagtttattcaacgacgcagttccacaagcgatcgtctagctgcctcgttggtccgagcttgaccgtaaggacatggcattgcgatactgctccacaatgaaagcagcctagcttttggattctgactcctgatcgtccataaggctaattcggtctccaagacaagtccagattgtgaaatatgccgatcgacctccgaaacagggcctagactattactccgagactttgtcgaagtccgacgatgaaagtcatattcgtatttagaaacagcagacgcgtctttaaggggttccttcatcgctactcgtggccacctatacctgttcgccgtgtggtcattgcatacagactacttcattacgattatgcagcggcagagactaacgacaaataccaaagagtcaactgcgctgttggtcatcttgccggggagcttagccattgtggagtaagctagcctggataatattgcgaagtgggctgggaaagcccaatacaagacagcacaaatgcgaat

SEQ ID NO: 13935 - DNA, 1080 bp, Emericella nidulans
aatactgatagggctataaccagcgcgctctgaagatctctaccggaaaggccggtaaagatttcacgtttattggcgatgatactgtcatcgcttctctagataaaaccggccgcctccgcttttgggatatccgcgaggttgtcaataccccggatgctgagatcaagtcaaatgaaattcgtaccccgttgagcaccttcgtgactggtactcctacggagaagtcatggccgacgtccgtcctctttctcgataagctgcgcccttatgtgaagtcgatggctctccgttatgttcttgttggcttgaagcagaaccacaccctgcagctctgggatattgggctaggcaaggctgtgcaggagctcaagtttccccacgagaacgagtcggacgccatttgcagtgttgcttatcacccttcgtccggaattcttgttgttggacacccgacgcgaaactctatttacttcgttcacctgtcggcgcccaggtataatctgcagtccatgtcgcaggcgtcattcatcaaacgtgctgctgaaaaggacaacagtctccccaaacctgagtctactgcgtgcctgagtggtatacgggagatctcctttgcttcgaaaggtcagcttcgcagcttagatctccttcctatcacaaaggcggcaggggaagacagcggcctatttgagctttatgttatgcattcccgcggtgtcacatgccttaacatcaagaaagaggaccttggtttgggtcaagacaaccgaatcattcgccctgtcaatgccctagaggagggcttgattgagattgctgatctgcagtctttccctccctacattgccgatgatttttcagtcaacggcgattctataagcacgcccacgaaggtcatcccgaaggaatttgtcaaggccacggctgaacctgctgctgagagtagcgtgggtacaagccccgggcccaatgttcagcgcacacaatcccccacgaagactgccccaaagaagaaggccgacgaggctgtagaaacagttgcgacacctttcgagaagcctgatagaagagaaaaagaag

SEQ ID NO: 13936 - DNA, 542 bp, Emericella nidulans
  unsure (1)..(542): unsure at all n locations
ccattgactaatgccggccagcttgcacacacaggaagccgagttcataccaagacagtcatagtcgacgggatacagctatccgaccatagactgcgcttatctatatgggccctatacacgcgcgaacattctcaatacgacaaccgctcgactcggaaatctccctgcgctaactaaggcccacgaccagatacaaggataccatgaccaatacaacgcctgatcgaaccaaaagggcatatgctaccaacgccggactatcaccatgcatgacgtaccctggagggctacgtcacactgacttcataagggagacatantaacccacaccactgcatactggggacatgctgatctgatgcacaatgccgcgtgactggcaaccattgagctggagtatggactagatcagaacacatactggagtaacgacctgaaactgctatcttcgctacgtgaggcaacccgttactgcatgtcaagatctgaacaaccagggttacctgttatgaggaccacgcacattgacactactgtta

SEQ ID NO: 13937 - DNA, 893 bp, Emericella nidulans
tctgcatctgacatggacgccagctgttgccgattctgttcctcaatagccgctttctcatcttgtaaacccggtgttgatttcggtaaatctgctgccgaagctttcgattgtgtttgtcgctgtttgaaagttgattgtctgggagtgcgccggcgatgggcaggaaagccattggcagacttgagagtgggaggtgcgggcggtgcggcgggcgaacgttcctggatctcgccaatgacaccaggaatcccaagtgtcggggcttgatcttcagagtcagagccgagatcgatctcaaagcgttctccgtgaaatgccattgtccaccatggagagcctaaaatggagtgctgaagatgaaattatgcaactttcgagaattcaaatcggccaggccgcggcggtcgagagcgggagacgctaagaggaaatattgttgagtcagccatgcggctcaaaagttaaacacttgttactagtccatgatggtactagtagatcatgtgaccatatctcccaaacaggacaagcgtgcgggatcagatgatcggccatgaagaaatcggagttctgcatcactagatcccagttcatcttcaccctatccaggcaatacatgttctggactgcagactactatttttatttgtaggataaacctagccagctgctactgccgtccgcctcgtattggaagtggatgagctctatcccataatgacaaccgaagcatcggcggtcgccaaacatggttttaaacatacacatgatattcgggttcttgtcaccaaagttgaacatcaaataagaagctcagcccggtaatgatagagacacgtcaactcctttgtgttgcttttcgctcttgaaacctcgcatttgtttgctcc

SEQ ID NO: 13938 - DNA, 1560 bp, Emericella nidulans
cttatcgaaatcaatacgactcactatagggagacccaagcttaggagcctttatgggccagacaagatggcaagaaggtcgatacaccaatgctaaaacgctacaccaagaggccgtcgacgggctaataaggctcaaggggatagacaacgaagataccctaacggccacgggcaatctcggtcgtaccaaggccaaattctacgagaacctcgatgaagcaaagtcactactcaagcgagcatcacacggcatgagcaaggtactcgggacaacgcatgtgaagactttgatcgtgcaagaggacctcgccctgcttgcggcgcagatggaagaagagctatgtgagccattggagacggtgcaacaagtgctcgacattcgaacgaaaaaggtaggtaaggaatacccatacacgcttctatccctggcaagattagcatgaatcacaaatgcccttggtcaacacaccaaggcggaagatatcctacgcagctgactctctattgcagagcgcaacctcggcgacagtacataaggacccttatggcgaaagtcttactaggaacactcctcaccaaccaatctagatttgccgaggctgaatcaacactccttgatgtgatggaaaagcgacggccacatttcttcttataggggagactttcatccagtccggctgggtgcgatgattgagcttgcgaaatgttataagcttccgggaagacttaatgagagcattcaatactgcgacgaggctattaagggtttgcaaaagatcaatgcgacgcagcatccgctagagagagaactgagggcccagaaagaagagatggttgcgatgagagaacaggaaggctgatgttgagcctaacaaatggatatcttgcgctttcgccataccaagttattgctgccagaaggtttgctccggatcagtttgccttcttgtgaagttgtattagtgaacgctggttcggagaaaacagaatggacactcggatcatacaagagagcatatacccaacataactttcctccagggtggtacgaatcatcttcaagtttgttaacggagtccagagagtcggctgactaaaacctaaagcagaaccagcgtcccagacatggctgcgtggatgagaaggaggcccgtttggtggccaaaacacggtgtatcatgatctgtttaacggaacgcctctttagcatactggatatcatagtcgagagagtccatagatatggagagatcatggttaccacaagccccaggacaaacggcattagcgcggtgaacatatagctttagagagcacgtcggtgtagaaatttaaatctgggtagggtccaaacaggcattttcatgattgcaacaacgggactttacttggcagtaccgcgaatatcaaacgaagaaccccgtaatcagctattatacagcaatagaattctgtcacgggcggtctcccgtaaccctagggatgagcttgatacgtcatctaatattgtacgctgcaattagtggctgaacggaggaaaatgggcataactggttc

SEQ ID NO: 13939 - DNA, 1511 bp, Emericella nidulans
  unsure (1)..(1511): unsure at all n locations
agtacgaactacataagtcctgctcacggtgtaaagatggcaactaccatctttgtctcgggtgctatcggcatggtcgaggatgtttggagtggaagggttttgagacatctccactcgctgagttttcgaaattgaaggtgttatcggcaattccgccaacacaactacaagagtctcaacacgtcctacactcatataagtacttgcggcctcccgagacagctcttcgattcgtgcgagatggaaaggaaatgatcagtgataatcccactcgcagactacaacaaggcctattttgcgacatctgcgagtcttccgcgaacgagctcctatggtcctgcaaccaatgcaatcaaggagactggggtttctgcaacaagtgtgtcaataaaggaaaatgctgcacacacccgctgcttccaatttgccgtatgaataacgcccctgaaggtcaatccaccgcgagcagcagcgtaagtgagtttagtgttttgactataactactcgatgtaacgcctgcacctgccaaatccccacctcgacgctccgatttcactgcttccgatgcgccgatggggactacgatctttgtgccaactgttacctgaaatatgtcgcggcgtcgaaaatccgcaaagaggacgggctcaacggatggcgccgctgtctcaagggccaccgcatgattgtcgtcggattcgaagactgccccgagggccagcgtcgagttatcgcccgcaatctcgtcggcggtcacgctctgaaggacaaatatatcccttcaacgccctcctcggttcaagccgtctccagtccctccggatcgttcacaacagagagcccgaccactataggcgactggagttggaaagaaggatccgagccccccaaagaaagcgtcccgtgtgcggtctgcatggaacaacgatcgtgaccgcacccccgtctctgaactaggtgcctcttcctcactcaactccaaccagtcacaaagccccagcacaggcaccctatcctcgcgcctcttcccaccggacggtggtgttggcctcattgtccatgcaatgtggtcctggtacccggaggaaggcgttgacgacgaactcatgttcccccgtggtgcggagatcaccgaagtggagaatatcaatgatgattggtactggggctgctatgcgggaatgacggggttattccctgggtctcacgtctcggtaattggggagattgtctgatatgtagattggggtctgcggagatgtcacatattccgttgattttcgctgtctcccgcttgttcttctcgcatctatgtacggcaactctgcatggcaaatattcccacgatgactccacgagttatactgtatctgcttaatgcgatttgctcataatgactngacacgacctgacatgacataatctttcatatgcgcttgcttgaacactgcccattgttgcttcatcacttttccgtttaaatttttgcaattaccacttacctttt

SEQ ID NO: 13940 - DNA, 1355 bp, Emericella nidulans
cctaccgttttataggtacctccgctgggagctgcagcttctgccgggctgcgcatttcatcaatctgttctcatttcagcaacaagcgaatcctttccgttgccgcttgcttctgcctatccctctcaagtcgtcgcctgtacttaatcaatcttattaatattaatttccaggtcgaatctgtgtcggcttctgcttgaatcattgtgggtgcccctcacttgaagtccagcatgcatgcgagctagagccgctaacagctgacagtctaattgtgttcaaccgccgggcaggtcaatacccattttcatggccgaagacgatgctgagaaggccttctttgaggcccaggccatgaatgctggctcgatgggttataacggcgctgaagatcagaatgcgaatgcgtcggactctgatgaatatgatccctcaagcacacttcaagaccagtatcctgctccctcagaaaaccttcaactccaagaaacagacactcccacttcagtttcacaaccccagccatcctttcgcgaagacgcggaccctgctggcaatgcccacccatctcagccaccttcacgacccgagtctcaggcttcgacgtcagtaccggctaccggtgtctctgttcagccgaaaaccagaactatcggtgggtttgtggttgaggatgaggatgaggatgatgcgggggatgcggattatgagccgccagctgtactaggtgtcgaggacatgaatattataccttcgcagcccattccaggaaatgcaaatgaagctacttctacccctgatgtatcattggatgaagctgcgcaggaatctgccagcgcgaagaatgttcctaatagttctctctcttctgtttctctcgcttttaagaatgatgggtccatggatctaggccagaacctgtacaactcacgtacttctttgcagcctgagattgcacgagaaagcgctacagccactccggcaccggactctccttctaccgcgaagggtcgcctgccccatgatcgagttggaatattggaagacaggattcgggaagatcctcgaggtgacatccctgcctggctcgagttgattaacgagcacaggagtcgcaatagaattgatagtgctcgggatgtatatgaaaggttcctgaaggtgtttcccttatctgtaagtcaacctcataccacacccacggcaattactgatctatgcaggccgaaatgtgggtagcatacgcgactatggaatctgaactcaacgagttgttccgccttgagcagatcttcaataggacgcttcttaccattccggcatgtcaactgtggacggtatatctggactacgt

SEQ ID NO: 13941 - DNA, 459 bp, Emericella nidulans
  unsure (1)..(459): unsure at all n locations
cctgtactaaaaaatcgactgcaccaactgtaccgagggcgtcatgtcgacaaactgactgagctcctggtcgacctccacgtgcggagatggctattgtatatgctaatgcacacagcgaggggagagaattatgaagataaccgtaagagaggagtgaacgtagcacgactcattatccaaaggtgctgcgcgagagatgtgggatagtgtggaatgacacatggttgtacgttcatcgatctttatactaaccatgcgcttgatacggtactagttcctactagatttatcacatcgaccaaggatacacgcctcctgttgaacactgacgaatgctatatagggatacgcgatgattaaatacatccactcacaganatacaataccaagcgattcaactcagacgacactgactgtttttacaggtagcagatactgcatgtaacctgtatatc

SEQ ID NO: 13942 - DNA, 1786 bp, Emericella nidulans
aattgcccccaacccactgctggatctctgtgtcttgcactctctggcatcctggcgtcagtttcagaaaacagcccacaacttcgccgtacttctcgtccttgattcctactacactcgcttccgtgatggagtcatgggcaaccaggcggtcctcaatctctcttgggaatatgttctctcctcctggtaagataattagctagtagctctacttagtttcttgtatgctcaccgcggattatcagatctttgatacgcccagtgatgtggccatatcctccttcatcaatcatcacctcgtcgccagtatgcatccaaagcatgccattcgcgtcgtatttcatcacttccctcgttttctcctcattcttccagtatcccttctgcagcgcatagccaccaacacataactcccctctctgcccctgaggaacaatcttcccctgtttatccaccaccttcgcaaccgtatgtggcataacgcgcccaattgtagagatccgcttgttctcaggatcatccagcgaggtaataaaatttaccggactcgtctccgtcatgccgtaggcgatcagcattttgtcgacacccatgcgtgcccggatctcattcatgagagtttgagagactggtgagcccgatgccagtcccgtacgcagtcgacgtggcttctggcctgtcttagtgaggatttccagctcggatatgaacattgtcggtacgcctaggaaaaccgtcgcgtcctcagccattagagcttcgacaacgcaacttgcattgaagtgatccgaagggtttatgatcgaggcaccgtagcaaaacgatgcgaggaaacccatgacaagaccgaaacaatggaataggggtggaccgcagcagacgacgtcggacggagtcaggcgcatggcattgcccacgaagcgtgcattgttgagaatgtttctgtcttgttaataccagccttgcaaagagaatggggaacatacatgtttgtcaacatcgctgcctttggtaagccggtcgttcctgtacataatgtcagcttggggggacttatcaatcagaaggcgcgtaccggatgtgaactggagattgagaacatcttctggcgcaagcgatgcttgtgcctggaacagtgccttctccacatcccctgagggtttcggtcgcagaaacttgctgtatgtgtgcaaaatctcgctagcagggcttagcttttctgttctcaagaggacaatatactgcaattccgacaatgtaggattcttcgagcttcgatcctgaagattttcaacatgccccatcagacttcgcgtcccgatttttggcgcaataaacacggtcttgcaagctttaggtataccaccattagttcgtaggtttagaaaagcagcgtggatatgggatcgtacagctgcataaacccgttttcttaactcatccgggtttccgtgtggttagaacaacccccggccccaaatttgcccccaccaagaagatcttgtttactcgggtgtgttccgcactaccccattgttttccgggggagacccacatttaatagtttttacaacccttttctttgggggggatataaagagcttttttcccttacaaaaagcccccccctgtgtttgaccccttgccgacattctttatatttttacccctggggttttttcccccaaataatctccatttttttgcggggtgtatatttttttatcatcccctcctttgtctcttttttccctttctaaagatgattttcccttcctctttc

SEQ ID NO: 13943 - DNA, 282 bp, Emericella nidulans
cggggcacgaggcgcagaagccagttgccggagcaagaactttgcttacccgccagaacaggggccagacggaggtgtttaacagtggacggctacatgcaccagtagagcgccagacaccatacgcataggaggaaggacgagcaaaactaccgcgcaccgacattgaggtcaggccgacgcgaacgggagagaacagacgagaccatcaaggtccgtatccatatatacagatggcgcagtagccaatcatatatgacgagcgaacatagcgaacgaaag

SEQ ID NO: 13944 - DNA, 1283 bp, Emericella nidulans
agttggtcatccagtttgtggccgtggcgacagcggcgcccttattccgcataggaagcgaattgatctcagttgggtagagccacggaacacctagcatacccattccaaaagagatgaagtagaggaagaagaatgcaatcgaggccgaggcgatcttttctttgtcagggcttgtctccgcgtaccgcagcaggatggtgatgacgaggaatgaaaagccctgcccggcagtagagaagagcatcagccctcttcggccccagcgttcgaccaacggcacggcaaggcaggtgaagagcagatacgatactgaattgcacgcagataaaagccgggccatactctccgacaagccgaccgcgttgatgagaatgagcggcatgtagtaggacatgatgttgattccttcgaattgctgcatgaactgtgtgccggcgcccaggaggagccgtcgaaggcttttggtatcgttagttccctttttgcgaaggaagagttcggtccaggtaggcgcattctcccgttcgtactggacactgaagcgaatctcattgcgctgcgtcaggatataggaatcagttacgggcttgtcctcaatcgcggccagtatctctactgcttctttttcacggccctgttccatgagccatctaaagatcgtcagccttggttccaagaaagaaacagacactctaatacacgcgtacctaggtgactcgggaagccaggggaccgttgcaaagagaatgacaatgaagacaaattggaaggcgatagggaaccgccatgccaccgcgcctccacggaacgagagcccatagttgatccaattcaccaaagagaagccggcgatgttcattaccagctcgaagatgaccaacttccctctccacttgtggtgcgcggtttcggtctgccagacaggggccgtcgtggtattgataccgtttcctatactggaccccagaatctcagtattagacggttttgaactcgagggaggcataaatagcatacccaaggacgatccgaccaacaaacatctgggcgagactgtatgagctcgccttgataatagttccaattgccatgatcgtcgttcccagcaaaatagccttcttccgcccaagccgctcgccacatgtaaaggcagcaatcgcgccaaagaaacagccaatatcgtaaattgcggtcactgtcgaaagcacttgggttcttgagggtccgactaggtcgtggagctcgagaaagcctggtactgtacctcgctgggacgttat

SEQ ID NO: 13945 - DNA, 587 bp, Emericella nidulans
  unsure (1)..(587): unsure at all n locations
gggcgagctggggccgagggggggccaaaattcagaagactgggtttttgccccccccattaaggcatagccgggcggacccttcataactacgtgttgggaacatggaggtggagacacattgggccatggacttgcgtgatatactctgaggggctttgttagacggcagccccagttgggtctgaccaatatgcccatcagctgcgaggccagaatgctgccagggatgactgcggtcaaaacgccccctacatacatcgtatatacggcgacaggggctgttgtggggacctcataggaggcaaccctcgttccctatttcagctcgctcactgccaccatggtttgtatgagttagcagactctagctgtatatacggagagacttagcctgagaacacaggtcaataccctgccacatgatggttcggtcactcttaactgcgcggacaggctaggcaggtgtatggtgacctactacatgcggnatattaggacaggagcatttcattgccactctgtagccagagatgcatcatccgcggacaccatatattcaacatacggcaaagttgcacagtggc

SEQ ID NO: 13946 - DNA, 428 bp, Emericella nidulans
actgcgcgtcggacattaactcaattacgggagtggtcggcgcttctttgctacacgcgttccccctgttattgtagcgcgcgtacatgctaaaacctctaacgtcatcaggggcctgtttttgccatacactaccattgcctctagccgctccttcccctttgatgccagctgaccgaatactctggccttgctctttaaagggctcagtctaatttgtgacctatatacttcagacggatgaatacaccaactaccatgcgggcatgcgccaccatgcaaatgatcaagagagagctgtcagggtgccattgcttcttttgcctcatcctagggaggctgcacgtgcggagataactcaatccgcacgctccacgcctggtgcagtccatactgatacggctctattttgagccttgcaaccatac

SEQ ID NO: 13947 - DNA, 581 bp, Emericella nidulans
tgagactggaggcatccgtgcctactactacggtgcatgcgatgtcgtgctcagacgcgtacagaacgtaatcgtattgcggacggacatgaattatgaccttgcagtgccccgcggaagccgcgagtgactggccagggaccatccggtagagttatgcatcaccaaccataccgtggatcatagtgggactgctctgaccatggagcgcaaagccagaactaccggtgtccaacagttaggaaacagagccttaccacagatagaggctacgcaccaagatgccacgctgacctaacaccagatgttacaaccatgacgaggaaacctgcaaccttctacagggaagagcacagcacagagacaaagacgctatatctcttgagcaacagttgtggatcctcaacgtgatacaacacaatgcccggagactgcacacacattgacgattatagaccaactgccgctacagacagccacgcatagctcagaaggggctagctcgttgcatcgtcgctcttgcataaaaagcgactccgccaagaagactgacatactgcagatggtctaagcagaactgt

SEQ ID NO: 13948 - DNA, 1139 bp, Emericella nidulans
ttcttttccaaattttttttttttccaaaattggggaaaaaatttttttaaaaaaaaaaaggcccccaccggaaaaaattgggggggccccaaaagggggtgggggcccaaaaaaaggtttacccgaaaccttttttaaaggtgttataaactagagttcaaacagtgcataattttacagctgcagtcgcagctcatttgtgagagaccgttgggagagtatactagggctggaacgttgcctttggaatcttattccactacaaagcactggtctacaacgggtaccttcctccgaatatcgttctacgtctgaccagaaaattggcgagtatcaccaaaacaagaaaggtgcaagggaggagaccaatatcggtaaattctatgaaaagactattcaacttgattgactggccatccccctttggagacccagaagagttcagcattaaaagattgctagaggtgatcacgggaaacgacaaggacctcggcgaaggggctagcgaagcagaggctctctttcagcccgctccgcaccttgcacatattcatcgagttgttgtgaccccttcccgcataaccttgcatggcccagagacggagcctctgaatcgaatccttcgacgctttccgaaccatcacgagtactttatccgcgtgcagttctgcgatgagaacggggaggatatctacttcaatcctcgaattaacaacagtttaatctttgcgaggtttaagaacgtgttcgcaaatggctttcagattgctggccgcacttacactttcctggggttctctcattcatcgctgaggtctcgctcagcctgggtaagctacctatctcgtctctccctataccggctccgctattcctcgacgtcgttgaagaatctgtaactgacccgctagttctctgcgcctttcatcgacgacgacgggagcctccagagttatttcacaattattaaggccattggaaggttctcggagataacttcccctgctcgttgcgcacgcagaattggacaggccttctcggaaaccccatttgccgtgaatctgaaggaaaacgggatcagtgtattgcgaataccagacgtacaagtcggtggacgggtcttcagcgacggtgttgg

SEQ ID NO: 13949 - DNA, 526 bp, Emericella nidulans
gggcgagatagcctaggccatgataggcctcagcgtggccatctaggcgcatctcaccttttgaacagtggccctcaatgctagctgcaccatgctgtgcacgtactggtttgtttaactctctaatacggccgtgggggtatcaatcgataccatcatcgactaccagctttttgagagcacagctcagaccgttacacacgaactgagcatacactctgaatacgttcgattggaccacggaacccatacgccatatgaccaatggcaagccactggttgaaagagaaagctctgcttattgtcctaaacatcagtgataagcccgtaacagctcaaaggcaggcattgcatgtcaaaagtatctcgtacacgcatccgaggcgtacatccacacgagtaagcagagcgcgctgaattctcacgatgcgtaagaccgtcttgccatacaaatgcgttactgtgaatgaacaaacgcttatagcgccttgcacactttacgcagttatgtcagactagcgcttaa

SEQ ID NO: 13950 - DNA, 751 bp, Emericella nidulans
acggcgaccaggcgctgcgaagactctcgaagtcgccgctggtgacaagatcacctttgaatggcaccacaattcccgcgattcttccgacgacatcatcgccgactcccacacgggccctgtcctcgtctacatggcccccacggaggccggctctgcgggcaagaactgggtcaagatctacgaggacggatacaacgatggtacatgggctgtcgacactctcatcgcaaacaagggcaagcactcggtgaccgtccccgacgtgccggccggtaactacctcttccgccctgagatcattgccctgcatgagggcaaccgcgagggaggcgcgcagctctacatggagtgcgtccagttcaaggtcacctctgacggtaccactcagctgccggagggtgtcagtctgccgggtgcctacactgccaccgacgagggaattctcttcgacatctacagctcctttgactcctaccccatccctggcccggccgtttgggacggcgcttcgtctggctctggctcttctggctctggctccagctccagtgctgccgctacatccagcgctgagaagactgctacctccaccactgccgctgccacaaccaccgctgttgcgacgtccacctcgtctgccactcaggtccaacccacctccgtggcgaccttcaccaccagcgtccgacccaccacctccgctgcccccactacgtctgccccgacttcctctgccgcccctaccggc

SEQ ID NO: 13951 - DNA, 1215 bp, Emericella nidulans
  unsure (1)..(1215): unsure at all n locations
tgatgtcgtggtcatctccgcaccgcattccggctgagaagtggcgacgatatccgcccctgtccaacctaggcttaacgctgtaccccctgggttacaaagcgttccggatctgatctggatgttcttgatgctcgctagcctttcgacttctgatttaccgatccacatgccccgactgtttcgcaagttgaaagcaagaatcggaccctgtgaagaggcatcgtcgtagctagagttaggcgacatatacagctgacagactttcgttccgttgtagtgcttcaacgcattcatccggtcacgcagtcgcttggctaggaaacgcgtatgggaagcgacgttctccatagacctaaacagccgaccatgtgtctcaaatgccgaatccagagcgattatgctgtgaaacgggagtgtcccatcttccaagctctgatggatggaagattgctttttcgcatgccacggattcccgtccgtcagaaccatgtctaccgtgccacccccaaaaaacttccggtgcttgaacacatctccagaacttttgcggacgatcaacgcaccgaggtcaggaaacccgaatattttgtagaagctgagtactgtaaaatccggggcggccgctattttgcttaaatcaatggnagatgttgagacgaaggatgccgcatcaagaagcgtgtagatcatgttgtctgcattttccttttgcgcacgtatctgctcgcaccatcgcattggaacacgacgcccattcatgttcgactgcgcagggtacgcaaataacccaagtgattcttctctccgagaccccagtcccgaaatccaggaatccacctcgtcttcatttacgaagcacctggatcccatctttgcaagctcccgcactccaaccaggctcgtatgagcatccacataatacccgtaccagaacccttgcggcgaattttgcaaagcgtctgcaaccaatttaatcccggcagtagcatttgccacgaaaacaaggtcaaactcgtccgggtccgcattaaagaaacgaagtgcccgaaggcgaatatcgtccacgcgctgtgccgagagctgggacgaagcagacatggaatgcggatttccatacagattccccgtcaaatcacggccgaacgagtggatcaaggagttcgcataaagcgtagttcctgcatgatccctatagtagtcgtattatcgccc

SEQ ID NO: 13952 - DNA, 1770 bp, Emericella nidulans
cgatgagccttcaacctgtgtcagctaacgttgcagctaatgaagacaactgtttcgtgagagcgcttagacggatatccatcaactacagcgagtcctacttacttactttgaaatgctcatcatgctgaggaagaggtttcaagaagcgaaccttgactatacctggtacctactggtacgtcaggactcgcgagggctgatgcgcagtagattatggtcttagtcactggaatctcatcgaccatcccgtataaaggccaagtctaagcaatgccaaggcagccaagacgggcaatcatgaagcaattcggctatcccacgataggacgcctgcctcgtattcccccacagtgtacatataaaacagccgcaccccacgatcgtcgtgcatcattcaatcataatctctcctggtctagaggccagttccctcaagcaaagatgcacagacccccaccttggtctctcgtcctcgctcttgtcctcctttccccagccctcagcagcgaggacataaactatgatcctgccacaaactaccgtccagaaaacgtcaccggtcttgattactactactatccatgggttggctcgtatgtttcactctccgccttgcaaatccctctaacaaaacagttactacaacggcacggcaacattcacaatctcaggcctgtccatccggtcaaggtcctacgatgaagatgaagaccaagagctttgtacccagctacagaactacacgtacacactctcctatccagctctgctggcaatcacagagacggagcctgaagatgaacggccggaaaacacaaacccagtaaatgtgattttgtcaacctcatacagcaatttcacgaaatactttaatgattacatggactcgagcaatatgcagataagggacgagccgtgggtctttgaaagcatagatgtttcgtaagtcgtacttgctgcctattctacaagcaccagggtcagaaggaattgctaatatacgtgtgcgacaatagtcgccgcatgtatggatatgaaactaccgatcccaatttcaatttatccatggttgagtccaccggggctgatacgccctaccgcgtcaccggatcatcctcgggtgaagacaattctctccaaggactccagacgaatatgagttcctgcagcaagatagaggattggtggggggtgacattctactcagggatcgtgatgccggcgctgcagctaacgtttgatgcgcacgcggcgagtttcatgctcgcgtctggtgctgtgatgaatacattgggtactagcaatagcgacgacgacatgccgcagctggctggtcggattgcggtggagtttctgggaaggatagacgaggcaaggtcagatgttttggtgtctccagggagtgagggagaacccaggtggcttcggacagtgggctttgggaacaactcggcgaatctggattacagtcttgagtctgcggcttcgaacccggtaacgactgggagtgctttaattggtgtgctgggagtggtgggatacctgcttttgtaggctgataaacatttcttgccaggttcatcgattagaccatctataacggcctctgtagggttagctcaactcagatctagctagcaattatgtcttcttcacattaagcaagacccctgcgcagaccctttcaccttcttcttgccttcccacgcctgcttcctaataacctttcatatccttctaaatacccgacacattcgcctccctgtg

SEQ ID NO: 13953 - DNA, 1237 bp, Emericella nidulans
aagtacctcctaacgtaaattcatcatatcgcgttggtggttctgtggatatactaaaaagacattacacaaatcggtagcaccgatagccttataaacttagctgaacccaaaaacaggaacttgacgccaatcccaaattactttcatggtaaaaacgacgcaagtaagacatcattccttccctaagaatccatccgtcgactgcgagtgaaccatatcatcaattattccacttgactgtatactctgcacatcagtagttgatgaaggccggtcaatttcaacgggctctgcgtcaagcgcctctgcatatgtaaaacgaccagctctagcctcagctgcctcaatggcatcccattcgtcttcgcttttcaggtccgagagctcactgatgtacaaggacctatcgtcagggtccacctcagaaggttgagcgctgactttctgttttttgctctctggctggccttcaaaagtgggctcctttgtcggcgggtcaggaagcgagatcgcaagcacacttggtgatgacggagctacattatggggcacttcaatattggcgcctgcatcttctgaccttgttcccgcttttcctgactttgtggctgcatctgccactgcgtccccgccctgagaatgttctgcaggaggaaagaaaagcctagtccaatcagtaaacaaaaacgacactcggtcttgagtactcacggtatcaactgttcataagcctctacatctttgagctcaaagttgcagaatatgactcgttccagaaggcccgtgttcttgtcggtttccagaaacttgcgcgtctcgtcaagagcagccttggccgcatctcttgacgggtacccgtatattcccgtgctgatcgcattaaaggcaatgctcttcatctcgttctcaacagccacctcaagacaccgccgatagcagctccgcagcagtctttccggctcgtcttttccccgccgcatcgcatcgctgtatatcggtccgacggtgtggatgattcgtttgttgggcaggttgtatgcatttgttatcttagcatctcctgtatcgcagccatttagtgtcctgcattccttgagcaagtcgggaccagcagctttatggatggcgtaatcaacgccaccgcctccgaggagcgagcgcttggctgcgttgacgaagaagtcaacaccttgaagcttcgttatatcatggcggaccattgcggctgtatcat

SEQ ID NO: 13954 - DNA, 551 bp, Emericella nidulans
caaaccgacccaaacggaccgactccggatgcacgaggctcatattttaccaccacatccataaagacccggtcactgccactggctcgacgcagggaaaaacatgcctccagcaatgggccaacaggggggaaagaaagcaaaccgaggacggacaggcggcaaacacaccaagcgacggccggaagacacacctgaaccgtgaataacccactagctaggcaaaaggaccaaaccctgaaccagcacggagagcggaagagccagccggcaggggaccacatccaactgcatacccaggatgagaggcaagggaaagacaagggacaaatagcgcgaaacagcctgatctacctcgaaagtgcccgctaatacggacaacagtgtcggctggacacacaatgaacatgatccacaagcacacatagacagcgcactactggcaaaaaccgcttgtgaggcacgcgagcacgttcagcacaaccgtctgggaagcggacaggacgttgctcataacggccacgtacagcatgctcctaagcgcaggccag

SEQ ID NO: 13955 - DNA, 833 bp, Emericella nidulans
gcatcagctgatcccgctcatattgtgcacgagcattcaggttctccctttctagttcagcaagtcgaccttgtgtctggctctgatattgttcgcgcataagttgttcctgagcaagacgctgttgctccgcttgtaaacgttgttgttcctcaaaatcacgctgggcttgctgctgcgcaagtaattgttggcgttgctgctcctcccactgctgctgaagacgcagctgctcggcttcaaattcctcctgttgccggcgagcttcggtgctccagaaatcattaatgggctccggctcagcggccacagatttcggtggaggagatggcgctgcctcaacctccttcgtgggccgcttcggcaaggctggtcgttcttcttcgtctccgagtaagtttggtggatcctgggggagttttggaatagtaatcaagctggtcaggtaacgcaagttcgaacactcatagtagaatcggaccaagcggtgatgttgagcatcgtagcgtccatgtagaggcgaaagtgcatcagcgtcgccagtggctggataacaaaactgtgatcagtagaagagtacaaaatgatacggagaaacctacctgtgtgcatcgccctcaacatgctggtgatgaatttataaatcccgtagctttcttgcacaagaggaaccaacgccgagatccggcactcattgtgagttcctgactggaagtgcgagaaaataagtttctgaaaagcatcaatctgatcttgtagacccataaggtcagtgatggtctcatagctagctcgacgttagttgaaatagcaatgaagaaagtgatatacca

SEQ ID NO: 13956 - DNA, 572 bp, Emericella nidulans
ggccacgagcgaggagtcgattttggggaagaccccgcctataggacgcgagtgccgcagcatactccttatgcaaggtaataccgtggtggagagactccaggacctcctcggacgcagaccacaggatactatggaggaggtgcctccggctgacagcaatgggccgcctccggctgcgaccgccaggcgtctgtgccacagcaacctgtgccaccaggaacccagactgcatacagtacgagctcggagccgggtatgggatcaccgcatgacccggaaacggctggcgggacgacgcatataagaggaacgggaataaggggagaagagagatggcagacacaacaagaaaaatcccggtcgggcagaccagaacggtggggcatcagcgccagagcggcaactgccaagcgggccagaagacgcaatgccacagactgcattcggttgattacaaccgggatggacgaaccccttgcatgaacactcgatatgaaggccgaagaggaatgcagaaccaagatgagagccgtactgaggggctgatgcacaattctatacagaaggat

SEQ ID NO: 13957 - DNA, 597 bp, Emericella nidulans
ctggcggagcgttcttggaccagtgccgcgtcattggtgccggcagaccacaagatcaagactagtgcacacctagccggatgcatacgatgcgagacatgcatagctcagcctgtcggggcacatgactctatcatgcgacgagtggggctgaatccagacatgatgatagacactcacaccatcactacaggtgtgcacgagcagacttcacaatagggtgaacaagagaagaattgctcgaagatgatgatgctgccagcaacggcagaccccatggcgtgcacctcatagactagggatagcgaatcttcagtactgatgacacgcatgaaaggaacataagctgacggtaaaagagactagatggtgacactacaagagtaagtgcatcatggaattcacagtctatgccagctgacttgctaccacatcaaacgtaccatgcggcaatagaacactgagagctctgcgagctatccaagatcatttctgctgcatatggagatgcaatgcggcgtagagcagtccaggtgcaaggtgataatgagccacagtgccgtctgcagctgagcatatgagcgagcacgagacgct

SEQ ID NO: 13958 - DNA, 1075 bp, Emericella nidulans
agggcgagtcggatataggctcggatgcactaaagctagaggaaacgaaaaagaaaaatatcgatatgatagacttggatagacttgcgcaagagtttgccgaggctttacctgaaggtcggttcagtcttgcagaggtacagggcttcctcctgcaatataagaggcagccagaagcggcttgcgcccgtgctgcggagtgggcaaccgacaatagtaactagccagtggtggcaatattggtatagatcagacatattagcttgtaagcgcggtggtcgttttacacatcatgactgtgcgtaacgaacgatagccatgcaagggtttttacatcttgggctgttgcaaatgaataatataacaaactcagacctggatagcttccagctcgtcagtatgtttaaagggcgaaacagaaccacgccagtatctcccctgccccccagctggcccaggagacgtctaggacaaaagagcctctatgaggcctttcaccgcttatccggttccttcgcagggttgatatattcctgacagtattcatccatttcaaaataacgtcgacaatttcgtcgaagaggccaattcgtccaacgagcatttaaagaaacagtaggcgtttggtcatctgctctgatcagtgcttccatgaattgggcgaagaactaatgtcctatttacggatacttgctctttacgtctgttccaagatccatctgcattatcatggtgctgcctcttagggctagatctccacgtcatggaacccaatgccgtgacgcaagacaacgtcatgaacagaaccctgaaactggccatataattgccgaaacacccactactttcgaataatcagcctcataaattccgcagtgcatatctaaaagtaagaacccacacaatgaaaatcgcaatcaccggcgcccgcggcaccgtcggccgtgcatgcgtcaagctgtgttccaaagctggccacgcaaccgtccaaattgaccgcacagagcaagatttcgatggcacacccaactcagaaatgcgcactgcagatgtcgcaaacgattatgacgccgtt

SEQ ID NO: 13959 - DNA, 571 bp, Emericella nidulans
cggcgagcagcggggtaatggcgctccagtggcgcctgccccggtgttggtcgggagtgcagctatggcggaccgtatcttgtgtgatgtccgatcaggaccgcagaacaacatccacagtattgcacgcgcagatacacgactgcaggactcgctaggggctgtacagacactagaggaggtgacaaggccactctataatgatgctgttctctatgaagagccatacgtgccgaatgatactgctataaggactgccaatagctaacaggccttgcaacttgacgcgcagccacagtgtgagcgcccagcatagagctatggcctcttgtgacgctaaagaccggttatgcgataaatcgttgttgagggctctgcacacaccctgggccaggacgctacattgatgtatctaggcgacgtgcagccgtcatacgatgtcagtgaccactgtgaggccgacacccaggcaccgagcaagcacttctcttgaacgatcagcgcttttgagagccactaggcatacctttcgtctgtcatgactggcaaagcaccggtttccaatggcaca

SEQ ID NO: 13960 - DNA, 568 bp, Emericella nidulans
ttcacggcgcagtcaagcttggtggagtctctgcgcaaatccctgggacgaccattggtctaatggattataatttggatctcgcttacgactctaagtgaccactgagtgcgtgttgctgcccgctgctccggtgatttgacttagatggaacaggccagcagattcgacattcgcaatacaccaaagcctacctacttctactacgatagcctgtaaattgctgctgtcacagcgcctttaagttaacggcttcaaaaattccacttgtggggtttagaacgtttgacgctacccccccttacggaaccccgattgcctagtttaaggatactacgggtgtcctccaggcacaggaggataaataagcgatatagaataacggaaggaaaccgcccggatgtaagtgtatacaacaccttggaccaagatagcaaaatgagcttcgcctgaaggtggcaacggcttagcctcgaaaatatcgtcacagggttccgccgccggtgcgcttttaccctgactgcccatgtgagaagatgaagccaatcggacggactataagtcctct

SEQ ID NO: 13961 - DNA, 1366 bp, Emericella nidulans
agcttcgtcatcatcgtcctccccttcctcttcatcctcgtcatcagactcatcattcccttcagtttcttcttcttcttcttcttcttcttcttcctcctcctcttcatctaccccatcagcacccatcccaaacccatctttagcaagcagctcatcatccccgaagtcaacagacatggcatcatcctcgtcctcatccttctcgtcttcacactcatccaagtgcttcttcttcttctccttctcggcctttttctcccttttttcccttctccgctcaatgatatcgtcaatatcaaccgccttcttatttccgttcttcttctctccatcttccccatttccaccccaaccatcaaactccacaacctggttcaccacagccccaacatcaaactcaaactctgagtctagcgcgccgtcgtcctcgcccgcgtcttgttcttcttcctcttcatcatcggatctagcctccttctccattgacgcctgcttccccttcttccctttttgttgctttccatgttgctgctgcttcatcttcttgtttgtcggcgcagcattctcaccagcctcccttttgcgctttttgcttgaggacatagaagtagcgtcttcatcctggggctcgtcaaatcggtcattctcatcgtcggataatgttaggacgaaatcgtcgtctttcgcggacgggcgctgtttcgtgataggcgccatttcgatgagggaattagggcagccaagcttcttctctctggctttccacgaccttgaatacggcagaaatttaaccgaattcgcgattcaaagcctatttgatccttctatccccgggtggttcttggtattatctaaccgcagaattgaaaaaagtttcaaatgtaaggcggtggaaagactatagcggcaaaaagaaaccgcttgggggctttttccgagtttccgagccccaccaatatgatttgtcgttacgactttccaacgcttggaaggggtattaaacaaaagaggaaaatcattattgaacctggcggcaaataaccaaaccgcccgacattttcctaaattgccattggtggcatcatttttcaaggtaatgcaataacaacccttaccaaaaactttacctttccgaacccttcatttgaaagtttcttgcgagcacctgctgtctaagagtccagttgttaaatggcttggcccatgtcgcacagggcccacatttatctaactaattgaagaacctccgggtggtaagggactaccaaaggattttccctttacttgaagaacctgtcccaatcccagtcgtgggcttttcacctttatttaaaggttccttcatatgtccaaggaatacccc

SEQ ID NO: 13962 - DNA, 436 bp, Emericella nidulans
cagcgggctgactgcacccttctgctcgtgctacaaccgggggtcacgccagtacatctttttaacctatggtccgtggacaccgagactgaagatccctcactcactgagaagccaggccaactcgcaccccattgcgctgatcaaggatatcggcggggccaccggagctatactatactcagggcgtcaccgatagacgtactacagacctaaggcaccccgtgcaggatgtgctaccatgcagaagccaagctggggcaagaggccagaccatgctgtggtactattcaccactctcatagtgctgttgggagcaagtggccagtgctacattgcggaacacggtcgtgctgactccttatgcacagacacctgtacaaagacctgtgttggaccgactgatcaaagatgcttggttccgacccggggttgt

SEQ ID NO: 13963 - DNA, 1080 bp, Emericella nidulans
aaggagcttctgccagctcacagtggcgaagaaggttcagatttccattctatcttcgataccgtgaccgtcgatgaagagctactaaacagctcacggtcgcttcggaagagaaaaacccagtctgtcgacgcagaggaacacgcacctgttctccgcaagcgactgaggcaatcgcctgcgcgagtcgcacgagccgactcgcaggatcaaattaaagccaacggagacgctttgtcgcccgtccgcacccgttctcggcgcactagaaaagatgagcaggaacattgccgtgtagtagtgaaacagtttggcaaactcgtcgtggcttttcggttacctgacgtgaaactttctaagattctcaattcgcgcagtcggtcctcaattcgaaaccgaaagatccccaaaccacctccaccacaagaaccaccacaggcccattttgccccaatcactcccatttcttatttcccgtctttatattccttcagtgaccgcgagctagaggagtcctcgaaagccaagccctacggagggattctctccgaggcagatgctgacacctccaagacgctaccttcacaacttgaccgtgaacgcttcgaagccgcacggcagaaagctgaagacgcttggcaaaaacgtctagcagagtcccagaatggtggcgaaactgtgcagcatgcttctcagaaggtctttgggcctccatctaggatcaagtatatcaactttggcggattcgagattgagacttggtacgcagcgccgtatcctgaggagtatagtcgaaaccgagtactctacatatgcgaattttgcttgaagtatatgaattcggactatgtcgcgtggcgccataaactcaaatgccccgcaaaacatcctcccggcgatgagatctaccgtgaaggctccatctcaatcttcgaggttgatgggcggaaaaatccagtctattgtcagaatttgtgcttgcttgcgaaactgttcctggggtctaaaacgctttactatgacgtcgaacccttccaggagagtcatgaccgagtaaacgattagggtgctcttcgtcgg

SEQ ID NO: 13964 - DNA, 608 bp, Emericella nidulans
ttttgttgctactcccaatgcccgtcattgcaggtgcccctcaggcccatggcccctctaccttttacaaaagtgagctccccatcaagtcgcagttggagatcaatgtcagtatccgctctagtgcaagaagtggctaacacagctacagtgaagatgggtgcgctgatgggatcaagtaagtagctctttctcctggcttggtcgacgaaatcgctaataactttacttgcagctgttggcggtatcatgggattcatcatcggttagtcctttgatatatcggtcctagcggagtactcatcgggattgcaggaactgtcaccatctttcaatatggtgctggacctaacggcgttatgcgaacactcggcaaatacatggttggctctggagcgacattcgggtacgccctcgatacacttgcgcttggctaggcaatctttgtcgcttgttgctaatattgtccacactttagtctcttcatgtcgattggcagcgttatccgatctgagggccctcacaacgacgcctggctgcgagctcgaggacccctcatgattctgccccgccaagcaccttgctcgatcgcaggaatagccgttact

SEQ ID NO: 13965 - DNA, 340 bp, Emericella nidulans
ttcacggcgcagtcaagattggtggagtctctgcgcaaagtttgttctagaaggaatagagacggaggtgagctgcggtctgggtagttgctcggcgactgactagcttatagctagctattgttctggtgtcttcttaccaggtcagcagttcagcttcttattttcttcttgcgccgaactagttcagtccgtgactgggcgtgggatggatactcgctttagaatggcctgtctgaaactaacagttgactcgtagcttaggtcttggagctgctataaccgacgaagtgcaacgacgttcctttcgcccgtttgattacatttcatcacaacgggg

SEQ ID NO: 13966 - DNA, 922 bp, Emericella nidulans
atctgagctgcaatttagtcctgcatcccaaccgccgattttgcctcactaaccgtgaatgatcagagacgcccagtcgaagaaaagactagacaccttattgggatgaggcgtaaacttctggcgcgcaaacaaagtatcaaagaccaaaccagcgtccggaagaccgccgggttgcacggtcaagggctcaatggagcgtgcgtaagctgtgttagcggcaccaagccatggaagagtggggttgttgttagaaccatcagcagagcggtactggtagtcgttgcccatatatctgaaccaagttattgatcatggtcgaattcgtgtgcgtggaggcgaacttacgagagcggggggtgaggcaaagaaccccagagctcgtcgaggaacatgttcgtgaggtccacgcgcatcttcgagtttgagggaaggctgctaacgatctgcaaatccggtcagacgtccgaacgcaatcccccaggaaccatcgtccaaggtgtgtatctgctcacctgaatgatgcgctccatgatcatggtcttgtcatccgtgagctcgccattgatcttggtcttgatcacgtccttcaatgaggcaaagtccttgaaaccgagagatttcagatcattgaacaagcctgaagggtgctccttctcgagatatgctgcctctccgccctggtgggggattgggcgagaggaggcatgaagcacctgcgcgtatttctcaaagacagcggggacgtcttcactctcagcgctgctcccgctgtctgaagagggcctgcgcggaggaggcaccttggactggcgcttgctgctgttgctggccgcagcggcgcctattggcattggagccattggccttagaatcgcggtcggccttctcggtcttgtccccttggactttctgaaggtag

SEQ ID NO: 13967 - DNA, 1209 bp, Emericella nidulans
gtagtgtatcctcccaagcgttcagcacctcggcagtctaaaaaggcatttgttagcagtgtggaaaaggcctcagcgggctggcactaacatggtgctgattctgtaatttgggggacttgatcttctcaagcctctcggccagggtcgccatgatgaacggatcgaccgacaggcgaattgagaagctgttatcaaaagacctggtgttgacagggcaaagaagcggcaagagaagaagtttgcaggtttgcggagacttttttgtggtcgaaaaaaaaaggtacagattcttggcggcggtatcgatagcgcaacgataagtgtctcacttaatctacaagagaacagaagatagtaagttttttattctatttgctggtctgctagacataattatcctgacttgcttgatggtgttgaataccctttgttacatctatggctgtctcactaggaagctcaggcatcaaggcctcagtgcaacaccgccagttcatacattcaggccgatactagactaagaactgagtcatgtattggcatcatatcatcgcgcattcttctaatctgtatttacgggaatacccgcagactgtgccgtcactcttcttctcaagggcaccataacccatcccatcgtgttaaatctcgtcgttgatcgcagcctcatgttgcgattcagaacgtccgtgttgcagcctggcaacggcactacatcaaaattgaactgcctagcctggccattgcgacagcccagcagactctgactcgaccaatcgagttctagcagatgcttgagagccatatccgtttatggtacagttcgaggcaagccgtatgaatagacatcgaccattcggtgaaggaagaaagcaactattcggacgtcgatgtctctgctcattttagaagaggatctccccgctatgttcagcttcgaagccgagctcttgtagcttgttatttcgcttcttgtcgtgagactttcgttcgttatcttccttcttcttcaactcgaagacttccttgaacgtcgcctttatgagattcggtgggatgtcgtcttccttgtctagatcctgtagatacgaaaacccacaggtcagcatcttgattatggtgccagtatattgaggccaggatgatcgtacaatctcacccaacaacagcacgttcgcgcctcgaaccaagaatactccgtagtgc

SEQ ID NO: 13968 - DNA, 638 bp, Emericella nidulans
gcgaaccgctgtacctagaccccagcaagaacaccccccacattcgccaacaaaaaggcagcccagaaacaagcaggaacacaacaaccccccaacaggcaaaacaagcgccgtgcaaggccggacccagcccagccaaaacaaccaaacagaacaaagaagaagcggccaaccaagcaggaaacaccaccacacggcagcaaacaacagcggaacacacgcaaaccacccagcaccgacaacaaagaagaacaaagccaagcaaaacagaaaaggacgaacgagcaaggccgccggtaggaagcccaaagaacagggaggcagacccacaaccccaaggaccaccgagggcaaaaacaggaaaccgaaaaggcaaggcgacgacaacctagaacacgcataacccaggcagatgaagggaaaaggccaaagaagccgaaaagagaaagcaaacaccgcaaaagcaaccaaacaaagcaagcaggccaaacacaaccagaaggccacacggaaacaaagaactcaccccagccacggaacccgacaagcaggccagcccaagacgcaaaggcagaacaagaagaaacggaacgccaaaaccgacacgggaagagaaaaagcgaacacgacccagaaaa

SEQ ID NO: 13969 - DNA, 1120 bp, Emericella nidulans
ttgttgctatcttgggcattttgttctgacaacgctaatcgccgacagtgccgctgcaagtcaggcctccacacccagccgtgtccgtgcgaccacccttgatatccccggcctcaccaagtccaaagtctcgcctgatggacgcatcgctcaacgggacctcggcgccaagctggtcattgtcatggtcggcctcccagcccgaggcaaaagctatgtaacaaagaaactcgctcgctatttgaactggctccaacatgatactcgtatctttaacgttggggaacgtcgccgcgtagctgcggggaagtcgcccgctgcccctcacagaaagagctcagttcagcaggagcttgttgactctgtacggcgtctcagcgttagtgttggtgggatgacatctgcgcagaaagaggccgtccctgcgcctcagcacgaatcacccccggagctcaacgcccttccaccgcctgtcgtccctcccaccaagattcttgtcaatggtgaagaaacgggaggctctaccatggttccggcaagcgaagctgattctcaagaccagcaacgaatcacggaagcatctccggaaccaatggaccagtccgcgagcttcttcgatcctaagaaccaaaaggctctgaagttaagagagcaggttgctttggagacactcgatgagcttttggactacatcctcgaagatggtggcagtgtaggcatcttggacgcaaccaacagcacactcgaacgccgcaagacaatcatggaccatatccgcaaccgtgcggggccggagctcggggttttgttccttgagagcagttgcgaagatcccgtacttctggaggcgaatatgcgcctaaagttgtccggaccggactacagggaccaggatcccgtcaaggctcttgaagacttcaagaagcgcgtggccttgtatgaaaaatcctaccacccacttggcgagtacgaagagtcattgaacatgccatacattcgtatgattgacgtcggacgcaaactcgtctcccatcagacccacggtttcctctcctcacaggtcgtgtactatctacttaacttcaacttatctccgcggcagatatggattacccgacac

SEQ ID NO: 13970 - DNA, 1189 bp, Emericella nidulans
agagctcaccaagtgttcgagaaactgaagtgcagacaccacggcctaactaataggcagtttttgaatcatcgtgggcgatcatctttgggcattggcaatttcatcatggagagcatgttcccggctgggcctgctgtccctgattgtccctgaagactctctaaaagattcttcacaagattgatgttgacgtcctcgctgtcggactctggatcgctgtttgcctcttcaattgtccctcgagtcacggcgcgtttgtcattggagacatcgctaggacgattcagatcgagaacacccgttcctttaagctcggcctccatttcgctcgcaagctgttggatctgctcagtgtcgtcctcggagtccgtatctagctcttctactcgattaacagcctttgatgacttcggcggtttgttgagcggaggcattaatggccctgacggcatgcccatcatttctttcatcatcctggagaactcttcctcgtcaaaggacgcctccctgtcttcgccttcactaccataatcttcctcctcatcctcctcgatgtcggaatccgtctcaaagtcgtcgataaagtcggccccttcgaagccagctgagtcgtcatttaagaacttttcgaactgagcaacaatacgttgcaggttttcttgagcgtttgcgtcgccaaacccccccgcagattgaggtttctccgcccctttccccttgtctttccccttgagttcagtgtccagatcttcaaagcttatatctagccacttttcgtcgtcttcacgcttgtcccaggtttgtatttcctcattagtcggcaaactctcatcgccagtctctagatcctcaagtataagcttcatttcccgtactagtgccttatcctgattctgcggatctgacagaagcatctcaaagccgcaagttagtttcattccagtatctgcacggtcatacacttttcgatcctcagtagatggcagtttatttaaccacgactttggagctgggaagtcttgactcttgacttgtgcataaccagtccgcgtgaaccgggtgctcactgtaacgaaatcctcgggtctgaatatcaagtcatctgtatttttgaatcgcaaaggcctcaacgcgataggatctcgaaggtagaaggctgcaacagcgcgggatatatagaccggct

SEQ ID NO: 13971 - DNA, 550 bp, Emericella nidulans
accccccgaaaaggccggccgaccccaacacaagaccgacaaacacacacaacacgcccaacaacggaaccacacgacgctcatgacaaacccaaacaaaccaacagaaaacacacccccgccaagcagcacacaacgcacaaccaaaacacaaccaaacaaccaacccaaccccaaaaaccaggcacccacacgccaccaaacgggcaaagccacacaaacatgaacgacaaaggcctagccaagaccaaccagacccgcagcccacccggacaacaccaccacgccacggaccacggaaaaagggaggcccaaaacccagaaaggcacaccaaaagaacgcagagcacgcctaagaaagcaccacaaacaaaccgacacagcaacaccgcagacaaggggcgcaccccgaagcacaacgcacacctcaaaaacaaccgaaacgacacgccgaaccggggaaaaaaacggaaggcggaaaaagcaaacccacaagcccgacggaacaagacacagaacgccacaacacccgcaggacaaaaccaagccg

SEQ ID NO: 13972 - DNA, 1640 bp, Emericella nidulans
ccttgtcggccgggataaagcattaggtcttagccctttcacacccatgcaaaaaagcgtaccgcggaatttacccatgatgtatttttccatttttcatttttccaatattttctcctatttttaataactatttcatattattgtagtataatctttttattttgtaaccgaaggcgtcataccctatgctggtcaggcggtagtgaccggccagcatgactagtaaggatatactgttggataactttagtattctattgacaaagtactgcactgtccgacatggtctagcacctgaatttcttctcttctcacattctcattttcaattcagtggcgattgaaccataccccaataattggcgcataggaaccttggacggaaccctaatgccgagacataacgaggcggcaatgatattgtccactatcacgacaccacggcacatgcaagcaagctgaagcaataaacgatgttacatcgcgatgcaagttcccctcagtttatcgggcaagtccgctagaaatcaggccagccgagcattcgcctgcggcccctgcccagccaccagccaagcgggcccctgacgatcactgagagatgctccaatgacaggatcataccaagcttattggtcgcggcttgtttctgatccatcgctatcacccactaatattagtgctgctacactgcaatcttggcgctagcaccagaatggcaggtgatatgctgtcagttcatcaactgtggggataatagcgactggacgattcactgccttctggaatgtcgcgagcgtgcccgccttgattggcattctcccccttgctggatctcatttaagagctgtcctttgccctgtctgtatctggcgtcactcgaaggccgtttgtgcaccagacactttgcaagccatgcgcgccttcacccgtgtaacggccatctccctggccggtttctcctgcttcgctgctgcggcggctgcggcttttgagagcctgcgagctgtccctgacggtagtcctacctggcccattcacgtctcctgcgagagaaagacgctttttgatactgaccagactaggctggatctacgagagcacccccgaccctaaccaaccgctgcgtctacgcatcgcgctgaaacagcacaatgtcgccggcttcgagcaggcactgctggatatgtccacacccggtcactccagctacgggcagcatttcggctcctaccacgagatgaagcagctgcttctccctaccgaggaggcgtcctcctcggtgcgagactggctctcggcggcgggcgttgagttcgaacaggacgccgactggatcaacttccgcacgaccgtcgaccaggctaacgccctcctcgacgccgatttcctctggtacacaacgaccggctcgacgggcaacccgacgcggatcctccgaaccctctcctacagcgttcccagcgagctcgctggatacgtcaacatgatccagccgactacgcgttttggaggcacgcatgccaactcggccaccgttcgcgcgaagccgaatcttctcgagaccaaccggcggctaatcaacgcattttctttggttgttgagaactggagagggcattacccatcgggctggg

SEQ ID NO: 13973 - DNA, 1464 bp, Emericella nidulans
aagttccaggcaaaccaattttctgtggatgcttgctttgttcctagtagctggcactcgtgatttactcccgtcggaataacccgggtggaacagattactaaatctccgcaatcataaaagcttgtcataacaagaaagccattcatctacaatggcaaggagaccctaaagcttggattgcaatcctccaagtatttcatccccaagcccatccttcatagttccacttcgtcaaaacacgaaaagaaagctggcaagtggcaaaagagcattgacagaaaggtactaggcagtttggtggatggttctgttcttgacgaccttttcggcaccgccagcgacccatacttggatcctgatagcggcttcagtctcgactcttcggactgggcagcctgggatcagctgagtcgagggccaatgtgagcggaatctgaattgtacaatgacttttacacattcacggaacatgggttgcgtatgttataccagggcaagacgctgattttaggcggaatcgaccgctttatgcatcccacggccaacttctcttggttgtattgaagagaaggcaacgttcaggcaagtcatttgctgagtatatgcaggaagtcttatttgctgggagtggcacaacaattgtggtcaagttcgctgccatctacaaaagggctgatactatccgaaactcccactcagaacgggcccgagcccggccccgacactctgtgattggccgcctgaagaagtatactactcatataaaccagttgaagccaacagcaaaaatcggaatctctacattagccataatatatatcacgaaatgagactccgagactccaggacacctgatcaggggtctccgccgtcgctggaggaggcgaaccttgaaaacggcggagcgacgtccctcaacactgaagcccacgcccaagccgaagattcgaatctcattacttggagggggccagatgacccagaaaaaccccaggaaatggcccaacagtatgaaaccgagaaattcatgggccgtgtctctgttcgtctttatttcgcctgtctcgtcgtcaatgatcgcccccgccatgcaaaatctcggcagtgatctagggatgcagaccgagattgagatatatctttctatggccatattcattctcgcctatgcaattggtcctacattctttggcccggcgtcggagctttacggtcgtgtgcgtctgctgcagatcagcaacatttggtacctagcctggaacttgggatgcggtttcgccaataccaaagctcagctatttgcgtttcgttttcttgcgggtattggtggcagtgcaccgctggctattggaggtggtgcagttccgtatcagtattacaatcccaccctgccagtcgtatcttcccctcggtatcaaacgtgcggtaacaagtggagcgcagagaatcgtggcatagcca

SEQ ID NO: 13974 - DNA, 1768 bp, Emericella nidulans
gcgatgagaaggtcgctgcagcaacttctcttggcgccaacactgggctggagacaccgagtcgagatgatgccctctctccagtacaaggggacttggaaggggaggagagtcttgatgacattgaccgggagcttctgggcgaaggtagcggcgatgaagatgacatcccgccccgtggacttgaaccctcgcggcccgccgaactagggtatgacgacagcttcttaggcggagacgccgacgatgctttgtcatccgatgaagaggaggaagaagcggaagatgaggaacttgacgaaatggatgtcgagggtgacgataatttatctgcacccggcggggaaggtcgctacgcggcaagcgatgtttcggggcccgagatggctaacggcaagccggggtggaattgagcaccggaaatgggcccattcaggtctctacccctgccgtgacagactgcaatgcgttctctttctttgtttttccgaagctgccctttcgaaaagctggagtcccttgtgttggttgcacccagcattgcactagctttgccaccggggtcaatgccttattcgttacttcttaaccaaaccctgttatttttctatttagatttatagtcaagcgtctcaatagaagccaatacacccctgtgcctggcccagaataacaccgttgggccaggtggcacagccgaaagaaacaaaccctcttccatattttgtaatgattctgtatagtgacctagtgtggcttgccgtcacacgggtcgtccaaagaatggatattcagcaattgaaaatcaatttcatgacgtccagcaggctagcgtttggaaaaggctaaaatcttgcagtgatcgacacaacaaagaagctgagtgaaaatgactctcgacgctcgttggccgcgtgtagcgcatgacctggattgtttgaactgaagagatctaccgaggcgctcagcaaagctttatcctccgcataacctaccgtagtaatcagagttctggagacgaccattcgccttttcagccaggaacgcattgactaccagcaaccttcaactgtctacctgatccggtattactcggtacagtactaatgcatttcagtttgttagcagactccagcccgacaactgatacttaaatcgtgacctcccccagttgcttttgcatgtgttaatgctccactcttagcgacacatttctcctcttctcttcttctactttgagactactaccatagcaaaccttatgagatactgtagctactattagacgttgagtcaaacagtctcggcctttgtactctacggccagttatcgattaggacgtccgccgccggtagcagcaaactttcattgctcaacaactccaccccggcctcccgcttccgctccggtctccgtcccttttttgctcttcagcttctcgtccaccgatcacccttcccagtgctttattcttgccagcacgtctatccatcatgtctgacgacgaagcccgcgtccttcgcccgcgtccgcagcgcgtgtttcgcgtcaatgactcctccggatcgtctactcctgcagaaccctcaaacatggacaccctaactcccaaagaacctggctcggccgccatcagtcgaaatgggtctataatgaacctcacatcgccgacactgtatggtatctactctccgacagcctttgaaggtactcgcgatgaagacagtgcctggggaacagaagcagacgtacagccttccagcccag

SEQ ID NO: 13975 - DNA, 129 bp, Emericella nidulans
ccacttagtgtagtgactcaatgagccgcaagccctggaatcatgtggctaaatgcatgtcctgagaggatccttggaacagagggagcgggtctgatgtttgttgcagagctagagggagttagtctg

SEQ ID NO: 13976 - DNA, 873 bp, Emericella nidulans
aggcgctttaccagcgtgccctccgcgtgaggtcggcggttccacatcccaagatcatggggatcatccgagaatgtggaggcaagatgcacatgagcgaggagaactgggaggaggcgcaaagcgatttcttcgagtcgttccgaaactacgacgaagcgggctcgatgcagcgcattcaggtactcaagtatctggtgctgaccaccatgctgatgaaatcggacatcaatcccttccactcgcaggagacgaaaccgtacaagactgaccctcgcatctctgcaatgacggatttggttgacgccttccagagagatgacattcatgcatacgaggaggttttaagcaagaacccagacgtgctggccgaccccttcatcgcggagaacatcgacgaggttagccggaatatgaggaccaaggccatccttaaattgatcgcaccctacacgcggttcacgctcagctttatttcaaaacacatcaagatctcggtaacggaagcacaagatatcctgagcttcctgatcttagacaagaaactcaacgccaagattgaccaggaaagtgggacggttgtagtcgaaagcgcaagcgatgtggaacgactccggtccgtggaggagtggaacgaatctctccggacgctctggcaagtgactttgaaggacggcgacggattcaaaaacgatgatgtctcgcagccgaccgggataggcatgcgaggacccttgctctaccaatcaggccttgacgacgacaccgcgggtctactacgttctagcggccaccgattccggagaggggggaagggcagcaaagcaggaggagggcttgggatgaagacgggcctgttctaagcgggggagg

SEQ ID NO: 13977 - DNA, 663 bp, Emericella nidulans
aaaaccccaaggaacacaaaacatcataatcaatccggaaccccattacaagactgtacaccatgcatcatacaagcgggacccgggtactacacacgcccaccgccggccccagccgcaccggcacacagaataactcgatacacctaccaccttcacagactcagacgccgaaactttccacaaaaccaaaacccgactgtaaacatcaagacccccgcgcgacataaacggcacgacaaaaggggccgcacaaaatcccaaccaagccgggatagagacaggtccaggggccagagaacccactggaaaaccagcgccagggggatgagcacaaagtgtaccaacacgctaactaagtccccggcactcgcgcatgcgaatagacccacgagagcccagaaatcggaaacgcaagccccccccaacgggaaaaaagagggcccacccggaccaggaaaaaacgcagggcaggcgcgacaaagaacagaacaactgcccagagaccacacacgggaactaaaatcacaaacggaccacaccacgcacccccccggaggcaccaacccgcagttcaacaaggaaaaaccacaccccccaccccaccgaaagacaaggcccgcacataaaccataaacggccccccccgacaacaggaaaaac

SEQ ID NO: 13978 - DNA, 590 bp, Emericella nidulans
  unsure (1)..(590): unsure at all n locations
ccgcgcacggaaacgcagagagcaatgcaaccagaccgccggcaagataaacacaacagccagcccccaccccggggggggggtaagaagagcctgccgacaaacgccccggcccagtagaggccacggagggaggaccacaaccgccagaccgcagatcagggcacacaaccataggcccgacaacggacagccgcacggggcgcacgaaacccagagaaagagagcagccgcgggagcaagcccagccgagagatcgcacgaaaaagaccaatgggccagaagaaaacctgggaaaccagcccaaagagaaatgccaagcaggccacaaacacacggcggaagacagcaccacttcggcaagaaacagagcgaccgaaacgaaaggacaccaagggcacggggcaaaaggaaaaaaagcccacacgcctgcgaccagagcacccaaaaaacacaggcggccacacacaaaccnaaccggagaccaccaacaaggccacgaagcaccacaccaagcgcgcccacacgaaccagagcacaacaaccaaaccaggaagaaagagcaaccaaagaagaaccaagccaaaaac

SEQ ID NO: 13979 - DNA, 555 bp, Emericella nidulans
cggccagctggaaaagatgccgccacttgattcaacttggttctgaggcgctgaagcttttttatctctcaatcatgagcggctgctcaggggcctcgagtttcgcatgttcatttcccgtaccctcaagttccttcgccctcgcaaaccacacctcatctggaggttcatacccctgcagtccataactcccctcaatcctctttctcttcttcgcctcgggatccctcccctccaactccgccacaaactccgctggcagcgccctcctcacagcctcagcagcctgctcctctaacctccttgcctccctcttctgcgccaagggatttggatcaacggtcgcccaccgcacatttaagatttcgttatgatccaagctctggtgcgccatggcttccttggcgaactgtgcattcgcttcgttggtgtacgtaacgaaagcgacgccgcgcgatgtaagcactctcgtccggtcaatttggccccattctgcgaaatgtcgggcgacaactttcttcatatcgtcggttacgtggatgcggccgacgtaca

SEQ ID NO: 13980 - DNA, 1678 bp, Emericella nidulans
  unsure (1)..(1678): unsure at all n locations
tctaaggcggagtttgtatgctagcatgcagcatatccacctgcctacgtacatagcgggctggctctagctcctatccgggctagaatttcatgccagagactccgctggtcagccgctcttcactatctcccattgcttgcgggaacccgtctgttgatgtgttgatcctcagtgggtaggtccctttcttcagcggtgaaccctaaatagggagtcggcctcccaggcctcgcaaagtctatcacatgcggatatgcgtggcttccgacctcgggaatggtgacaatattggtgcatgatcatctgaacgtcagtcggctcggggatgcatcaatgtgcgccaagtgaacggcgaaagctccaatggtgacgttacaggttgccgtttgtgatcacttacgcgggctgcgatgatcataaatgtacattaagcgtccaaatcctgaggactagtctaaatacaacaataatatttatgcacaatatgcaatatgcaaggatacctgcaccataacctgtaatccgaaggaaaaaaaaaaaacccttaataaccctccatatcattccaataaagcgtgccgtgctgcatctccccgcgcggattcaactcccaccccagcatcagattcgtccattggagcagatggcttgcaatcttgatgtgtccaacatccgtgggatggttctttgggttgatatcgttgtggccgagaatgccgtccgtgtggaacaggtagacgaagcgccatttgcggtctttgaaatgctcgtagacgcgctggatctcttcttcgtagatcactgactgagtatattcgctgccttcttggttccagatgccccattgtgtctgtatcacgatattagtacggttttccatttggtcgggttcaaggaggcacaccataatcacaatcgacgcgtcgggccaatgctgatggatattctcaatgagatcaacgtatccctggtaaaagttctctcctgggatctcgttcggatgccggtggtcgttaccgcccatttggatgatgaccaggtcggccggttgttcagcggtgacgtcccattcttcgggctcgcctccatacatgttgcgcgcgcgggaaccggggtcggaggcacggtgccaataccagatctgtcacattaatcagagggngtcgtcatggttccagctgagcgaggttaataccatttccgtgcacgccgtcaccgtagcactgcatgtcaaccaggcatgctccaggggaggcctgttttacgttagccaaagcattcttatagtttgatatagggacgaaccgtgatcccaaatcgaaatttcctaacccttgcgcgtatacaaccacccttgctaaagccgtttgtttgtgattcttgacgcggtaaacttgcacttgtagcggggtcgcaatttaatccaggggacttccaacctcacaaatttaaatttttttaaaagcggggtttcgggggggttgcaataaaggacccccaaatttcattggggttaaatggggccaaaaacaacgtttttttttttccccttgggggtggggcagtttttcccgggggttttataaacccctctataaaaggggtccacagcattttcttgtttccccccaatcttttttgttggggaactttatctttttacttttttcttata

SEQ ID NO: 13981 - DNA, 540 bp, Emericella nidulans
tttggggagacacccccggcggcggacactcacatgaaccataccatgttccacacgcagagtaaaccccgggcgggcgggccgaatcacgagggcagactcgagacgggggtgccagcgaagccccaaaaccggagcagcgagcagcgggggacagcacaaccacgacggcagaccacgggagacacgcgacaaacacgcgggagcaacgcggagggagaacaaagccagacccggagcccatccggaactgaacacagaggcacggatgcggcggtcccagggccatcccggacagggacccccggagagggcactgcgccacaaagctcacgcagagcaccatgcccgcaagcccggagacaagaggcgaccatcctccttagacacgaaacgcacaagaaagccggcgagagctgcacacactggccacaagagcttgcgagtgaggacgacaccgcccgcccaggccaacacgcaacgagcaccacgcaagaggaaagagcctgcacccacctcaaaacagaaaggccaaaaacg

SEQ ID NO: 13982 - DNA, 481 bp, Emericella nidulans
gagctatgtttggtgtgagacggccaggaaccttactcggggtatcccagatgttttgacaaggctatttatccgggcataagggggcggacgggcgagcggctcatgggcgtactattcaggagagaagcgccagccaagaaaacacgtccataccggctctaaaaacacgggtcacactcaacggtcggccattaatgcacctcgaatgcttgttaggactgttaccagactgtcgtggttcttcatgacttgtagcatcagtagaagcgtgcctaatcgttgaacttccgcaatgatgggcttcgaagcagccagaagacacccagtgaaggtcgaggagggagaccgacttgttagggcatgatggctggatgtccgactggaacagctcggcccgatggcagaactactagagcacgaactcggagcagaggataagaccactggactacaaggaagccgaagaaaccgccatttc

SEQ ID NO: 13983 - DNA, 500 bp, Emericella nidulans
gttgttctttcggggtgccccgaggggtaaagctcatgctgtgagggccagtgctggttcaaatattttttgaactatgtccgggtgccacgacacggtggaagcaacggatatcagtatggagagctgtacctgtacggtgcacagctgctattggtggtgcaggctgcatacttgtacataagatggatagattgggagctcgctactataggggcgacaatactggccgtgagcaagagcttttgcacacatgtcgtggagccttgcaccctgggacgccgagacacagggtagctccagtctatgcaatggggccgatcccgaagaaactccagaccagggagcccgaggatggttgatgagctgtacggaataactctccgtacctatgggataagctgcactgcgcgttctattgccagactggagcaatgctcatgacacagactggttctgaaggtccaactccatgtgcaaaggctctataaacatctacc

SEQ ID NO: 13984 - DNA, 1365 bp, Emericella nidulans
atgtatatacacatacgatttaggtgacactaagatactaggatatcgcctgttgactcgaagtatttggttacaggtgtatggggttgagacaccgtcgctcaaagactcatatgtatgcagctgaatgatgggatgtccatgactgaaggacaatacactgaactatacgattcgatgaaaacagcactttaacgaagaaatcaccccgaggcccttttcactgtcctatccccacccgtggcggccactccgtcagaccgactctggcggctgagtgacatgcgttaacttatcgctatacacagttaacatcaatcccttattgaggtcacccttcagacaaaagcatattgagattgcctacccgtgtagcttcttgatcatcgctcccaacccctcatgagaatagtcgttctcgttccacatatccttgtgataaacaactttctcatcaggctcgctcccctctaatttcacactgacaagactatccacagtcttcgacgcatgcacaccagcaaatgtatacttttggcgctgcttccacacaagctcgtgctctgtcgacgaggtgacctccgtagctaacgtttcggatttggaaaatagcttggggatgccgtaccattggcctgctattttgtacctgtttacaaaggatcagttcccgacattcacgaatgatgcggtggatcaaactagactagcgaatgggggacagttataccgggtatcacaataactgaacggatcatcgtagatagcttgttcagcatagacattcatgtcgtcttctgaggcgctaccaccgtacagagaaagaatgcgttcttggattttggctctcgagggtgaaatagatatggagttctctggatgaggctcgtagtctacatcattgttgatgttgcggggtggtgcgggatgcggctcaacgcctcgctggtcgggatgaggaagggttgaggatggcatcgttgtggcattagatttcaatgccgaagctttgttgcgcgggaggtatactacaattgcactggaagaagttgtgcctcgaaaatatgcccgttgatctctgacatcatgattacatccagcctcaacgggttgcttgggctgagttaatgtaaacagtcaaatcactagccctttaagataagtatatgtgaatcaaaaggcaaaatgtgtagtagggttgttctggtgccggtgcacggtaatgataatgatggaaaattattgaatttagggttatactgatacatccagcaatctatcctctaccgtaaacacaagccaaaagctgcgcgccaggtgcatgctagattacagaaagcatacctaacaaagagaatgagagga

SEQ ID NO: 13985 - DNA, 735 bp, Emericella nidulans
aaaccgaaaagcggacaacaacacaagtaaacacaacgagaaccaaaacaacggcaacaagagggcgacgacccggagatcgcggagagcgacccggcagagcacccgggggaaagcgacggcagacacccacgcacaccggtaaggcgctgcggacgaggcgcacacagacggacggaaaagaaaaagccggcatggcagccacccacaagcagaaggcggaaagacagggaaacaccaaaaaggggagacagcgaagaaaggacacagggagggaggaagagcacagggaagcccccaaacacaacacagcgaaccggaggaaccagaaacgacagacgaacgccagccgacagcaccaaaggccaagaaggcaaagagccaccccgagaaaaagcaaaagcctgcgagaccgcccggaggccacgagggcaaaacgcaaggacaaacacaggaccgggacactagagaaccacaaagcaaacacaacccaaaaggcgcagacccaaccacactaaaggacagggcacaccccagacggagaggacgacgccacacccccaacatccggaaaaaaaaaaggccagcccccaaacaaggaaagggccgccaaaaaaccagaacccaaaaaaaggggaaaccgccagacacaaacgacctggggacgagggacccgacagggaaaaaaaaacaagaccaccccaaaggaaagccaccccgaaggaaaccccccca

SEQ ID NO: 13986 - DNA, 645 bp, Emericella nidulans
taagtgttcactgcaggctcccgggatgcacaatgcgagattcggtctggatttcctccaaaggttatggcgggggacgggagtggtgggatggcggcgcacgctcttaaagaggcgtcctggaacgccgccccatctcagagatgaggcaggacaaggacgccgtggcagacggatacctgccagccatgaggcgacttacatgcacactgagcggtagcttaccgagcacggcgtcagtgcaagtttaatccaagaagacttatagcagctggcgcccagcaagccaacccctgtcatcggtgagacagtgagacagaccctgaggggtagatctccagagacatcccccaatggccaagaagcgcagcctgcatgagagaaagcccacacatgaccaccgagagggcccattttgctgtctgggagcccggctaggaagggctagctctcgacgaggggctcaaactggggcgacgctgcttctgagtgcagtgcgcccacgaacatccgagagtcttgtgtgattcgagggacactcaacagcacaacaagcgcccttcatgctgagacctttacaggggctgacctacctagaagcgtccccagagaagactgctcctcccagtggcaggtgggcctccc

SEQ ID NO: 13987 - DNA, 1639 bp, Emericella nidulans
tacggctcacggagatccatcaagcagctatcgagccatgaattaaagaccatcagatggtattagccgcggcgcgaaacaagaaagccaatggggaagacttagacctaccgtgacctgcgggggaccgtcttgactttgccttcgatgcggtgagggaagagctacctaaccatcactgactagcttggcgattatccgcgttcttcttggagggcagtccctgatgaccgatagactgattgtgggcagccagagccataggtcaatgcaggctcgagacttggacgatggttgtgaagtattgagtcctcatgatcgaatggacgctcgtaccatggcattgtctctgagtaagcttgggtacgcttgggatgaaccgaaggctcgactttcttggaccccacttgctggcgaaaccaaactttgtatacaatctggaataaacatttagaatgagcccgataataatcaggtagctatcggacggtgactcgacatatgtagtacggaaagacaggttatatagctgcaatctccattagctacattcatcgtgcataagactggcgcaaaaggagggggggaattgttatcgataggaccgtctgctcccaccgccaattctctcagtggtgtgtccctgcgtgactccatctcatatctaatgtttcctcttttctatcgttattcggttactactgttattattgagatcttgccgttccactcctcttcacgactttttatgaccaacgactactgcgcctatcccgtggtgagcaacagcgctcgctccccagccaccgtttatactcgaacaccttaacgccgatcagtgttcagcacagatcctacgggtaagtaagcatgcaacgaacgagagggaggggagcaagcccagcccagacagaaatctgactgatgactgttactggaaacgcaaagcaaacaaaccttttttttttctcccttttgcttgtggcaaaaccactaacattgctggcttatgcaagccccttcactgtagatctcacattcgtcgtcctggctatcgcgcaccgtccaatcttgtccgttcgttggccgatccttcgcgacattctccttcattccagtcccaccgcctcgagccttgagatcatgaacttcatgactcctacgtctccctgttgagcaagcaccctgcaatcaccctttttacgtcttcggagctagatgcttcgactcacacccagtcgacattatcggttcccgattgatggaccttgcttcgagtcggtttagtttttgggattgtcagcaccattaaatgattctggtttgtgacgaagatttggaaaccattttgcgactttctgggcttgtgtgggatttgcagacgtttgtacgttactcgagcgagtgttctgtgtcgagttccagcgttagtgtggtcgagcgaaaatctaaagaacaattgaacccgtctacgacttttccgattgcatgtgcgtggcttactcgagttgctggccaaccccctgcccgacatggacactgggcgcatagaacatcgcgggacgacagcccatatggcaccggaattaatgcaagcttgctttcggagagcccccaaacaagttcacgagaagctggg

SEQ ID NO: 13988 - DNA, 604 bp, Emericella nidulans
gctagtattccggctatgctgcctgcacaatgtatacactgagtatgtccgtcgcgaatattatcttttttgtaaccagcgaagaacaacgcaaataggggggatcaatatgactgggacattagcagatgctagattgagcggaaatggcaaggagtatacaccgggtgtcaaataggcaccaatctataaatatggcggccattatgctaagacacgaacatatctcattgatcattaactactagacctctcaagaactttgaatattggtcaaaaacacaggtctctaacataatgaatgactatataaactacagtgcccgagcctagcaccgaacttggtcgctaccgcgtgctatcggcaactgaaggaattcgggtataggctctgcaacttggagccatgtgcattgaggaggcctgaacagagctcatgggatcaatgaacaaagagtgttccttcaagcagcaggatgccttcgtcaaatcaggatgcaactttattgatacgtgcaacatcgatgaaagcgaacagcacgagttctggcatggtgaatggatgacgtgcccgaacaaccgtgacagaatggcatagccacta

SEQ ID NO: 13989 - DNA, 588 bp, Emericella nidulans
atgggcactgtttcttcgggcttgttaaagggccgcgcccaacactatcgtgcgcttggattgtacattttttattgttggaaggtttcttcggcgaacgttacacgatgtaggctagtagacgcaggtatcgtaatcgggagctgggttagcagcctctagggacagaatctttatatcgtcatgacaaaagcaaacatttcgggactatagctcaccctaaaactaaacttcattgtgaagtcacgatacggagagctgcatagccaattgacgtccaagcaaatagcatttggcctggcttgggtagctggtacctaatgtggatagcggggcttaccgagaatgttgactcaccaacgtcctattttgacactaaccacccttacaggcccgttcaacagaatcattcatacagcctctgattagaaggcctaagaagccttatgggttatgggatcgaacacctgtgaacggacttacttttcgcttaatacatgatgtaactagctcggttcttaactttgtacaaagcataattcgtaagcagacctgtggcgtcttaaatttttggctttttttttatac

SEQ ID NO: 13990 - DNA, 508 bp, Emericella nidulans
  unsure (1)..(508): unsure at all n locations
ttcggtatattcatgccgtactttctacgttctataagatcgaaggatcatcgcctgaataaacgcttgttaaagcgccgaataaacggcctcggccagatagtggtggctgtgaggacgcctgaccatgacggccatggtatgacaaccacacagatgtggaagctacagatatgggaggctcatcacggctcagaataaggccgaggtcgactaccgggcccactgttaaagggggacgaactgactgctacacgcatataatgattattattctaccaatccggattataccttctacaactggaatatgactctcgaggtctggaaagatacagacaatatgtcngcgcccattaatgctaaactgccatgcagttgacgaccttcctaacctagatagaccgccggcgatctgctgtgagcacctgagaagacagaacatcagcatcatgctccgtcgacccagtatgtcagtttgaacatactaacgacggatcctgcaaat

SEQ ID NO: 13991 - DNA, 642 bp, Emericella nidulans
caagggacacaacctgaccctgcgaacctggcggcggacctgagttccaggcaacgttgtatgacgcttggcgctgagcgctcaccggccaaggtgatacttacgttctgtagcctattcaatatgaacgctcctgtcgtgatgatgggcgttcacgcatggtttcagccagcttgccgccaacagccagacgtgagttgtgcttctagcccggtcgccacatggggcccgggggtttttgaagactgcctacaccggaagggtgagctcgggcccacggatctgtatcacgcgcatatgccaactcaggcatcggacactgatctagtccttggctcctggggctttgaacgccacaggccataggcaactggcacgccgcgaacctcgaccgcggcatacttcacagcccttgaggaagccgaaaccgatagacctacaccattataccacgcggttgtccgtcgccagggtccacccaagccaaatggcatggggcatcgattgctatgcctaatctattatttatgtatacatgcctcctgcacggccctaggtagagtgggccatctaccatctattgctcttgcaacaacagccgaacagaccgttgttgtggacttttgcaacaactttttcctc

SEQ ID NO: 13992 - DNA, 1913 bp, Emericella nidulans
tttagtatggacgctgggcaacttataccttctaccttcatgtgcgatggcgatgccgccgggccgcggtgcttgccggctatcgtgcggaaatcctgaaaccaagacttccaccactattcctagacttgtcagaaagattgtggccccctggccgttcttcaagccgatggactcgaccagcgagtggctgatatgccatcgacagggaagccgcagggccgcagcttccctcactcctttacgaatgctggcggcccccctcagaaaacacacatgtcgttggtacctgagcaaaatataaagctcccttcctctccaccggtagcctctcttctccacatcgaattcgttcacgatggctgaatatacctctgacgcagatgtcgagctcgcttacaccacgctgcagacgaccttcaaatccggcaagaccaaggagattgcctggcgcaaatggcagctcaagcagatctggtggctcgttgacgacaacgaggctctgattcaggaggccctcaagaaggacatgaacagacacccattcgagacgacctttaccgagtgcgcgaacgtcaagggcgatgtcatcgagcacctgaagaacatcgacaagtggacggcagaccagaaaccgagcgctggaatgctagggctcatgctcaggccaacggtgcgtccggagccgttgggcgtcgctcttattattgggccctggaatttccctttctccctcctggttcagccgctgattgcggcatcactgccggctgtgcggcgttgctcaaaccgtccgaggtcacatcgtcagtccaacagctgtttgttgatctcgtgcccaagtatctggacactagcgccgtgcgtgtcgtcactgggggcccagcggaaaccggttgcctgctgcagcgcaagttcgaccatatcttcttcaccggctccgttcccgtggcgcgtcatatcgctgctgcagcggccaagcatcttacgccgactgtgctggagctgggcggacagtgtccggctatcgtgaccagttcggcggatgtggacgcggcacgaaaggacattgcctggatcaagtatctcaatgctggacaaatctgtctgtccgtaaaccatgttttcgcacatccttctgtggagcggaactcattgaacgaatggcgttctggcttgatcggttctacaagggtgagaaggatgccatgacgcacatcgtcaatgacaagaactatgctcgtatcaaacagctggcggagaagacgaagggaaagatcgagctggacgggacggcagatgccgaaactaggagtctgccggtgagcatcgtgagcaatgtcgaaatgagcgatcctttgctctccgaagagctctttgggaccgtctgcccggtgataaagggttcgacagacgatgcgatcaagtccatcaacaggtatctggcataacctgctactctacacatgctgactgattagcctgccccgacccctcgctctgtatattttcagtcaggaccagaacgaagtcgagcatagtaagtcgtccctctctcccctggtttacttgtactcattcgtcagtaatatcctccaccctctccggtggcgtctgtgtcaacggcgttctcgtccacgcaatggtccctaatgccccttttggcggagttggcgactccggtcacggcgcctaccacggcgagtacggcttcaagtccttcacccactaccgcacaatcgcccgaccggctccttttttcttcaagatgagcgaatggatgcgtcctccctactcggtggacaacatcaagaaactggctgtccgcaacagtgtgggcatccagcgcaactggagtctagagcaggaaagggaagccattaaacgaggtctgcttctcacaaagtccctga

SEQ ID NO: 13993 - DNA, 1303 bp, Emericella nidulans
cccggcaacattttttgccggtccacgggtgaagtttttcggggaagccgtaggcggcgaacttcccatccatccagcagaggattactataactatcgaccagacacctctaattgcactttcagaccgtcatttcatctaatcaatgtagtataggaaactttggatcatgtcatctcgtttaacgagttttgaacgcatatagaactacccaacaaacccacccgacaaaaagggaaaaagggtatcagcgacagaaaaccacgccttgtcttgggataacatataagcaacctcaatagatatgaaaatcatgcccaatctctgcctccttggggattcccttaatacgacccccgttgtccatcggcttgaacgtaaacctgcttgaaactctcgatataaggctattcctcctatttcccgctgtgagatccagcagctcagcggctgaagttgatgcatgtttctggttctcagtaggctccagctcttgcactcgaagcaccgtgggcccgataagatggcgctcagctgtggagatggcacgggagaggtattcttgtttgcgccggagattttggatattgctttctaaatctggctgtgtttggcccgttgtttcgagctctttttgttgttgatctagggattgcattgtttcgttcagatacgtgagaaactgccagcgagaggttctgtagacgaatcgggtcattatctcagggatctagggaagatgttagtgtagtggtacatatggtggggagggcacttacttttccctctagatagtagagctcttctactccttcgtcaacaaactttctcacagcattgagcttttcccgatccacgattgcgactctgatcgcgtacattaatgtagggatgtccctaatctcctccacgtactcctgcgtatccgtaaaaagctttcctatgttaccggacgtacccctcgatgccctctccgaactagtacctctcttctgcttcaacgcagaatgtatagtaaagtaatcctcattaagcgtatgcgccatttctaaacccgtccgactgcgccgattccgctccgttgaagccttcttaatacgtaacctcacccagcgcccgccggcggacaaatgaatgccagaacggatgcgtgccatgccacgatgatgacctcaagaacgaaaacgcatattgccagccttgctcgtcgacgtcgccggacatatctacatgccatgttttccaagcccattcccagctggggtcagggacctgcgcatttgtgatatcgacaaaactccg

SEQ ID NO: 13994 - DNA, 1779 bp, Emericella nidulans
  unsure (1)..(1779): unsure at all n locations
cgataatacgactcactatagggatcaagagaaccactctggtcggagctccacgactccagaggaacatctctgaaggctactgaaggctagtattttgcctaaaggtgtcaaacctgttgtatttgaccccgcacattgtgtcccgcctagagtttcgcaatggtgagatgtaccccataccccagagccagcactccacgccaccggaggcgcagggatcttcccccggtggagggacattccggacaagggatggaaataacgacaagtaggtacaagcaataagcccttatgccttataaaagtaggtctttcctgagtccaactggcgagaagtagcacggtagctgcgactgattctttcagacattctaccatgaagttcacccactccttgttgattgccgtcggggcagattatgtatcagcgagtgcgcagacagtcaattcccaaaatacaagtggaaatgccattgtggatgtcgcagccagaaccggccaggcccagttcctgggatccaacttcatctacggattccctgacaatggcgtcgaagcgcaggtttccatcccagaccactttttgacgggaatcaagttcaatgcctgccgcgccggtggagcgcaaattgctgccggtggttggggatcgggcggctacgctgagtatattggccggttcaactcgaccctatccaactaccgttccactcgcaagtacaacggcgagtttattcttttgctccacgacctctggggcgctgacgggggctcatctccggatgatcttgttcctggtgataatggggactatacggagttccaaaagttcctggctcaggtcaaaaaggatatcgaagctaacgatatgctggacgggctcattatcgatatctggaatgagccggagctggaaatcttctggaaacggtcctgggagcagtatttggactactatgtgcacgccaccgggctcgtgaggtatgtgttgttcttttcaataatctgggtttctctcacatgtgctgcccctaaagggaatacttcccaaggacggtcatcaccggtccctcctttgcccatgcgccaactatcgacagcacatactggaatagctgggctagcgttgtcgccggcagccgaacccttccggatatctactcgtggcaccagattggcgtctgggagcgcgagccagaccgatcagttgcagactttaaggcacttctgaacttatacggtctaccggataaacccatcgatctgaatgaatacgcatggacgaccgagcagaatcctgccaattcggacttctacctcgctcagcttgaacgacacaatgtccgcggcctgcgcgcgaactggggttctggcggtggacttcacgattaccttgcgaacttggtctataagagcgaaagcgacggcgaatatcaacccaacggcgaatggcatctgtacaactactacgcgaatatgacaggggtcaggttggcgacaacggcagcggcggataggtcagatcgacgtctttgctactgcatcgtggggcgaagtcaagattctagctggaacccgatctgcccaggccgcatacgatgtcatcgtgcgcggtctgacgaactgggattcaccgtcgggcgagatcgggttcgggatctgcgattgactgatgngtcagttgctgagtccgagtcggtggaaanggctgttccatatccgtcaggagacggttgtgagaatttgacacatgtgaattaattgtctgacgccggt

SEQ ID NO: 13995 - DNA, 374 bp, Emericella nidulans
tcgaacagtcccaggcacttttttcttaatggctatgggctatccccctatgacgctcgtgcttttcatgatgtaccacacgcagggggcctgcaacggtgatgctcaggcaggtcggctccgttactattgaaggctccagactcggtttacgagcgtgaatgcatataaacgcacacgttatatggtgagaacactgtgcctaatccacatgattcagaggtaaatgcatcatggtgcttctaccatgttcagtgatctgcatcgatttgcgatataggtatacttattgcatagcacgtcatatcagccgtgaggtgatatagctagatagccatacatacttggagcgtcagctgcactcgctcattgag

SEQ ID NO: 13996 - DNA, 633 bp, Emericella nidulans
ggggggcaacagaaaggataaaagccaaattcgacagcaaaagataacgcgcccgataagagcaccggccaaggaggggaattctcaggatgcctgtgcgacccaacagcaagccaacagcaaaactatgagcccacagggaatgacaaagaccacactccgggcggggcccaccaacacagaaaagtaacaaccccggcggcaatctatgccctaaatggcggacggcgaacgccaacggaaatgaacccaagccaggggaatgggaaacaggatcctcaatcgggggccaacgggaaaataataactgagtaagccaaataatgttgaccaagctagcgagaaaaggcgccctccaccaaggccagggtccggggagaatgcaacaccggctgctgctggctcaaggagaactcccgcagtgctaagctttcataagtgatcacaggcccacaacaaccaattgactgcagcctactaataacattgccccatacaacgaagcatccttggaccaacaacaaaattggtattctcatttaaatcccgacaaggcgagcggccgtacaaaggcctgaaaaacactcacaaaacatcgaaaccccaccgggatgtcgtacaagccaaacaata

SEQ ID NO: 13997 - DNA, 5942 bp, Emericella nidulans
tccgatcatatgcacctgtcattcatatataatgttgcatatcatgggtttggttttattgtcaaactattcgaaatcaatatcattcttagtagtcaccaaagaagctttaacgaaaagaacaagacccatacatataaagtatgttacagcggcaaattgccacccatcaaccaaaccagaatgcggggagagctccagcccttagacaaggccccagcgataatcttgctgatgacgttctacagcattccatgggccagcgtcactgcccaggaggcatacttccgcagagggatcgttatcgttatttccattatttcattaattccatggattatagagtatagactatagactaaagttttcgttcccttcacccgttgcgtccgttgatccgatccgcatgcgtctggacgaatcatgacgtggcactgaacatgggtagtatatagacatcgatccattactatacgggagtgaaaattaagtgatactatcaaagaagggggaacgaacgtaaataatcaaactgctgtaaattaacaagccgcccagaatcaagaacagaaccaatagaaccaataaacaaactcgcgtcacgcctcgctagtacacaatcaaagaagatcaagcaggatagaagcaataaaacacaagataagaattatagaatcgtgcctcacgagacaataggcatcgccgaggcaggctgatcttggccctcgatcgccttggtttcccgccgtggaacctggacgattccactgcggagctgatctagcttcaccaccccgggccctgtacagatccgcccggactggatggcgttgcgtaggcgtttgcgcctggcctctccgctgcgctcctccgcccgcccgacaccctcgtctacccactcgattcgcagtactttaaagctcatgccatcgtgattctgctcccagacccgcgacttcaggccaaacagcacgctgctctcatatcgttccagtttggggaggatgagtaatgtgatgtggaggtctttgccggacggcggtggcggagggatcttgggtcgctggtctccatcgaggcccatgtccttggccgtcttaggagcgtgctggaatgaatctttgatctccagatcgagcatgtcgggatccacatcttccccccaggccccgcggataaagcccgagtggatcgccgctgcaactgggtccgaatcgtctgtgtagataccagtgccccagagagcgcggcgggcgcagatttcttcgcggtggctgttatctatccggaatcgagggacacggatggtgaaggtgcagttctccttgccatcaaagcgaggaaggggcaggggagtcgttgtgtagccgaacttggcactctccaatgtcgcttttgcagtcggtactccgatccgtggagcatataacgtcgacccgagatgctgccgaggaagatgagcgactctcgagagcacaggctctatcgtaacaaccgtccttggttcgcgcattgacgtcatggcagtggaagctgcggtccggggcacgtggtggtggtgatggtggtgatggtggtggtgaggatgtgcagtttctgatccaagtccatcattcgatcgatgaaacatattcatgcccagtggtctgtgggagctgccgaacggggaatgctcctcttcaggtttatgatggtggtgatggtgactggaagatattagtatcaaatccacgttaacgagttcaaccacttactgatggtggtggtggtgatgcgcagcgcgacttcgtcgaccaccacgcgtagatcctcccaggcgtacgtctacaacatcctcaccatccgcgtgattctcttcctctgactttcttgggcgtttcccggtagcggagctaggccgagcaatcttactctcatctgtttgctcagtattagtgggtcgagcggttaaactgtcacgcttaaacggactggcggtcatcggtgtcgaaggtccgctgcccgtgcttgtagccgtaacgccgccaacaccgctcccaatgccggcaaagacccgccctagttcgctcttgattcccgattctccggcaggaccaagtatttgagcttgtgcaccttgtacggcttggggcaacggagaagctcggccctgttttgcatttaaaccgaccccaagaagattccgatggtgtagcaactcgtcgctgcccttgcgaggttgatcatccgcaacagagtgtgcaaacgtagaagatggaccagaggaggtcccgccgtatagatgagatccgctgtgtcgtttgttgaggtacgctggctgatcgcgtggggaggatgtcttagggccctgctgggtctggactgggagcggctggcgagcacctccgggctgggaacctagagtcttggtgtaattctggatcgcgccgaaaccgaagctataagagttctgctccgccgtcgacagccgtttcgattccggcgaagctggttgcgaacgacctatttcccacgctgatgacgagctctgccgaccggctgttgcgtcgcggtccgcgtacaggacccataccttgagggtgcagcgcctaccttgttttctggctgtgacataccccgttctttgtctcgacgaccctgctcctcagcctgacgatcaccatacaagcctgcataccgaccgtggctgggaatcatggcccagatacgaggatgcccgctgttgcgacgctccaattgaaccctttccagaacaagctgaatgcgttaaaaccgggtttaacttgaagcccccgccgaagttcaaggtgttgtggctggctaattggtccgggtggcccgctaaagctcagccgacgagtctcattaccgttatacgacggctcggccgggaaaacctgcggcgacgggtgcgcatagctgggcttacccgaatactgcggcgcggacggtagacgagacagaccgccgtatttgggctgctcggcagccgtcgtcggagggccgccgccagagctcgatcgatacggtctgctaggctgattgttcctcgaatacggcttttcaggggtctgtgatcggcgaaagagggggtaatcgtgttgcgcaggtcgagcaggagcagtaggaggagacatggcacttggagccgcgggcggcggcggcgcgctgccgaacgggccggaggaagcgggaagacgcgagaaaatagacgagcctatatcccgcggtggtcggtcagcgtccgagcctagcatggcggatatcgacatgctgctcccaggacgatgatgggccgcggtgctgggaggctcacgcgacaagaatggtgtggagagggaggaggaatttcccgattgaccgcgcgacgggtaatgctgcggtggagacggaggaggcatccgacgagcgcctgacgaaggagcggaggactgatctgactggcctggatgatacatacgagcgcatgttagcaaatggtaaaataaacagcaatgtgagaattcagcgcgtaaaggtggcagaagatagatgcctgggcgttgttgggctgagttggctcgggtactccgcgccggctaaactcgcttctcctggcgaagacagtcaagagagagcgaaaagcctgacactcaccaggaaaggccgaactaccgctgctgccccaggacctccgtcgggagtggtcatgcgactggggagggttcatatcgcatgggcggacgagcagcgaagcgagacccaacggggaaggacagcaaggggagatgaagcgacgcgaaggacgcgggcgatgagagaggtggaaagaaaacacgagccgagctgggatttgtggaggacagaagaaagagaagggtgatgagacagatcagatgggagacgggaggatcgaaggacctctttggagacgagacaatgataggtagtgaaatgtgatggatgatgaacaacaagcgcaacggcagattccacgctccagtagtgctactaaggtagtgggttcgggctggctgctcagctgagccccgtgactgctgctccccgtgattggcctccggaacgcgatgccctggcacgcatcactagttctgatcggggctagcgctcccgagcgtgcctcaggcggcagtcgatcaggagctgctggaccggggcttcattggctggggctgagtggggctgaaatccaatgcaataagggataacgtgaccaggtggatataaagagacagtgcagaggtacataaacagcgttccctgtagcaaaagactcacccgagtatattgtgtgacggtcgcgattcccacggtaacgagggtcaggatttgcatccgccgccgaactatcatctcgatgagcccgcctccgtgaaccgtgggtcgtctgtgagacgtgatacatgttgtccgccctccgacgtggcgtatacccattatcagcggaatgtggcgtgaagtcaggggcgccatctggcagtaagtgattgtttgtggctgacgatgctgatcggggcgtttcgtgacgcggtttgtcgggctggttgtagaacggacgcaacggtctgtgcgagtacggagaggagcctgatggaataacagtagcagcagggccagcgctggcggccgcggcgccagcagcgacagaaagagctgtaggaaccggggggagtgatgcagcaaagcgatagtcgtgagcctgtgttgacagcgtatgtggaggatatgtcgagggcgcgggatagtgcttctggtaattcgtcattgttgagtgcgagattatcatgtgtattagacgctagcagtcgagaaaataacacgcatcgacgagggaagaagaagcaggatggaatgatcgcgaagaggaaactgtttatttgggttggggaaggggagagaatgcaaattacggtgagaaataaccgaagtcaagcaaggacacaaaagctctccacgcgacagaactcgcagcagctatagtagcagtctagcagtctagatcttttggagacatcagaagaaaactgcctgcgcccagccaatcagatagtccagcgaccccctagtactgcagaagcagcggggaaaaaggtccacgggcgatccgccagattctgcggtgatgccggtttaaggcatcgttgggctccgtccacggtcgagcatccttattctccactcagagcaggcccttgtatgtatgatttgcagtcaacgtggcaggctggaaggctactaggttgggtcgcattactcctaactctggggggcggggggcgcgtatagtttatcgacaaaatttgttcaacgatatgggtataaagtatgatacatgatcttattgagatcgacggagtacaagcattaggatgatccttttatagctcttgacacatcgtctatcaatgacagccgtcgacatcctctcccagagaccactactgtaaccggccgcaggataaggtcctgctccgcgtttcgaaatgagaggtacccgctcttgtttagggcctctaactgcccaaagagcaatggccacgctctttgcagcgttgtctggacgtccaataataatatgaatgtttgcgtcgagtcttcatcaaagaggccgaccggcacgatctcggccttagcaccgtgttttttggttgagttgatataagccggattccgtgcatccaaattggtctgaagagattgaagataaacgctctgcagcgtgtgatcgtcattgaggttgagcaaggagctcccaacaagtaattcgcgatcccgttgccacaaatcgaccttgacgccagtacaccctgaagcaaggatatactcgacggcatcacccgtcactccatctgtctgtagcggtgcttcatactttcagattgctgatttattaagttcgactctgagcccgggcgatcggccaattgtttccggcgtctgta

SEQ ID NO: 13998 - DNA, 1537 bp, Emericella nidulans
  unsure (1)..(1537): unsure at all n locations
taattaagcttatccctgcaacctcctgcatcgaaagccatgtttcgtctcattatggaacaaccattcgatcagtctgtaaggtgtccaggggttgtgcctggacccgattcttctacaagttctcctctggaagaagcaccatagatgcttagagaacttgtgaataataattaatgaaccaatatctcatgtacaagcgcaagcaaataactccgaaccttatgctaatcacaaagcataccaaggcaaaccaagatcaatcatcctcatgcttcctcttgaacttcaggcccttcggttgactaccgtaactgcgtcttccctgctgctgttgcttcttatctctgctgagactggacccaagctggatgtcaatacgcggtggcgtcgagaagccgaagctcttcgccactttcacgagatcgagcttgtgcacgtcgaaaacggagcgcagggagtgagaggcgtacgcctggaggtaggagcggtagccgtctttggcggactgggggaatgagttagtacatacacatcgtccacatctcaaaacgagttctgggctaaaagcttaccttgttgagatagtaattttggctgatcagcttctcaagttgagattggacgttcacaatcttcttggctgggaagtcgaactccacgactggtactcgggcttctttgaggtacttgaggaacccaacttcagacggctgcaggaacatcaaactgcggcccctgccattggctccacgggcggtacgtccgactcggtggatgtagtctcgggtgtcgtctgtnggatcgaactggatgatccagtcgacggcagggatctaaaggtggcagtgggctatagctacttcagaggaaaggaagacatacatctagacctcttgcggcaacatctgtgcagatcaagactccttgcttggcgttacagaactcaaagaaagtgttggttcgcttctgctgcttctgctttccgtgtaggtccagcactggaaggtcaatgtagttgaggagttcagcgtggtatttcacgcaattgcagctagagaagaagacaattatcttcttcttgaggttgcgcttcaagaaggagaagagtagcaggaatcgcttgtcagcctcgcaaatgacataaccctgctccaatccctccactgtgctgtgctccttcctgtgatcgacgttgatatacagaggtcccggtcggagcgatatccgcgccaagtcctcgacttttgtggtctgggtggcagaaaacagcatagtctgtctgtcttcgttggggaggatcttgataatctggcgcatctcatcctcgaaaccgacttccaggattcggtccgcttcgtcgatgactaaggtcttcaggtttttgaagacaaagccgggggtgttctgcagatgatcgagtagacgaccaggtgtcgcaatgagtagattaacaccctttgtaagcttctccgcttttgctcgtcggtttgcgcccccaaataacgataccatatgtctgggctgtgtgcccgtg

SEQ ID NO: 13999 - DNA, 682 bp, Emericella nidulans
gatcaggtcatttccgggtttgtcgggatcagaccgtctgctgaagatgtgcttgacgtgaacccgctagcggatgccgacgaagtctcttacttccgtcttgagaacgtgctctatcatggacacgatgtttctgtgcaatgggatgcagatggaacccgatacggctcgtcagggctccaggtcgaggtcgacggcgaggttgtcgcaagttccgacacattgtcccggctctcggtcaatatcactcgcgtggttccccctgctatcgaccgtcctatcgcaaaatctatccagctgggccttgacacggaataccctgtcggaaatgtatctgttcctggagttgacgcgtctgacatccatttcgtcattgatgggcgcgtatggttttaccccgaaattcaaaattggtgggacacgccaattggtagtggcgaggagatctggtacgagatcaatttcggagaagccgtaaaggtgacgagggcagagatcgcattcgcggttgttgaggaggcgaatgtcgatatccccaacagctatcgttttgagtgcctagacggggatgagtgggtaggtctcgatatcgatggggagtatgtagaggctgttgggaatggaataacagaagtcagctgggctgctgttacaacgcagcaggtgaggttggtgtttcttt

SEQ ID NO: 14000 - DNA, 1499 bp, Emericella nidulans
atagtatcaccactataggctatcctgatttcaaatgttatagctgggttcgttaactggcggtcgtgatcttccgctttgttgtccttatctgaatccagactgcggagcattggcccgcgcaggaaaggcggtctaaccaggcagtatcgaagaaacagctagcgaggtaggctccattaacctttccatccttcttgctcggcttgatgcgacaagttatcggctgctatgtgaatttaaccagaactgcgagtatgtgtcagggactctcctgggtcttcttccgctgaagaagctactttggtaatgtagtgaagcccagcgtcgcaatggcctcaacaaattccaagccgaagagaacaccgcggagggctgcaaaggataaatacgaagaggaaatattgatgactagcgacaagtctcggcttattgatttagatctggtggtgagctagatacaactcggacttccgccgtaaatacattgctaatcatcatttgaccaatatttagaaattgctcgctctccctgaagcttggaactgtcttgaagaatccgagaaacaagaaatcctagatttactgcctaacgacacgcatccgaatcctaaccgtccaccggatgacccaaacgcgaaaattccccctttaccagagtcttttttgcgctactcaactaattggcgtgaggctattcgtcactttcagttagaccttcagaatggacattatgatccgcagtggatgcgtgaggctgaagaggctgttgcgcacgagctgctggcaagttcgacaagttcaaagaacaagaatttgaggagttttggggccaaaaacaaaaaatggatagggccctagctgctggcgaaagctccaagatcaaactgagtacgctcattaagcatggtgttatccgaagaggtgacatttggaaatggtctaggagtgtccgtaagatcttgattgaaaaggaagccagggtacgtctaggtttgttagcatgtttggtcctctaggtagctgacacactctccagataattgatgtcaatgaatcccgtctgacgtttgctgttcctgctgggcgacgtacttttctaaaaactccagtggccccaaacgcaaagactacgggtacagagaggagaccagaaagtccaccagagtctagttcgatatctccacctttaacacaagcaaatggcgcagtatcagctgatataaaagaaacggaggctggatcctccagaaaacgcagtgttgagcccaacactgagatcttaccgaccaagagacagcgtggactctcgcccaaagggccccctgcccaagggcagggggcggcgaacgccgcagctgtagaaatcaccaacagtctttctgagaacgggatgaagtcatcatcgtctagtaacgagcacagccttgactcgtctgcagaaagtcaggaaagtggctccaattctggagcagcccctcaaaacaagaactgcactg

SEQ ID NO: 14001 - DNA, 577 bp, Emericella nidulans
cggaaagcgcaagcaggaaacaaaagatcaacgcaccgagatattagcccccacaggacggaacaccggccggggaacaaaacagcaagcggcgaccgaggaccccacccagcccggaaaaaaaagctcggataacgaccaaccggaaagacgcaaacggcccgaaacgagcccgacgagccaacaaacgcacacagaaacacaggcccgcgaaggccaagaagcaacaccccgcgacaccagaaggcgagcagcgcgcaagacaggaggacgaggcaaaactcgcacgaaccggacgagaggcaaaagccgactcggacgcccgcagggggcacacgcacgcgccaaccgagggaaacccggggcccacggaggccaagggcgcaagaaccgtaaacccggaacccccacacccgggggaggccaagggaacgggaagacgaaacccggggagccaaccgagcccggggcgcccccgggggcgacggccaacccacaaacgccaagacagagcgaccaggcaaggcgccccgcaagccggaagacgggagcaaacccaaaagcaccccgaagcgaa

SEQ ID NO: 14002 - DNA, 399 bp, Emericella nidulans
gccagcaagagcaccacagcacgagcgcgacaccttatctgccctgttccacactgcgggccgtgcgctggcgcatccaagggtgagctcgcacgcacctcaatcgtgggttccataatagacacagaagcctatgtcatatcgcagcgtggcgaaaacacagaaccgaatgcactacagcggccagtgctcgttaactgtcataagacacctcagacagagtcaccgcaacatgctactaactggacagtgaaacacactgctgagtgacaaatcaggagagggagactacaagacgtgagcgactgcacccttctccagtttggataaaataggaagcagcagctggctattctcagccttgacttatgtagaacccgcttgaccgtcgcagctcac

SEQ ID NO: 14003 - DNA, 1970 bp, Emericella nidulans
tgaagcgaccctaccgttgaaacagcgtcctccccaacacagcaacctcatggctgattcgaaattcccgactgaactcttcgcttccagttccaaagatgctgctggctaccgttccaatcaggttcaggatggccacggccgaagttacccagatcttccgcggcagaggccaattgagtgggatgtccttgtcgtctgggccgtcgaagtccaccacatgcggattattgctctctaggtctgctccgttgaccacggttgatgctgggaattggctcattatgaattagaagaatatgatgctttcttagtttatgacaggtatggccggcaggcctggtcctctaaataaaacaggtccgaatttgacatcgcatcgctggggatccgatgcctaccggcatcatcgccgagggattgctaaccaagactaatatcaagccctaattgttacaagtacatcaaagaccgagtcgccgtgagatccactctgtaatgatgctaattctggtaccggtatttcctttagtcatggtcttcgactttccgcagtagacatacactataaatgaaatgtgggcatatattatacttcctaaatcgtataccgaaattcaacccatcaaggtcgcctcaaacacccgctccacctctctagccatcacttcaacccccccaaagagtacatctgccttgatcgatcttcgaagcgcatccataccaatttgaagttcctccacgagccgctccgcgtcttgcacttccgttgtcacgctcggctgctcaaaaagataggcgtagctgcttatagtcccagagcacagtgctgtattgacgcactttagcaccatcgcgagcgtataaaagctctgcatctggcagctggccatgtaagggattgagcgcggagagctcagccgccgccacgatgtccagggcatagcggcagtcatatcaacggtagtatcagagtagcttgggtttggagatggtaagcggcgaaacacccgggacacaaccagcgacgagtggagacatatccttattgattcccgctctgtaaatgggaagtgagtgtcgacctcaccagtctggcttgtcgagaggtggaagctttctactaaactggatggtgtacagctagcatcgagggagaggaggtcaataggcccgtcgaggatcctacgacggtctggaaacgcgcggacactatgcagtgtcagccgagaagtgtggatgagggcgtttgatatagcccagaggttgcgagaggcatcagcttcggcgccctggtaattagttacgcagcggaagcggtctgcttcggctgcaagcccgaggatgagggagtctagatcttttatttcttcccgtatcgagaacgataaactctggcccgtccttagctctcgatcgagctcgcggccgatgcagcagctgcggaggagagctgcttgggccttcaccagtaatggccacggctggacatgtgatggatggttaggtctgagggtttcaatggaaagtaaagtacgaacctctcggcagccgcggaattcggggaacatagttgtgatccggatgtcatcaaaggtgataaaagggggctacttaatgtcaatagagctgttctagtgctatcgtgaaggtttaaactaaccgatgtagtcattatagatgactggtatacgagaaacatctgcttttattagtatcgtcaacaaagcaacgcagattttactgactactgcccaccagcaccggcggtgcgcatccaagaaaccagtctgtggcgtttcggtatgcaatgacaggtccatggcagcagtcagagcctggttcgcccgtaggcgcattttcgggacattcccgcgctggcaacactcgtataggctaagaagggccaatgcgaggacaggctccatcttctgagggatcccttagttagggttatcggccaatctaga

SEQ ID NO: 14004 - DNA, 1156 bp, Emericella nidulans
gtctcctctcgatgacccagaaaactttattggtatgcttcaacagtcttgaaccaatcatccagccgtcggtcaggaatgcggtcctcgaacccaaatcctccaatcaaacattcgtatacccagtagctcagttcacacctctgctgaagcccgacacctccaccgaatttcctgccgttacaacaattttacggctcctctccagttcaccagcgttttctggcgcccaatggctcttcactgcgggctacttcaacatccatcccgttctctcgtccctcctgatagcaagcacctccccatccaccgcccaagcatcctcaacaactcgcggcaccgttctaaccgcttcaccctgggcaaacggcttctacggctccccaggtatatctggcatgctcccagcagcatacacccatctctcagcccgttttctcgaccgagtcgccgccacgcaggcgacgaacttcatcgaactaaaagaatggcgccgtggcacagtcggtgaaccaggtggctggacttaccacgccaaaggactttgggtcacattaccggaagaagagaaccctagcctgacctttgttggaagcagcaattacacaaaacgcagttacggtctggatctagaggttggggcactggtagttaccggggatgaggaattgaagaggaggttgaaggctgaaacggattggttgcagaccgatgcaattgccatatcaagagatgatttgagaaggacggagaggagagttaggtggaatgttaggttggcgatgtggattgttgagaaagttgggggtgctttatgatcgaattagacttagcggcttaaaatgaggtctgtatatgtagagtcatgatagagctgtaattcaagctatagaaagccgttgcgggatcggaataatcagctgttcaggttattggtatgatgaaggctggatatggacgtaatatagtttatttaaaactgaagcagaaaaaagcctccatcatatttcattcattttcgaggtatatcatcatcaaatttagtgctaagacttttatatacctgtcccgatctatgaggaaatgaaaatcctccccatacgccttgaaccaagctctaaaccatcaatgagcatcaagaagggatatcattgaa

SEQ ID NO: 14005 - DNA, 831 bp, Emericella nidulans
atccgtggagtccagcatcattttggagaagggcccaaggaggttactgctggaaaccaaattgtgagaggcatttagtgatggcgtagtgttccggtttcctgtcgggagcttgaatttgctaaagaaaatgggtatatgtcaacataattctattcctaaagacggaagttgctcacaattcagtcagtttctccccatccaatagatgctgcaggtactcccgggaggtctctaagcggcttgattcgtggcatcctgatcggatgtcgtcgtttagatcattcagcgcagtgcggccggactggaggatatgatttattgaggtcgtagcaggagggcggccaacatccggacgtaatatgcaatctagagatagaagcgtattaataatattcacatagctctcactccagactcttgctcgactcacccaatccaaatatcggggtactgtacattggagagtactgcagggcctcttccacagctaatggtctttcccgacgctgcgcctgccccatcgcaactcccgcctgcccctggacatggctatttatgacgacttggacagccggacgccagtttggatccatagcggcagtgggaccttaatgagaactgcaggtcaaatggagaatgggaggtattatttggaagcgggaaagacatgcttcactcatggctgtcagtcttcggaccgaatttccaccccatcaaacgttcatttcaaaaggccctgtagacgttgaccggacgaccgacctgtttagggatgatttaaggcacggccactattgtcttgcggctgccgtcttccctggccgcccg

SEQ ID NO: 14006 - DNA, 417 bp, Emericella nidulans
actcaaacgggcccgccagccagcttgccgagagtgaagcggcccaaagtcatgatacagccactggccagccaataaacacactactgccgacaaagggatgactaccgggcagacagccagcaaacactcatagctgcccagatgaacatatacaggatacatgaaggagccatagtaacagctagactagggatgaagcaactaatacatactggaagcgaagccaaaacataggtggactccagcacttgcacagaactgtgctactgacgctgatacaagctcgatcaaagcaccgaaactgaagacactgctactactgttgacggggctaactgcacacgaagagggcgcaactcgcaagcatacaggcggtcagcctgccaggtgacgaaccgccattagcttgttgag

SEQ ID NO: 14007 - DNA, 898 bp, Emericella nidulans
atgccctctccaacttctgtcatctcctgatgttcttctacctagacttttctaccattatccatgctgacagcgtctagtgaagaaggcgcccggttcccaaaatccatgtgctcgtctggtgtgtgggctggcgagatcccactccagcaggcctgggatctgcgcgacatcaccgacgacagagtcacgctgcggtcagaacttgagagacatgggtacctcggtgaaaccccttgttcacatgtcgctaaccccctcgctgcgcattttgagctgcatatcgaacagggcccgatcttgcaggattcaggacggtcagtcggtgttgtcatgggggctcaggggtatagatggctcaagttcactgtgaccggacaggacgcgcacacagggacaacgccgttgaccgcgcgacgggatccgctgcttgcggcgagcaagatggtggttgccagcaatcagatcgcgaagcgttttggggcgctggcttcaacgggtatccttaagatacctgaaaactcatccacaaacacggttgtctcggaggtggtgtttaccctcgatatcaggcatccagaagacgctgttgtccgcactgtcgaggaggagtgtctgcagtcgttcaaggccatctcggcagaagacgggaggggtgttgggctcagttggacggtcgagacggactcaccggcagtcaagttccatgatgactgtactggagtaatcaagaacgcagccgaggcgttacttgggccagagggctggatggagatgacaagcggtgctggacatgacagcgtctatacgagtcgacactgtcccaaaacgatgatctttgtgccgtgtcgagatggagtcagtcaccatccgacggaatactgctccacggaagact

SEQ ID NO: 14008 - DNA, 1135 bp, Emericella nidulans
tcatcttatccaggttgagtggacattcaattaaccatgaacttagtgttccatacctatacttcgatggataaacttgtccccatccggaggacacgggttagccctagggtcacgtgttaaaaagggaacgcggctcgcttgtttttccgtcctagcgcggcccacaaattccttagcgtcattttctcatgaacttcgaaatcgtcaagtttgatctttctttctttcttctcttcgtcaatcccgtcaaccagctcaccgcggatcacagtcgacaacaatggtaagcatataacagttcaatttcgagttccttcattcgaatagagctctcgattgacttcgcgaaatgtcgtgagataattatcacgacgtttcgcagagtctcgaagcaatttccattgaatacacaattccccatgggttgcgtgtgtcagtgatgatttggctggagtcacgagtctgtctcacgactgcttgtgttctctctagagttcaaagaagatgcagcattggtggatggtttgctgatcttcttttctcaatgacagcctgcccccaagtccggaaagaaggccgcccccctcccctaccctcagggcaaggctggttctagcaagaagggccccaaggtatgtcttctgcaaccaaacccactacgcttaacaagtgctaattcggtttcctagaaccctctcatcgagaagcgttcccgcaacttcggtattggccaggacatccagcccaagcgcaacctcggccgcttcgtcaagtggcccgagtatgtccgtcttcagcgtcagaagaagatcctgaacctccgcctcaaggttcccccttccattgctcagttccagaacactctggaccgtaacaccgccgcccagaccttcaagttcctcaacaagtaccgccccgagaccaaggttgagaagaaggagcgtcttcatgccgaggctaccgccgttgctgagggcaagaagaaggaggatgtcagcaagaagccatacaacgtcaagtacggtctcaaccacgttgttggtcttgttgagaacaagaaggcttcccttgtcctgattgcccacgacgtcgatcccattgagctggttgttttccttcccgctctctgccg

SEQ ID NO: 14009 - DNA, 795 bp, Emericella nidulans
gtaacgcggacagaagtcgggtggctgctgcccgggtgagcttagattacggttgcgcactgggtgagataggggttgtgcagaatagacagggtgcgattctcaccttgacttaactgcctccccttccttggggacctaccatctcatatagttctaagccccagtacctgctcacttacagtaatcgatcagagattgactaactaagccattacttcatacattggggcctaaatagccacaagaatgttgctgtctagaggaggttgttacaaactaagggagtatggtactgtagctaatctctatataccgtgacaagctaggtttctagatatcttaaagcatacaacaaaggcagctatttactagatccatgatacagtacaactgacatcttgccagatttagtatttctagagaatctcacaatctcagtagatcctcctgcagctttagtagtagcattgttttgttacatggctgtttaacaatcactcttctttacaagcttgacaagtctgatgtgatattatagccagtcaagcagccatggtgttgaacaaaatagaatatagagatagaagcagaatgggtagagttatcagatatttataatattgatagaaggggattgggagatcagagacttgtggtatttggcttatattttacggctccaatagcttcaagttctggctttattgaaagatcctgcatagctagaactctacatcaggctatattaagtataagaaccttggaattgagttgaattactttgttagtgct

SEQ ID NO: 14010 - DNA, 632 bp, Emericella nidulans
attattattaggtacttattgacaaccctgtttcctgacctcatgcgagccgtccacctaaattaagaccgaaaggagtacaagttacggttaggggcatcagcagtgccggatttggcagcctgaggggttcgtccgccctagagttctagaaacataggtggatgctgcggtctgaacgatattgagtagatttggtacaaagaagagccctgacagggtcaatctgggaaacggctggtgaaactgagcttcattgtagaggcacgatctaggaagatgtccagacagttaacgtcccaacggcccaatcacaaaaaaggagcaaaaaggacggcaggacaaaaatgaaagaggtgaaaaaagagagaaaataaattcccaaaggatgaggtacaaaaaagaaaagaggctttcccattattcccagcagtctgataacgactaactggactgggacaaagaccatcaacgccagccatcgcaaccatcagaattggtccaagctgttggttctcactagagcagcgttgtagccagattagcgtgtcctggttgctgctcacagaaggacgaacgccgcaggtctgcactgcagtcttaaagcagctagataccacctctttactctc

SEQ ID NO: 14011 - DNA, 483 bp, Emericella nidulans
  unsure (1)..(483): unsure at all n locations
gtaggctgcacccagggggacatcgtatgacctggggtacggactcatcagacacgacgattattttgtacaacgtgccaaaaactcgcgggtgactaccctgactacccgcagcggccctgagtgcgccctggcgaagaaactgggacataccgggcatttccaggggctcgagtgggaccaccgaaccgggtgaagggcgaaggccatcccgccatgacaccctatcttcgagcaaagctatcacatcagcgatagggacggcctgaaaacccagaaggcgactcagaacctcccgcagactcctcttgcgaggtcacagggccactagtgattacaaccccaaggccggaactaacacgctcgctggtcttggcacactgcgcacgagcagggctgtccgacagcactgacctatgaccaaggatcgactagccgatgcgcaaatggaaatcaatgtgactggcggngacatcaatgatc

SEQ ID NO: 14012 - DNA, 1157 bp, Emericella nidulans
tctcagtggcacgcagaccccgcgagatgacgacagcgagtatgactcgcaaatggaagatgaacaagacaacagcatggaagacctcgggagcagaggcggagtccttaccctaggcgatctcacagcggtcataatgggcgtgagttctgtcgaagagttccgcaaattgggcgcgcatatcgtggcacccccggcagaaccagcaccagaccaagtaccaccgtctgataccacagatgctggaaccccaccctccaagaaacttggtctcgacgttggtgtcgacggcttacactattctcctgatgaagccgagaaactcgaaaaactccgcaagcagcgcgctgaactcttccaccgccgcgatatgctaactgcacgaaacacgttcctcactctcgtgcgccaccgctcaaagagcatcctcgacatacttaagaagaaagatcccaaaggcggctggaaggatatctgcggcttcgatacccggcttgcctggtccgacgaggaattcgacgagtggaggttgtcagaaccaggtaaaaaggcgttggaggagggcacgcctgaagccttggcggcaagttatccgactagcaatgtcgataccgatggcgatacggctatgggtgttgaagatgaagacagttctgcgagtcttacgcgtggcgtctgcctgaagaagcgatgtgagcggcacaagcagtgggtcaaggtgcagcagcaggatgtcgcgtttgaggagcgcacgctggagagcgatcttgctgagtgcgagaaggaggcacgggaggtggtcgaacgtgctgtgctgcgaatgtgggctgaggacgggaatgctcagagtcagctggagaatgggtggtaggctgcatgccgtcttgagttccgtggactcgaattcagctcgttttatacccacatctcttcaccgctcaattgcagtttacaagcagcgaatccctttgatacccatctgtctcgcgggaaagaaaggaattgcattgcatgtcggagttcgtatttgttgcgggttgcatttaggcgtatgctggcagattatattcggcaggataaaatccggcttagataaatagcttatcctataagatacagtatgaatgaggatttatcaaccttggtcatgtacatta

SEQ ID NO: 14013 - DNA, 1807 bp, Emericella nidulans
  unsure (1)..(1807): unsure at all n locations
aaaaattgttgaaaaaattgggccacccattttaagaatggccaaaatgggtttttcaaagttatgggtcctttcttcggcaactactgggctttttttccgttgtttctaccagatcattctgattttcatatggctctaagctgacatgataatgaaagacagtgccgcagagacgtgacttgaagtacaaggtcccgatatttgcgacgctgctcccattacgttctttactgcccttgagaacgagctactcgattctccgttgacaagtacagtccctaaactgtattcgccactgttcattcgtttctgcgccaaaaaaaaattaagctttcggacaaacatttgaacccatcagaaaagctctgcgccaaaaaagctaaggaagaccattaagagaatggctactatctccgctacagccttgcaagagggtacaacaccatggcgcaagaatctatccgcccacgtcatctgccccgagtgcaaagaaatgcccccaaatctggaattcccaggttctcatgagactgtttgcggatcctgtggactggttcttgcggatcgagaaatcgacatgcattccgaatggcgtaccttctcgaacgatgaccaaaacaacgacgatccttcgcgtgttggtgatgctacgaatccgctattgaatggtgatcaattggagacgcaaattgctagtggtggttctggccgggttcgtgatctgtaccgtgcccaaaataaacaatcgagcgacaaggcgaataagtccctccttgccgcatacaaagaaatcggtgctctctgtgacgggtttggaatcccgaagaacgtggcagacactgccaaatatttattcaagattgtcgacgacgcgaaagcattcaagggcaaatcgcaggatgtcatcatcgccggatgtattttcatcgcctgtcgcaagtgcaaagttcctcgtactttcactgagattttcgctgtcaccaaggtctcaaggaaggagattggacgtatatacaaagcccttgagaagttctttaccagccagaatctcgagcgggccaatgcagttgtgtccaacggaggtgttcccgaccccaacgacacgtacactgctacgacctctaccaagcccagcgacctctgcagccgtttctgcaaccttctagatctaccattccaagtcacaagcgtatcatcggccctgtcggatcgcgtgactacggagggcaaccttgccggacgctctccgctctccattgttgcggcgtgcatctacatggcttcgtatctcatgggccaccccaagtccgcaaaggaaatctcccaagtcgctcacgtcagcgacggcacaatccgcggcgcttacaagcaactctacaccgagcgcgagagctgggttgacaagatggttaaagatgtaaggagcctgaaaatcttcttcagctaaatcgtctttatcgagccggccgtttctgtatacactgcctatggctgtatctacctttaagcgttacacgttttcccacctgatggaccatagctctttcagtaccattccaaggaaactgatttggcggctccccgtgttttatgttccaaaacttttttttccgcccggtctttaaaaatatccaattttcaccnnnntaaacccaaattgttaacggttttatacatctttaaggtgggtttattaacaacatccttctttttcccccccgggggtgtttccccccccccgtttttttatgccttgtctgatagnnaacatctctctttatanggaatatcatttttttgtggg

SEQ ID NO: 14014 - DNA, 562 bp, Emericella nidulans
tcaccgtgcattgccaatatcgcacctaagctctgttttaaatgcacaatttatccccggctagaatacacgctcgatcaagagtggaggtgtgccattcgcccttagaccctaactcacggtgcctagcctctacctgtgtcacacggccacgggcccggtccactatatagggtcaaccccgtaaaaagacataaacgagactagcctaacgagactccattgtggctgggctgggaggcttggagcatacatagttgcttacgcctacatactccgtacgctaacagcgttgggaaggacagttgcactatcaaaaaacaaaagggaaatcaggctacgtctagagcggtatggctatctcaacaagaagcattggccgatctaatgatgacgaatgctgcaaccaggatacactctcagctggactgctgccagtgaaaccataacatgtactatggataaatactgctgctaacaatgagggaatggcccaccttcaacactgacctgcttgactgcagctgatcctttagcaatacagccaagtagttgcagaagt

SEQ ID NO: 14015 - DNA, 1437 bp, Emericella nidulans
agcatggggaggattgggaagtttggactggcgcattggcgttgtgtatttgcttctcctcattccatcattctatacctacctacctacctacctacacacctacccacaaggacactcgatttcctctatcatgtatctactatagatctgagagatatcctgtctaacattccgcgatgataccagctgacattgccaaaaatcgcacagctgtaacagctgatcctgtctcaagcggtaatttcctcaaatttaaaggtctataacgatctctatcatcaacataagacgtaatcacatcacataattctcccagatcgaatgtatctatttagcagcctcttcccactgcacgccagcccattcctccctgtacccaaccgctccaatttcctccggcccacaattcctattacaaacacccagaatgatagtcccccactccattccgccatcatccttcccaagtccaaccccctccctcccctcctcaagaacactaatcgcatgcgggacaagctgcagttcgaacactctttcactgctgcaatactgacaccgtggcatacgactcgcaccgctcgacttcgtactgactttggcagcagaaggggtagagtcatgcaacaactttcccacggcatcggtatgcgagtatagcaaaggggtaccgcggaattcataacgcagaacttgctctggattatgaccgaggcgggtagagaacttgaggaaggccttgtcgagatccgactcgaacgcgtcttttgcatctgcgccgccgctacccccctcggcgtcttcgctcgtatcaattgtgacgttgtcagggattttgggggtcggcgggcgcgagagagtttcgccttctgcatcgatgtagaagtttgtgtaaggctctgggaactcagagcgtgccggccagggagttggtgggccagctggctcggcggcttgagtggacggaggcggcgaggagacgcggactttgtctgcaaatgattcggagagggtgttgggggttgatttgaattctgtggctgacgcgagaggagcaggtgaatggctagcaacaggggcagcgaacggattgcttgattgtgtagaacctgaagccggctttgacgagaaagggtttgcgttcgcagagacgctcttggtgagagttgagctaccaaacaggcttgcaccaagatccggcttgggtgcctgggactgttcgaccaccttcttctccggttcctgcttctcaatcttttgcggcgcctggtggctcttgtgtagtcttgtcgcgcgcagggctcggatgctgcctgcttttcggttgcatgctttgcggggacaggagaagatgtacaagcgtctgtcagcgtcggggaagtgctcatacagctcgccgtctagctcgaggaggaggagcattgtattgttgcc

SEQ ID NO: 14016 - DNA, 1088 bp, Emericella nidulans
cagtcaaactctagagaagcatatacgcaaaacctaattatattttcttattttattgctgcatccattcattcaatgcgcgcatccaatcatataacatagtatgctatcctatcctgtccatccattcataaacataaaatctcatcaaccatagaagcacccagatcctgattgatatagcgatatagaagctcggaacaaactctttatacaacattagagaaatgcaatcgacaataattgcgggggaatgtacatgggcgataaggcgatggtaagatgacaaacatcaagcaagtcgcgtggtttgacgaaggtcgaggtctctgtaggatttttcctgatttatcgacattcaagtctaaccaatccgatcattatctctcgtgggtatatcgggatctcagggtattattcatgcggcggtcgtagtatcgtcgtgttcgtggtgttggtgtcgtgaaggggtattgtgagtcgtgctgagaggagaaaacaaagaaaatgaacaataaacgcaaggaagcaagtactttgcccactagggctcatcgtcagtcagttgccttaacaaccgcaaatttagaatcatgaatagcagtccgatcgtcacgaccaccatcaaggcgaatccaaaccaacccaagaccatcgcggaagtcccgacgccgctcttaacactcccgttccccaaatcttgagctatcgtgcttgcgcccacagatgccgtatgctgccacagaactgataccagcacgaaaactgctgccacgaagatcaaggccagcgcgacctgggatacagggcgggaaggaaacggcttatattcaacttcggagccagtcgcatcggttccttcgtgccagccagggaaagtggcaaggataataaagcagataaaagcaaggataatggcaataattctagatgccgttagatggacctaagacctagctcgacgggaaaatgtggactcacatcaggtacgggaaaacgactgcatccttgaacgttgatgcaacccagacgagatttagcgggtcttgatcgagagttaggatccctttagtagggttattcgccga

SEQ ID NO: 14017 - DNA, 406 bp, Emericella nidulans
ggatgaccccctgcagttcacgttgctcgccacagccatggctttcatacagggttttttggttacagggagcaggctcactttaattgcgaatttcttataaatggctatatggaacctgcgtgcgctttgcttgtgccaatagaccatctgttgtgtagagacatcagaatgactggcaccgagcgggataccctttagagggatagaccagactgtctcatctgtgacgaggttgcatgagcactgcttatatgactggaaccagacgatatacgcttgcgttctatactgggacgtgcggaaggagattagtgcgaggccatgcaatgataggaagacatggaatggcggatagtagagggagaagctcccggatgaatactggtctccatctggagctgga

SEQ ID NO: 14018 - DNA, 444 bp, Emericella nidulans
ccccccgcacgctgtcttataggctacctgggacttggggcgcagggttttttgacgagcatcagccgtctcacgcagggaagacgttgggccattgccctagagaatcctgcgccactcacttgcaacgtttgactacgctagcactcctgtcgtgatagcggcattcaccgctatgacagcatgtcgcgcttgacttaccctttcaccgcaagcgcatctcggattcgacaagcgggagggctaatttcaccgaccgataatactgatggacccttcatctaaacaccatgaatgtgcatcatcacatacgaccgcacagggaatgcgactagtgccatatgtacgaagatgatgctccaacaccgcaacgttaactaggactggggttccgccctgtatacaggtggtcgtccgtgctttgacgcagtgttatgcgcagac

SEQ ID NO: 14019 - DNA, 1628 bp, Emericella nidulans
acgggccaaattagtatatcaagacccaatggcgtgctcatagtagcaggttattctccgctgggtaatccgagtgtatgcaggatgatgcaggcctaagtattctgactcctattgagccacgtttgtcgttaccatcatacccagctcattgtcatccagctcatggataatctagaagattgaaatccaccgattacttgcagctcaagtcggatcacactcagctcacttggcggttgctgctgacggccacccaagacgtcgatttcaaactcgaccatgctcgcgtgctggtgcccggtggcgtggtcatctgcttccttatcggacgaatacttctacacgggcatatcctggacggagaaagaacacatagcaaaatcggttccggcacggctggtccgactaatatcggcaggcgcgtacccgtactaggatacacacggtaaactctgtgacgagatcggacactatcgctaggccgaaacgctattccagccaaagggccaaggcgaatgctctcgaattcgctgacaggggaaatacgaagcgaggacatctcgccccggttggccgctgccacgccgcgcctgcatggtctcggattgcgttacccaaacaaaagagggtccagtgagccagcaagtaggagtcgctgcccagagaagcggcttgagccaagtgagaagaaagcctactcactgactttctaacggagaggatcagccgctactggctgatcagggagccagaggaggtccgacgacctttgaacccagccaagttggctcagctttgtcttctagggtgcgttaagacgtagtataagacccccactgctgcgagagagggagagactatgttaaaccaatccgcataagcaactcaccaggccatgataaaaccgggcctcagtgacggagttcccatcatgatacgacctcgacgaaactggacagcagaagaagacatcatcctgaaaagagaggttaggcgaggttggtttcaaccaacgattccacccctgccgggggacagatacttacttgtgacttaactttgtagtacaagcggagggtgacaacatcagttggcatgagatcgctgcattcctccctgggagaacaaacaaagattgccgcaagcgctggtatggcacagcaggagccaaggtgaaaaaagggccctggacagaggccgaggatgcgcgtctgcggaaggcaattgagcggcatggtaccaagtgggctgttgttgcgtctgtcgtgggaacaagattgccggatcagtgctctaagcgatggagtcacgccatcaatcctgatattgatcgcagtccatggactccacaggaagtaagcatcccaatacacaggccggtgcgacacggagacggttttaacatagacaggatgaattgttggtcgaatatgtgaagaggcatggccactactggcagcagattgtctctctatacttccctggcagaaccagcctggccgcaaagaacagataccacatcctgcaaagacgactgaaaaccgagggcggcggagtaaccgaccagctctacagctgggagcgagtaatggatgctagctcatggcaagggatactttggtctg

SEQ ID NO: 14020 - DNA, 559 bp, Emericella nidulans
cagctcttgataccaaaaccataattgccggaacattggaagcacccattttttgcaggtgtgccaaaggagacgagcctgggcggcgtggcccacggaggtcatccttttaatagatacgtatgaccatcattccaggggctctgacaaccacaaatatatcgccactatggccgacagcccgcaaacctgtaaacccattataagcggcccaagagacaaccaagcctgccaaaacagaccgcagatctatgtagaagcgcaccttatttctttgctcgactggaagatcatgggacccctggacgtggcctcgggcgcaccagtgatgaccaggagacgcctgctcatatataatgagctgtggacgctaaccttgtgggcgctaggtatgggctgggcttgggagacactgcacaagggatctatcgtccaccactgctacagcaccatggtggggcgcttgacgggtgagaagagcctgctcgttctaatgatacgcaatgatctttgtcataacctgggaggacacatacggaggcaacgccgcgtggagagt

SEQ ID NO: 14021 - DNA, 578 bp, Emericella nidulans
tcagcccgtgctatactgcttctccggggggtgccactattggacttcttattgagcataatccctcctttctgtctgtacatgggcctacgaccttcccgagaggggtttctaagaccgttcgtggcttccctacgctacttcaggcccacatcgctctaaaggtgcccgcacggcttggccattcatatttcatgacagccagtcgcttttccatatagagtgccttccaccatacccgaaacagtagaaattccctttctccactcaggtcgttaaacatctcctcaatcggagtggatcaaccataattacttccgctccctatagtgctcagaacggatgaatgtcctctaacaccgctctagtcctgacactgacacccaccaaaggttgacacgttcacctgctaatgatggctctcattctaccagacgggactcctggcaatcgcactttccctaccttattagaattgccgagcaacaactgtcggacatggatacatactctcttgccacacctgtccaaactccctgccaggctgacctatccgaccaactttgcccccggtaatg

SEQ ID NO: 14022 - DNA, 536 bp, Emericella nidulans
tgaacaacgatcttattgattaacttatcatgaactaatgactgcaagaccgcttccgcgcaacacaggggggctgttaatcccaacggggggtatacacaccaagacaagaaggacaagaaccgaacgcccatcaccaccaaactcatggcaaacatgctgcaaacagctggctccacccatcctatctctatcgacacccaggctagaccaacacagacccttgtcaatgcggcatgaaccagcatacacgttaacaatagtaaaaatacaactgctcagaagaacctttaccagagcaaccctgggaaagtcagacccgacactcggggggccaacacaaagcaaataaaatttatcatacaggtccaaccccaaaatctaggcccacacaacaaaaacccagaaacccatcaaccttcgatctgacttgctcttcaatacaccccttaatcataaagagccgccccaacccaaccaaaattcccgcataggtacctgttgtcttcaagaaaagttaaaccagcattcacttt

SEQ ID NO: 14023 - DNA, 2134 bp, Emericella nidulans
tgcgacctacctcggccgacttctccgcttcgttctcctggtcaatacacacgcagtcggcccataagaactttttatctgcctcctccatcagccgcagcagctccttcatctttgcctttgaaaccttaatcctccatgtaaccccaggaagcccgccccagttctcgcttggctcagcgcagctccatggctctgttctttcgccccatcgataagacacgatgtcgaacctctgcacggcgagttcgcgagggtccttgacggcgaatttggtcactctgcgcggctcagcgttaccttcagtgaactgcttaactttgcggtgaatgactctcagtggtagaacggcagccatggcgggtgtttggtgctagtaatgtgcagagatggctactgctcaatgacttgttggtgtcgctgttcgcaggaattggctgtgtgggcggcaggtgttgatggatggcggatcgtaagagcctcaaagccctccacccccaactccccttgcttttttgttttgattttttccccttgcgctaaaccactgagttgccacaactggggaggcaaatctgctttatcgaagccttttattcgcgcatgcaaccgctgctgccgttcttcacctcagcctcgccttggccatttgcccagcgaggcagattgcgcaacccgaggaacattatttcatgcttcattgatcggtcggcagtcgttgtctgttctagttggccaatactctgtggtctagctgcctagcgcgggtttggtgcaggcaactaccgccaacagaaagggatgttacatgaccccattcatctccgcataatagccgcgctggttgctattacagcagcctgcgtgaacgtgatagcatttggaattcttggtgaaatgataagtttgtctgttgattcaataaaaatgtttatgatgaaaggtgaagttgcgaaagatgatttctgtcttccttgctctccgttagaaatcgagacaaatatccatcactgagtgattcccaagattgggaggtgatctgcattacaggagcagcagccttgtgatcaggctgcctgttctagtctgaatccaagtttgaatcaaatcaggatagtccactaccagaatactccataggcatagagaaagagtactccactgacacgtactccactgaacttgaagcaaaagatgactatggccctaccatgatgcccgggcaggtgcttggctggtccaagagtaagacaagatatactatgagagcatttcataacaagaggttctgacagggctggcatgatgcgtcgttttggcgatagtgggaaacatgagctgctggcaaccaatccagaaacattgtgtgttgtgctcgaaggtcgatagaagctggctatctagaaggctcaatgttgggcccagtcttaaggtgtcagcgaaaggtagcaggctctgtgcactggattagctgctgcacgtgttcagccgcggcgtctacataagataccatagtcaaatggtcttaagacgccataactggccacattgtgttggtgcttgcatcgagcgatatagcccaattcaatcaagccaacaatttcatgaagcatgcattcttaacgtccttatctgagtccaataagccgccaaaaagcaaattaagaagtatgaatgcaacaagcatatccattcaatcttggtagccgagacagggcgcttcacgactggctgagcggcgctgaactgctttcttaacaatctcagcgaacctcatgttggtagtatacttacagccactccacagcctcactgggcgccagtctggacgttggaacggaactgatgttgggccctggccactgtaaagaggagcaagcgggtacaaaaggcgggcctcctgctccgccaattgctggtcttcactcttcttgttaccacgagacgcaggcatagcaacctaggttacacctcttttctcagatacctacatctatacggttttctgcaacgccaaactctcttcattgtctagtaaagttcttaatgtacttatatctcccctgctgagcaaaccttctatttgacaccttgaattgttcagtttgggtcctttgaagaaactagtcgaacg

SEQ ID NO: 14024 - DNA, 1538 bp, Emericella nidulans
tatgctggtgcaaaagagaaaggaagccgacgcactggtcccaatgaggattttgtgccagcgaagtatcgcctttggcatgttcttctctttttgcacctctggaaccggcttcattctcgaatactacgttcgtgcactatctctggactggaaaggatgtgttcgttaacatgcaacagctgcccatctggcttcaggtcatcaaggacctctcggtcatatcgtccgccgtcaagctgctccccattatcgccgccgccgtcgtcttcaccacgctatgcgggattctgacgccagtcattggccactatgtcccctttatgatcatcgccaccatgctcctctccgttggaatgggtctgctgtccacattggaatatacctcacccatccgccatgtgctcggcttccaggtccctgccggtgttggtcttggatgcgcccttcagcagactctcgtcgcagcgcagaccatcctcccaatgaacgatatccccatcggcgtctccttgatcgtgctcgcccagaccctgggcgggaccatagcgctctcggccgcggacacgatctatactggcacgctctcctcgagcatcagcagccgattccctcagatcaacagggaaaccgtgctgactactggaaaccgcgagatccgcaacttggtgcccgccgagtccctgagtgtcattatggacttgtgcaataaggccatcgtcaaaacttggtacctttcgatcggattggccgcagcgtccatcattggcgttctggggatggaatggagacgggtaacgccgcccaagaagtaaatcttactcgataccttattattacttaaactgcaatggtactttgcatagattaagcgcaataaaactacccatctacatgctgaaatagttaaaacaacacgtttgtcagaccttcgtcagccaacctcagctgcaattagcgcttaccctagtccaagccgcgacctgattccatcatgagtgccagatgagctgatggatcggtgaagaatgaagaaagggtacccactgatggtcttaaaagctccagcctgcagatccggcgatgtgatgaccttcagcttctgccaacggtctataagagccaaaagcggggggtcttgcctgctactcagtgctgcgactcgaactttacttttttactaactccagcatggacacactaatcacgaaagacaccatgaacaccatgaacaacatgcatttttacgcagactcccttgggatacattcagcagaccactaccccgcgaagaacaggatcgagaacacagacaatacgttccccgatacactttgccaccacacctagaatatggaccattcacaggccccgaaactggacctctttgggcacaaaaaaaacaaaaaaggggggattatttcccccccccccccccccccttgggggggggggccccctcttgggacaccctttttggggaaaaaaaaatttgggggggtttttccccccccccaaaattgtggaaacaccccccc

SEQ ID NO: 14025 - DNA, 1424 bp, Emericella nidulans
ttggcacgattaacgctgtggcgacctttggggcttttacgctcgagccgtcgtgattaaattggggaaatttgagatgtatatatccactatatatttagccctaaagtacagtgaaaagtagaaaaaaaaaaaaaaaaaaaaccagttgagcaggccatgtaagagcactcatcagagtcgttcgctattaggttcaggcttggtatctacctactaggctggagcctagagacttcctactcctacctgttgctggtctctcgaatagtgcgcggctaggcctcgagccctagttatttcattcctttcgccattgcttcttggaaaacatatagcgttcacgaagccataatgcgtacagagataacgggattatcataatttcatcatcaatatccccccaaaatgccggtgcctaaaatcctgcttgataacagatcacaaattttatgaagcagtgggaagacactacccgctgtctccatcccatttttaaaacccataaagggggttgtattccatcaatgcacaaccccaatgaccaaatagagctcctagatcattatgaaaagacagatggcagccggtcctttcaggacaagagcgtgcctcggcctggtccatcccaactattgtcccagcagacctcagatctccacttgcgctttgcttgatgcgctatgaagaaagagtgattgtaagtgggcaggcatctaccgtgtcttctttgtttttgcggagggggctatcgctggactcgctgcagaggcagaggcagggaagataactagaaggctgatgatgagagggcaaataggggaaggtaacacccagttgcttgttctaacaaggacatgagactggtactgaccttttatgtgagatgattaatgacaatttgacagctgggctgagccagagatgaatttatattccaggacctcgggagaagtatgacctctatagtggtttcgtctctcgctccacaacccagcagggttagcagttttgtatttagcattacaactgtgctatgcccctccaatggcacccagatatgttttcattgtgacgacgcagctcaagctctctccgtcactatctgtgagcatcgctgcagaatgcagatgaacggaatgccttagggctttagctgcagaccggttgaaccgcgcaattacgcaatgtcagatcagaaactctcaccaccacctgagccaagcattgaaagctggatataaggtgctactttgatagctctacattccgagcgttaacagcaccagccaattaccctaagtacataccgccgaaagacatgtgagtccacgtaagtgccataaatcacttagaaagttttcgatacctgataggagagtcatgcgctgcactcttcctagagaaaaaatgtagttttctag

SEQ ID NO: 14026 - DNA, 597 bp, Emericella nidulans
ggcttggtcactgaaggacctttgttataacagggtcaatattctggtgccttgaatgatggtggtgggggggcttttgaaaactttggcggccggtcactaatgcatggtttgtacaactatatgcaacactaatgcgtacagggagctgggggcggttaggaggcctttatattattgggactgttcctatgtatgctccagcctctatgggatatactgcctgtcatgggcgatgacacaaacgtcttttgatacacaataaacactggccatactacatcgggtagagataatagtatactgactgtacttgaagcaagctttttcaagagacaagatcttacccatacaaagagtgaattgcaaacaggattgtattacctctaacatgacactattgggaagaactatccgctatcttaggataccgttgattcgaattgctctggacatagcaatcgtgaccatcaactctgggagcaccttactgtccatccattaaaatgggggcactatctcctttggataaaggaaccaaccctaaaggtccccgccctaagaacgtggtggagggctctgattcatagccctttg

SEQ ID NO: 14027 - DNA, 1883 bp, Emericella nidulans
aaatttttgtaggtgggcgattaacattttagataaactttgggaaaagagttgggatgtgaccaaaaataccatgtataagggtagaagttatcctccatatatggccactagaaagaaggtggtagttggccagggcggccaatatggcaatgttcaagaaaagacttcccctgaggtttttcacggacctataagggcggggtggataccgtttcagggtctgggaaggaaccacggaggccatgatccttcccaaaccgtccatgaaaaagggcagtctcaacctggaaagcagggtatcccatatctgttaaggcacgcaaaggattttcgtccttacacaggttccactattggtgttcgtttcttaatcacctccgtgatccctggaggatggccttctgcgaaaacggcctgatcaaccaacctttccagctcctgggtcccgaacggttgggctacatcctttgggcctctgataatgtgggcattcaaacatgatagactagatacctacagtcgattgaccggttctggtcagactagaatcctccgaggtgaacagacaggctctgcatctcgtataaatggaattgaatacattttcatcatttttcagggctgtattattagcgtctgctgcgtaataactgttcagtatgccccttctggaaccccagttacgggccatgaacgaggatattgtacttgatgtacctataaaagaatgatacgaagtctggactatgtcgtgtgatgcacagtactcgcaacccccagctatcagtttgttaccgcaggagactttggcctaccaatatcattgttagggggagtgtgcttgactctccaatatacgctctggtggtcgttgggtgtcagtattttagagcaagttctatatcagcttcaagcatttcatgcgcagaacttcaacaaatccgggaccaccgtggtttttttacagatagtgtgcggtgttggcgcactgggcagccgttaaaggatataggtactgatgtcgtagtcgcttgccatagaaattcgtaattgatactccaaaacaatcaaggtgattaataggagaaatgcattccgtgtcagccagcgtactagcggaaaatgatgcaataccacgcaaactaatccccactgatctgcattgaccgagccctgaggatcttcgtccccgtttctgcccatatcaaaacctcgcgacatgggaaaggacgagcaagttgttcagagtgatgctggcctatgttttcaggggtcagtgcgagtattcgaaaaagtcatttatggctgcgctcgcaatgaagaatgctgtgcggttccgcgggtgcgttggagcagggatgctggttcaagactacactggtcttccattagggttcatcatcagaaggtgctgtgttgagactatagtattactcgaaggttaatgaagagtgctgcggaaatagaagagcgaatcttgtccaatcgaggtacatctattatatctatgtgactattttcgcactcgactgcttgcaaagcgagacatttaagccttaacttgctcgccctgcgcgccatcacttattgaaccatccgcagactcttctccaggttttgcaacggcgggcaatggctgtcgtacaccaaagccttggtagacctgcaaaatctgctggtaacccccgtcgacatggggtagaagcgtcgaacgacattgttgcccaagccagatatggcacccactcccagcattttgaccccttgcaacaataggcgagcatacatggagtggccagaccagtgcccagatgtccgacgccacaagtgaatcgcccatgtttagtctggtttcagaggtgtaacctccctatgtctgt

SEQ ID NO: 14028 - DNA, 463 bp, Emericella nidulans
gtgcataactccatgcgacgggcctattaagggcttcattgtacgtggacacattttttggggctgcacgtttggtataggttgttgggcgacagtcagtggaaagactgttgggccgaccaggctgaattgggttatggttgtagtactatgtctatggtatggtatggtaacagcctgtgtatgctatattgtgcacaagcttgtttagtgtcaatagtgctacgaacttttttaactacatacagcacgtgttttctatgactcttggcatactacatagaaggtcccctggtatggcaagataacatgatacattgcactatggtaggaacagactgtttatattatgtgaacagatagaagctggctagacgttcctacaggagtcttagcgacgacgctagagtgtgcctaaatgcccagtgaacgagctttggtgactgcacttgaagtcatctgc

SEQ ID NO: 14029 - DNA, 1023 bp, Emericella nidulans
tcttggttccagattcgcgctccagcggctcggtgtaggcgacggtcgcgcgaaggtagagcacacttccgacgggaactgggttctcaaaagtactgggatcgagagaaatgaagtttggacgggcgtgcgagaatgaggctgcgcacgagaaggcgagctcaaaggtttgcttgagcaggaagccgccaaagatcatgaagttgtggcggttgcggtcttgcggctgcataatcatggcggatttgaggactgcgtcgctcatagagatggtgttggcgggtcgtttttcaggagattctgtactgatcagtatgtatccgaataggcggttatgcctactgcacttactcagatatgacatttctttcgtccatagggagtgaatgaggttgctctcctcagcgtcaggtgctttctcaagaaggctccgcttcctcaatgccttctttgcttgataattcttttcccccttttcgaacaatgcgcgttcttcttcggtttcaaccaacagaggtgcaacattgacgggtctgacaaagtcaataagcataactataaccggcgagaagggccgtacatacttcttagtcgcgggatcaagcgataccatagtaaacgcgcaagtaattaggacatcctccgggtttggcttctccccaggcgcagggaccttggcaacctggagcgagacctccatactggatcttccggttgcatacgtaacctggccgctcagctcgaggtcgcagatttccatcagtggatgctcaatggtgattctatccacggccgcagttacagtcgtcacggagtcaccggtatgtcggtaggctataacacccgcaagcgcatcaaggtccattagcaacgaacccagtctacgcccattagtgcaatcctttgcttgatcagaacgagggaagcaaacctgatatgtcccgaagcattcaggtacgtgtccaggagccacttaaccaagccagcggtagaatctacgcacttgcagccacacgcgcggtc

SEQ ID NO: 14030 - DNA, 2070 bp, Emericella nidulans
cagacccaaaaactggctaagggagcaccctgttcttgggatgaattttgtgttctgggtaatcgtgcatggcgttgccgatggtgcttttaaaggacttcctactgtggctaatgttcttgccgctaagccccctgagggaagagaatcatggacccttgaatggagtgacaaggcaaaggaccttcctttttttaggatggtcactcctgaaggaccgcacgccactcgagcgctgacgttctcttctttgcaccacaacttcacgagccttgctcagcgggattgctttaaagaccagctacgtgtgcatgggatcaggggtggtgttgcgaatctaattgaccgtaagttctacgacattccattttccgttttgagtcgttttatctaaaagctcccagccaaggcgtcagaggcaactcgcggccaagcgcttgatcatcaaaaccatgagacctatctcaaataccagtctgttctcaaggctcttgacatacaaagtctgttctatgatctagagcctgaatacgagtgccgggacatggaacaaagtatggctcaccacagagatacgaatgttcctcaaaagcttgatgcagctgccatcgcagagttcgaggcgcaagatgaaattgtgaaaataaaccggagaattgccgttttgacggctgagattgcggggaacccacgaggacatgaggaccttgtttccgaaagggcccgtctatataccaagaaggcgaagcgtcgacgggcatggaaggcggagtttattaggcgatggtgggattcatcatacgatgaatacatctcgggaaataacttcgctgagcgcgacacaacacctcttttcggcatttacaaaaagtacctgccggagcgcgcccgcctaagtgagaaccttttcagagaaacgccactggacagcgacatcggtaggcagtgcctggaagacatggtcgcactttgcaaatctacagagcgcgtcgtctattaccctgacatgtctccagtgtctggttgttgccccacatgttccaaacctatgtctgggtgagtactctgatctgattgtcttatgtttactaacttaagaagaatctcactgcaggggaaggcaaagcacattttacaatgtcgaagaagctctttgaatggcgctccatatcaacaacgctatagtaacaataagcgagcacatcgacgagtacagcgcgaattcctccagttctgctatctctgtgctcagttttttcacgatgagaattcctggattcagactgccagtgccacctacgtgacttgcacccacggtgcgggattttgacgttccggtataccctcgttgcaccaggcttttgtccgttctgcttgggcgacaggaacaaaaaagcagacgaaagatttcagcagtggttgaacaaagcgacccttcttaaccacattgacgtgcacctgggccgattacaatccatgattgacgtcgtatgtccgcatccttgctgcgtggggaggagatacacggatatctctcatcttcaacgtcatttctacgatgcacattcgatagaggagccgcggacgaattgtgtaacacgaaaaagacgatggactaccgatggcgagcaatgccaggctgaaaagcgcgttaagtttatagacgtcactgattttgctgacgatagtgaggcacttgtctaaaatacttctaaatgaactgttcataaatgtcacgaattatcgaaagtaatgaccactgcttcagataaagtaaacagtgcaagaccaaataacttgttataaattcggtaacaacggtagggccgttcacttgttgtcaatttgtgctccctaaataacattcatccgcttacagttaaacactcatgttgatgaagcggcagagtccttgcgccctcgacgcttatctcgtacgtaaatctttcccgctttaccctttcgaggaagttgtcgaacaacatcaaacagagataaagcagatattaggtcgccgagcttgttatacccgtagtccgggagtcgaagtcagggtgcttttttgtaagt

SEQ ID NO: 14031 - DNA, 621 bp, Emericella nidulans
accatgaaggcaaccgggcagccagcacgcttgtactatgcgctagccacgggccacttttccataacaagatataactgactttcatggcctgaaaggaactgctgagctggtacctgaacctgaatgagaatcaagactagaatgctcaaacaagaagacagagcatgttctgaacgcgagagagacaaacacgaacacccagcaggacaacactaacgcaaggtatgctatctttcacctgaacttgtcctcttgatataattcatgtgtaaggggctatagcgggagcatacttgtatctatttacaacgagggctatatcggccttggaacctatatcgaacatgacgattctgctgtgcaatatgaccgacagacatgaatgccttacgtaagcaccatgcaagaatagcccttatcatgacagtcggcaataggtgtttttcatactaatgactgctgttaacatttgatcaatgactcttcaaaccctaactactcggtgttgggaagtgaaccttgcgattccatttccaataattaagcctgaattgcccctttgcccaatcttaaccgtttttgacttttaacgctgcaaaagatttctataacattctt

SEQ ID NO: 14032 - DNA, 2037 bp, Emericella nidulans
ggtgggtgaggccttaaaaatattgtcttaaagtgcaagggggttaaaacgtatttaatacaagatttgacaaaagaagagaaagagtaaacgggccctaatagagaacttgttataaagcagacactcattggaaagtaagcagcggcgacattataggaaaatggagccaacaaagaactcctaagaaagggaggcaaaagctagaaaaagttgtgcacagattcgagggaaaattaaacagaggggatacccaggtccagaacagggatcgctaaagtccgggaagtacataaggctgtgcgagggcaggcaagaaaagggtgccagagacaaggtgctcggcagggtccagggcaagtagagacggtaaaatgagtttgtaaaaagttctcaccaaaggacagctaaattgatgttccccagggcgcttacagaccaacagttcctcactgcgaggtcccttccgccttccaaatgctttggtcagcctccggaccgcatcataattcctgacggttcaatctgatccactttcagtgacctggttcgcagtctctctttcacgttgtcaatatagtatctctttcacccgattcataactggcctcccagcgacaccagctagccagaccggtcccgcctcctcactccttttccgcgtcttctttttcacaccccctcgtcttcctctgtctctcctctcctcccagcgtctccatactctttcttccgatttagatcttcgtcctctttaacctaatctgttacttgtcgaccatcatacgggtactcgtcgtctgcctctaatattgcttcgaccaagccatatccacggtacgacccgtcggtccctccaagctgaaccgaaccagacgccgtttccagcagtcctagggagattggaagtctccacaattcctcctatttacaatttcctgttcctggcgactctgttttcagttgtcgtcttccttctaccttgtttatcgatcctttcacctcgcagtgtcgctggtgagagctgcccggcctcctttattcgccccgccctcgcatgatacatcgccccaatttaccatatcaacgaagcttggctggcaacatccgctgtgatccttaccgctattgctcgtttactaggatggcctgattaccgtgaaggggacccaggggcagccgcgctttaacacttcctcgatttgcatacacctcatttgcaattatactctcgaccccggcccagctggtctggcctcctgcatttattatacattcttctgttggacgctgggatggcgggtacagctacggcgacgttttctgcggatgtttggacatcagctagcacaatagatgccagcgcgcaaccatgggacttcgctgttccggttaatcaggaggtaggtacaaacgatatatgattgtctgaaaaataagatgctttggcttttgtcctgcaaaatgatacgaagcgattcagacagcagctgattgagcatttccagaaccgacatcgctcgaagtcccgaacgtcccgcaagtctagagaccgcggctcaaaaagctcccgcagttcatcgctatccaaacaaatttatggtcacgaacaatcccatttcgcgccgcgaggtcggagagatgcaagcctcagccgcaaagagttcgacagcgggggcgtgcaggacaccgcggcaacatcacatattaacgggtcaaggaaaagtgacataaaagatgatgaagaaaacgatgagaactggattcatcgcgataaactagctcgtattgaaagcgaagagctacaacaagctgctatcctgtttcagcgtcgacctgggactgggagtacgagagggcgcgggagaagccgggaccaccatcacggtagcgttagcggaaccactgtgatttcagcgacacaccatgaaccattggaaccatggccagaccttcaagaagaccaacaaaataataccgcttctgcagctctcgcgggcggcgatgatatacagaagatgacgccagtattggatt

SEQ ID NO: 14033 - DNA, 520 bp, Emericella nidulans
cgagctatgaccggatgataatccacagctacctatagaagaatgtcttgaccgaagtcggccgatggagacgagcacggacttaccgggaagacctggacacgcttgtacatcatgaaacaagtggagatgagagctaccaagcctggctggatgtcgaggcctgccatacatactcagatccaagcttctgagtcacaagactgcgactgggtgagacataaggacgggtacctggcgcatttgcacacgatgagtactgagtagcaagctgacttttgaaaccttcgtgccgcgaaatgtgtgggtcttaatgagcagctctacatgaagacatgaccattgcctgtgccaactgagaggattatttctaggggagctggagaacgcagccgaacatgaggagatagagcgttgtcccagcgctacgctcagatggcctactggtatagctattgtctacctaagagttcgccggtatctatgatgatccggaatgggcggcatgaaggccactgtc

SEQ ID NO: 14034 - DNA, 621 bp, Emericella nidulans
cgcaggccgccgggcgccggggctacccctgccgtggtttttcctgctgctttgtttgcacgggcaccgctgataggtgacgcaggggccttttgctggattgaccccagtgccggaggcgtcgccatcgctggcgtctacacggtccacggtcccatccacgccgtctgcaccggtacctgccgtcgaggtgccaccggtcgcgcccgtgccctggtcggagaactcggtggaagacgcgccactgtctggagccccggacgtgccgttgtccgcgctactgccttgagccccggacgcgccgttgttcgcgccaccgctggcagaatcgtccgtcgtgcccggttccttgccggtgcctttcgccccggccgtgttccctgatgcagtggcaccggcggtgctcttggcgccaccggtcgtttttgcaggtgcatcccctgctgtgaggtcacctgttgggttagaaatcccgctgattctgtctcccacttgcactgcccctgttggcccaacggcttagctgggttatcgtcgtacctgtctggccctgccgtgcggggagatggccgtatggagtcatcctaggcctctccgggacctggtgtggaaatccagcag

SEQ ID NO: 14035 - DNA, 783 bp, Emericella nidulans
gtctcgatcctctttgttggctacctccccttccaaatcccctccaacctcctgatcacaaagatcccacgtccggggatgtacatctgtgccgccgtcgttgtctgggggagtatatccgctttgacggccgccgtaaaaacatacgagcagctcctcgctgtgcgtgcaaccctcggcgccgcagaggcagtcttctttccgggagccatctactacctgtcagcatggtacacgaaagcagagctcggcaagcgcattgcagcattgtatatcgcgcagcaggtaggcaatgcatttggcggcttgttcgcagctgccatcttacagctcgacggggcccacgggattgcagggtggcagtggctgttcatcatcgagggatcggcaacggttggaattggcgccatatgcgccctgatcatgcccgagttcccacacaacagccgaatcctcagtccgattgagcgggatctggcagtctggcggatcgaatccgaggccggtgcggcggaggggaaagagaacgtctcgctcctgacggggttcgtgaacgcgcttagggatgtcaagctcctgctactcatactggcgaatatgctctctcaggtgcaggggagtatagcgaattatttccctaccctggtatcgtcgctcgacttttccgagacgctgtctttgctcctaactgcgccgccgtataaccttgctggcggcgtctattacggaatcatgtactactccgactcgcggaataccgtctaccaagcttattctgagttg

SEQ ID NO: 14036 - DNA, 559 bp, Emericella nidulans
ctcacttgggttacactggggagccagacggcacagacagggcctattattttcacgtagagaggaagctaactcggctgtttgcttttagaactacgcagctcgtgctcgattgcagcactgtgactattcattcgcaggcccggagagtgaaccctaacctgcgatggtacgacctgaggacccatgcttgttgtaggaagtcgtaactgcatctgcgctgcacgtccatatgatggcccggtccctgactggatacaagagccgggatctcccatactggagcatcatgttcataatacaatgcatacataccgtcgctacaaggtataaactattttagctaggcaacgcatgccataaaccaggcagcccagaacaatgccgtgatcgccagtaagactgactccagtgagaggcatcggcatttggcagaaacgagggaagcctgctaggctccgactgaacaccttgcatgacttaggagtgatggtttgctctcacccaggaggtgctggtgcacgcgcgagcgaccaaattgtggcccaacccgatcacg

SEQ ID NO: 14037 - DNA, 488 bp, Emericella nidulans
gtcggccagaccagcgccagtggcttccacgcgcattttatttctacggtgtatccggcccctattggggatccttatgataagagtgcctaggactgtctgcccaaccctgtatgatcaaagaagctcgtgatcgatgccgcaagaacgagtgctgtggcttgctgaagcccctgatcgaaccgcccggtggatgccaatgcatgactcacggctcctggctccacgtctactaggtagaaccatgccaaatgggactaaacaaagctgtgaacaggacaagatatctggagctggcatgactggtgctggctgtccatcgtttcatactagctcacaatatactggatccagcagatgtgtccacgggactgttgacttagagactgtatttcccaggccggctcgatcgatgcaggcgacaaactggtcattatttatccaatatcacactttgggatggtcaatatcacccatgacctggatac

SEQ ID NO: 14038 - DNA, 498 bp, Emericella nidulans
ggccatagatcctaggatagaccacataagagcattgtcttccaacatgctagtatagccacagcgcccacatgcgacagcttggatgctccatacccatgaaggcatcaatcctaaggcccccacggctgactacaggtccggcttagactgataccgaagatgatggcacaccctgcgtgcgccacctggtataagcggatagacatgaactgcaccactgactgctctgaacgagaagactatggacttatatgacaacagtgacactacagacacaccggtgactgatgattagatgcatcaggcacatgcagactccctgatgatgagacatgtggcggagcgcactgacgcaagactgcaacgatcttaaacaggaagcaggcaatactggaacatgccgaagggatcgcaatcagcaagccagagtccgctgactcagccgtggctgcgcacgctagaagaccatctactttactggacacttgaaacgtc

SEQ ID NO: 14039 - DNA, 1402 bp, Emericella nidulans
gccagttatcatcatggtacgctcgctgccaaagaagaacaacccgttcgtcactcccgacgcggcacctccctgtaagttatcgcctccatgggcgcaggtggctatcgcgctctgatgttccgcacccagtcactcttgggttacttgcgactaattacatattttttctctcttattttcagatgaggaattgcttatgcgccgtcgtctgggaaagaccaatcttgctgttaagcccactcaagtgggcacctcaaatgcgaccaagccggaaaatcttggaccttttgagtatgctcatctgcgcgcacctctacccaaggacctgaaagggtccgagatcttcccatcgcactccccgcagcagcatccagagacatattttctgatggtaagaggacctgaatcgcgcgacttgagcgttcgcgaagtagattctaactaagctgcccttcccacagcgacgaagcaaggacgggtacgtgagcgcgactggcatgttcaaaattgctttcccatgggccaagctcgaggaagaacgatccgaacgcgaatacctcaagacgcgcccagaaacgagcgaggacgaaatcgccggaaatgtttggatctccccagtattgggtaaggcagaccagcgctgaatatttgcaaaccgtgatcgagactctaattttgttatccaatagcgctcgagctggctgccgaatacaaaatgtacgattgggtccgggccctgcttgaccctacggagatcatccaaagcccatctagcgcgaaaaagcagatcacgcctcctccgaaattcgaactgccgcccattcaagctccagaggcactcgtcccttcatcccgtacgagaagccgtcgatcagcttctcccagcaagaaagctggcaccccgcgcaagcccaggcaaactaaggcacagaaagaagccgctgtggcggccacaaacgaggccaacgcgacacttcagagtgccctggatgacacagtttcaaatgcagacggtgaaataaatggagacgtgttgcccagtgtggaagacaagagagagccggaaacgtcgcccgtcaagggcaagaaagcagctgcaaaggcgaagaaacaggccgtttccgaggaggatcaagaggataaagtcaagatcgaaatcaagtcggatgctgccgaagggagcgatgtccaagcagcccagactaccatttccgtcgagatgcccatctctttgccagaggctccgtctgccgaagacacacaagaaatgatcgcgaaggccaaagaaatggctaagcagcctgtcgagctcccgcgagaacccgctgtattgtcagctcaaaacagggaacgtggacccgaggaggcggagctcgtcgccgcccacggggccgagcag

SEQ ID NO: 14040 - DNA, 532 bp, Emericella nidulans
acagaattatcaggaccttcacctgcctgctgacaataacctgtcgacgctgctgaccctcgacagtttttttgacacagggcgcgaatcaactcatgactcatgactacacctagtttcgcctaggtggatccgaaccttacaaattgatagtgatgcccctaggaggccacaccaacagtaaagaacgaaggtgtacatgctcgtttgaggccaggcgcccttagagaaagtgatacgggaaactcctggacctgtgcttgctgcataactttcttcaccgctgaaaaacggagatgttacggcacgaaagaaggctatctaagggtcatggcatacaagaccgctcgaagacactgaggagatatcgccacatggcagaacctacatccagtgtgtgtgtgaggcccaaccctctatgggcgaagggaggtagacaaggtggacctactcgttgaagatctcgtggtgcatgtttgagacagctgcatttagaatgtccaggtccgcgtgaggatatatgacctgctct

SEQ ID NO: 14041 - DNA, 459 bp, Emericella nidulans
acatggtcatcgtatttcatacactgtgtgccggggctgtgtcggccgggttcgcaggagtaaggccgggtagattgtctagaaccgacttctcgcgcgaccgtgatctccatgacctgctggtcacctgcgtgcaacacccgagacccgcaggatgacatgtctggtcacagagctgatcgcaatatcacatccgaagcacaaacgacgcctgggctgacacgagcttgacctgatggatggttgcatgctcgcattgaactttaatggcactagtttgaccgggagggagtcatgattcacacagacgtgacggcctccaagatctactgcaactgctcgacctggaggcaagtatgcggctcgtaccggcaagctacgagcgggatcattctgatgaccacagctagctgcttgagcgttgacataccacgctcgtagtctggccatacgatgctc

SEQ ID NO: 14042 - DNA, 537 bp, Emericella nidulans
gcgcggaccacagatctagtgagaacggccggtttgggcacatatgatggcgacggctgggggaagatcatgcttaatgaccttaaccaggagggcctgctcatctgtacggccgagctactttttgtgcaagcgtcgacagcgaagcgtcatctgagagagcaagccacaaagagcacaaatagcccacaagcgggtatctagcacaggctggctgcactgttagcagcattgtgtgacaagcctgtataagaaacgccgatcaacacgtacagaacatatgaactcggactgacctctggcaggaaccaaactgcatgatccaaagactgcctggtagagacatggctgtaccctgggcttatggtgaaaaggaactgcaccgaattgagtggcaacacaaaggacaacgtgacaacgccacagcacaacaaaagtcgggataacatgagcgcggccatctacaaacatgaagagtaagctgggtctggcgaccggcgtacaagtatggagaggctctttgggcggccaagcaga

SEQ ID NO: 14043 - DNA, 1650 bp, Emericella nidulans
ccataactttcgccaacctcggcctggcaacctatgaaaccgacacaatctctgacttgttcgatgttctctgcctgaaccgatatttcggctggtactcgtacacgggagacctggagtccgccggaaaggcactccatgaggaactggacggatgggtggccaagtacccgaccaaaccaatcatcatcagcgagtacggggcagacacaatggcgggactgcactctgtgctgggactgatctggagcgaggagttccaaatcgagttgctggatgtgtatcatggggtgttcgaccagttccagaatgtggttggtgagcatgtatggaatttcgcggatttccaaacaaaggagggcatacagcgggtggatgggaacaagaagggtgtctttaccagagaccgcagacccaagggggcggcgtttgccttgaggaagaggtggatgaatatgatgtcgagttagagctaagtgggtagacattttgatgcatcaacatttggcgttatgccatgcgtcctttcttcccttccatattatgaccttgcgccgtagtcggtactgacagagcttgagacacacttgatgagttttgtaccgggcagcccagcttgagagaaatttgttgctatggagggcttctttcgtgcattgtacggcctttacgctctctggtggatccggggctctgagttcggttttgaacatgcctcactgaaaggtaataggtaaaactttactcttccactagcattgaagcaggagccaaaaatgaccattaccagcaatcctggtttagcattattacacgtcctcgccattcgaaggacaagagcagctatggctccggccctgcacggctacgattcatagaaacttcaacatgtcatgactcctatacccacacctcttaatcggctgacacccgataacctcgcttgctttcaagggcaaaggtgcaggagatcctagaattacgtatatgtagctactcatgtgcccgtagctggtcctcctgatactcttgctgcacgagagtaaataccgcctcccacacatccactgactgtgctacagtgtcatgatcagttccatcgactgtattgagacaaatccaacgccctcctctaccccctgtgcacgccagcactcttcaaggtacttttgacctcggttacccaccaagtacgcctgaaggctaacgcatctgccggcgttctgctcgatagaagatatcatcagcgcaaagctcgcatagtgagtgcatgctctccagtccgcaccagcccctttcctcaaacattgcaaagcctcgctattcgcgccgacggtgttctcggagaacatgaaaagggcggctaagcgagccagctcggcctgttgcccatgaggcacgccgtagtcctgctcaaatcgacgccaattcgcgtcaaggaacgagcggtctacttccgtctgattgaggctgccactccccgatatcatggatatctgtcggacagcggcgccgctcgatgctagcactgggctggcctggattatgaagcgggggatatggtgccagagggtgaacgctctactgggcagttgttgagccatctgcattgctgtaacaggtgagtgggcgggattgatccagggggct

SEQ ID NO: 14044 - DNA, 1040 bp, Emericella nidulans
gaaataggaccctcgtgtaaatagggcagcagccagctcatgattggggttctcccctccttcaatggctggggctccatccgacccaggcacaactgcgtctccccataattgagttccttggttgaagtctaacgaataatcgctctttgccactggtactggtcatcatcgaccactctcgtcttgttctggctggccaaacactgaacgacagaccgcgagttataaccctgcctgcctgcctgcttgcctgcggctgccggtgctgctggccatcatgctcgatttatcagtgctctgattgtgcctacaagtagcatggcgcgtccggatactggccaagtggtacgcttcttctcctccttgtcgaagtcactccaattaaagtcgcgtgcaggtggcctggtatgtctgtaccgtcgtcgcttgcgtcttcctggtcgcccgtctcgcagtccgatggcggttgctcaagcgcctctacatcgatgatgtattcgtcgccctggccgccttgtgtctaataggagatctggcgatccagcattacatgtttaatcagggtgggcttacacctttccctctagagattcactgcgcaggcgttaacattggcacaggaatgtccgacatggcccatgccagcaccgagaatgcgatcagaatgatgaaggtaacactgcaggaacttcattaccgctgagaaaagaaaaaaaaaaataaaataaaaaacaaaaaaagaaagagactaagaacggccctgctgcagatgatcatccccggatccactctctatgtcacctcgctttggctgatcaaggccagcatggtgatcttctacaagcggcttgccgatcgtacaaagtaccaaacaatctataacatcacgcttgccgtgctcggcgcaacatggctggtcttgtttctcgatatcgttctcaaatgctatccgccgaaccgccaatggaagggactgacggatccgactcgtatgtcctttccccttgtaaagccagataaaaaggttctaactgtgc

SEQ ID NO: 14045 - DNA, 603 bp, Emericella nidulans
aaagcaattatggtggtaagagccagcgcgctggcatggtccttggcagccgccacacccactggatgtttttcagaccctccgggatagagtgcggtcaggaacgccatggctgtcctgcccctaggggtgatctgaccgaccccgatcacgggcgtcggagcgcggacagagactgggagcataacttcaccatcagattaaggtctgtcctggagaccacgcatctgtgggacaggagcgtgccggacagattttgatagggagaatagtgactgcccatacctcagagactgctatatgcaatcaaggggctacgagcgatgcagcgagccccgtttaatggggcggctggacaacacaaaggaattgagcgagatcatgagtgaaggcagacacctaaatgagacaactataactcgagagccctgcaaggaagctacgcccctgacttatgggagcgagactatggctgacagctgcgttacaccacatgcgctgacagagagaacagtgagtttggtgacttgatgcaattccagcataccttggaacgcggaggatatgcaatgacgatgctaaaatcacatggttcgcatatga

SEQ ID NO: 14046 - DNA, 635 bp, Emericella nidulans
agcgagcattgtttgatagacggtcctgctgcgcaatgcgagtgtcggcaggcagatctgaattgcatggtgttcttgccgattagcagtcaggttgcggctcgtatgttgcaggtaatggtggtagaggccggtatcagagctgtcaatctcggtctggcgagtcggcagcagcagctgctgctgccgctgctgtccaggaggcgagaacggcagctgtggtgcttcaaatggcaggggagatggcgaaagtctgccgccagggctggtgggcgtggtcggcagcagtgatgatagcgagagctggttcctctgagtattcgatgcaggcccagacgactgcgtcgtcgcggctggtgccgcgtagacgcatttctgcatcgttaagatacaccgcgaacacgatggcttgatttcatcgcactgtccgatcgtcagtacatagttgacccgcagcccgggggatggacgaccttaatccgccgtcgcttacactccgcacagccatttctcgatttgcgatggcggcgacgtgggcgaaatctagcttgtgcttcagcagttagcatggctataccgattcgattttttactttggttctctctttttgactatgaaaagtgattctagggcg

SEQ ID NO: 14047 - DNA, 525 bp, Emericella nidulans
caacgagaaaaggaatcacgaacgggaccatatacctactgcatcaatactgttccactatggacggcaaaagcataccaaaacccccactctgaaaatcccgatatccgggtaacagatacgcacatgtacttactccgagggatcctctcgaactggtatctcagcccttaccattgtaccggacagcgcgctctcgaattatgtctcgctcaactggacgagttgggtattccgcatctagccgaggacgcgatatccacacgactgatcaagcccttccgcttgcgccgcggcgagcaatggatgatggctatgaaagcctggctctttgagcgcgactctaccccgcttggcgagtctgttctggacgacgcgtccttcgaccagcttcaggccgagctgctcagcgacaaacctgttcctggttcaaacgacccgcgacgtaaagagcttagagaatcgggactgtggcccaatatgcgcacgaaccaccccaagtcacaagaaaacttgggtccgaaa

SEQ ID NO: 14048 - DNA, 586 bp, Emericella nidulans
gggcctgacgagaatggcagaccgcagggccggcagcaccgagataagcggcaacgcgaacggagggcaaagagacaactacaccgaccaccccggcgcaagagcgggatgagcccccacggcaggccaaaccggcggcatcgccggagcgcacgagatcatagccgagagcatcctgacccgaccaggcgctgatggccggcggaagcgcacaacagtccagcaccccaactacacacggcaagtggcgaggacgaagcccacacacccaccaacagccggaagtgccagaggcaccaaaaccaatgccgaaacaaacactgacaaccctagcccggggacctcgaccaacagaacacacaggcccaggacacggaccagccggaccaaacgccagcacccctcgcaccaacaaccggagcaaggccaccaaccaccaccaacgagacgacccagacgaccggaccccccccacagaccagagggacccgcccacgccgcctccacgccccggccagccggccggcaatcccacgtaccccgcaaagccaccaccacccacgaaccaaagagccaccccaggacc

SEQ ID NO: 14049 - DNA, 382 bp, Emericella nidulans
acacgagatacggaaaaccgtccggtcgggttagggattgggcccgagcgaaggccaggggggatacgggaagtgttgccagctgatgccagcgaggacacacccggttggcacagctgactgctgacatcggagcgatgcttatctgtggggtggaacgcgagagtagcacctcgctcgacacgacgagatgaggactcacgggagacaagccaggctggagaatgaagccacgctctaaaggattcggcaggaggggggagccggtgttccaccatgactgaccgtacggtgtagccacttgatagatccagacgacaagaggcggaaaatccatgaccgggtcgcgatatgagagagactgtacacagccaggaacacc

SEQ ID NO: 14050 - DNA, 331 bp, Emericella nidulans
gttcttgggggacaggtcgttgcggagggatagcagttttcgtttttggggtgggattatatggttggggaagtacggactgttggaggctgtggagattggaggtgagccatgctttgcaggggcctgacatgtgaactgtggcatttgctgatgcataggaccaacactgttactctgctataggcgatcatggcaggggttaaaaggaatgacgggtcttggcggcatacactctgtatttatgcgcataaagtgaggaatgactttgtcggacagaggatctggcctgcaatactgatgacttgttgtcagacgcattggcaatttg

SEQ ID NO: 14051 - DNA, 446 bp, Emericella nidulans
gctgtgataccgcgaactcacggcaaaggggatcacggggggccttcgcaatttcggctctgcggtctcacgtaccacgatggtacggctcatgtgaggaaccggatgccgattaaccctcccgagacggggactcccatcttcgcacgagcttcaccatggtcctccgtggctaagcgatccatcatatgtgctagtagcatcaaccaagggagcaggcctaaaaatgtcggccatttctagacctacaacagccgatgtctcgggtttggtgatacccatacggcctggatagggcagctgggtgagaactggtgggacctcacactgcattggctcaaggaaccggtgacccgggtggacatcacaggggcaggcattgaaagatgttaatgactatcccagtgcgttggcagtcgaagagtgcaccagctcaagtgaatgct

SEQ ID NO: 14052 - DNA, 530 bp, Emericella nidulans
  unsure (1)..(530): unsure at all n locations
gccgccatctcccctggcaaatggtgtagatagacaagtgcatggtttttcgagttttctcacacatggagcccaggaggtgtagaggtggcacaacaggccttacccagcatctcctgttatccacacgtaccacaatcacatctatggggtccctttataagtgtcatcctaaatttctgaacatgtgcagacactgaaaagaaagctaggtgatgttgtctcattcaaacaacgagcgcaaacgtacattctgctgaatacacatagaacgctgctattttcacaatccccacacgtgggaaaccctacactgtgggtcgggtggccattcctatgttcatatcgcagaatgcttaatgagtgcacacttggaaacagaatatcgagtatgttatatgacacatgatatgcatgcttgctacaaggcaattgaccgtatcaacactactctgaatgcccagatgcccaaccctagccactgagcagntaactagcatacaagctctcaccaatgactggagcgatgc

SEQ ID NO: 14053 - DNA, 675 bp, Emericella nidulans
atagaggtatttggggaacagacgggggacgcatcgagcccgagtgcgtatgatggtgtgacgtagggctggttgtggcactacagacacgagagggaacggggactcactgaaccctcggggggctcaggagccaacagctcatgcagcggggcccaactagaactgccaacacaaagggggaccggccaccgcttgtacattatcccaccctaagaatggaggtctctgtctacatataaggaagatgaccattcaaaacccaacaagaaaaatgtgagtacttaagccgaaagggcagccagtggtggtaagttgaaaagctgaccagaagggcgcgagagaagacacaaaagttgatggtgccaaaccttaacacaattggcatcgtagtgggtgcactggcacagatcctagaagggaacgcctgtcggtgagcagatggtcgtgcatgacccatctgctggtgacgcaagccccggctgactggcatattcggccatagccgctgcacgcacccgaacagccaggctaagtcagaaacatagttggacttataggtgatattgacggttgaccgaacaaaaaggggcaatctaacaaagggggcaccctacggggacctagggaacgaacgatccgtagtgccgggagctgacaaacaggcgggactac

SEQ ID NO: 14054 - DNA, 491 bp, Emericella nidulans
  unsure (1)..(491): unsure at all n locations
atgcctcggggtaccggcgggcggtcccttctggatccacaatgttactgatctataaatccccgaggaacaaccagagtaggcataccagaaggtgacggatttgagatcgacccagccctgggatattcatgcacctaatgcgaccggttgactcatcataacactcgatttgtatcacggatgcttatttccccggccggtgtcaggtggagagcgtgcatgacacgccgccagatggtttcaatgaggggccctaactcctgctctgtctgacaagttcagactacaggcttacaggctcgccacgccccaagccgtttctgacatccttgcgcagggtggactcgcctcggacagggtgccctgtgggtttacccactgcgtaaagccgcacgaacggtggtagtagtcacactacatcaactgngaagaactgttttcttggaggaatgatggcattaccaggacgccgaccataggcggtcaga

SEQ ID NO: 14055 - DNA, 492 bp, Emericella nidulans
tgttgggtcccagcgactgttgcgtcccgctggggctctgggcgcgagatgagaattctgtgcttgtgatgggcctcgagctcatcggggagctggagagagctgacacggcactcattgacagtcgcaagaggcatgcctaggcctcaggctaccccactaccgacaacacacaggacatggctcatgaaaacactgcgactgcccctaccttatggacagggaggtgactgtccatcacgcgcgcagggcttattgatccttaggtcaaataagatgacgagctatgtgcgcacttggcagacggcttacgtatggggtaactcggtgataagtgaagggaggacgcgctactatgcgccagcgagtcaccatactgccaaacgagcctacgaagtaggctgatcgtccgtgagtgtcagaacgacgcggggcgagactaggaggatcaataacgcaaggagccactgtgtgatgcatggtctataccaa

SEQ ID NO: 14056 - DNA, 1804 bp, Emericella nidulans
aacaggagaagatggccgcggattcggtgaactcgccgctgcaaatcttggtttccagccaacaatctcgcgcggtggcttaacattccaagcccagcccaagtccgcccagcagcccatcatgcggcccaaggtgatgagaccgtaccagaaaaagataccgcctttgatgaagtgcgcgaggccgttgaagacttctctgtctcgctgtgcgttgttagtaaggcccattacacagaagttgctatccttaccatgataccaccgtaagtcacgccgccgctaacaagcgcaatagaaccaagcggcagaatcaatctgtcaatgacattgtacacgaaattgaggattcgaagagcacggacggaaaccaagctcggaacgcggtgggcaaggaatcggtcgaggacgccggtgtgcatgaaacctcgggattccaaagactgttcggggatatcctcgtcgggcttctcaaagccatcgtattcatccgaaggcgacgggcaagacgagctagcgcggctatgaagggacgccgtgttccgctcagtgccctgaccgctgtccctcgaccagcggtattcatggcgaatgccagcggggagagtcgtaggagtctcggccatgtcgtcggtcgacacgggcaagaattgcgcacgctcgtaggcattctctaccttctctcctctaccggcgtaggcgaagatcagagccatcacgacctgagcagagatcacccaggtcgcgacccagccgatcttgtggtgggcattattctcatagagatctggggtttggctgttgtagacaataccgacgaacaaaccgaccgcgttcaccacgaggaaaatgaattgcgacagcagcgccatgcgggaccgggcgacgctcaacataatagcttgaacgggtcagtttctggtgcgcgacttgccggctggcaaaaggggccgatgccatacctgttggtaacacgaaacaccatgcgactaccatgagggcaatgtgtgccacgatccatccagtgtactgtccgtaggcaaaataactcatgggcgagtcgtcgccattctctggttgcgcattttcgtgcgaggcgcccatatccatatgatccatatccatgttcatatccatctcgtgatcatcgccatgagcgagagcactagcgatggacgctagtaggaaaaccgccagcgcggcgcgcgaaatgcgctgcagcatggcgctcaaagtttatctataacaaaggacgcgagaagggcgagtttaggctctcccaatttatggagagctgctagcagtcaagctaaagctcgagcacctaaaccaaagcaaatgtacttgtacgagctctcggaaaatgaaaagctgtgaggggaatgcagtctccgtcgtcactgccggctctatagggctagaaagctggagagctgaacggcgcaaagtatactccttggtaggggacgtgaaggcgaaagacaccgattatgggatagagagaccaaggaacaacaagaaagaaagcgaaaaaaagaagtgagaaacaggaatgggcggtcttttattggatttcttgccttggactttgttgtacttcggagacaggcggggatagctggccgtggaaacaagagtggggccctgttctttccagcttcttcacaactcggttctctcaagtaataatgttttcctctccatcacactatcgcctctacgcggtttggtcatctatgcccaacttcaaacattcctacctaccgctcttactcagcttgcgaagcgggtcctctcagtccac

SEQ ID NO: 14057 - DNA, 556 bp, Emericella nidulans
  unsure (1)..(556): unsure at all n locations
cacctgactggcaccaaactgttaggcgcggatatgctggccgagatcacttgtatattgagcctgagcctggctctttcagcttttaccactgctgatagtagcacaaatgctcctcattgaggcatacattctactctattgctcgatactgagtactactcataccatttcatagccaccataatagagctcctgggtgcagctgatactaccaactggtgagatgcaatctcaccctgtcctctggactcgctcttatatgcaacgtaatgcaactaaaacagatcacgacatcaagcctgcgagccccctgcgcaccccgaggatataaccggccaaggacacacctcccattgatgacgatctcgagaacgagcaaagcgtggacgcataagacgcacggtaggcaccgttccatggtgtaggctgngaccacgctgactatgactataacgatgtcaaacctgccgatagcaacggatttgacaacgacagtccaaacttttacgaatagcagggggcctactgaactcaacgaggactaccttgccga

SEQ ID NO: 14058 - DNA, 503 bp, Emericella nidulans
gatcgctatggcacgatgtctggcgtttattggtgatgggctggagctcctttctggttttgacacttgcaatgactgggatgggatagacagtgaaattgttggtgagtcgctgttatactaatattagctgagtttaacagcttgagcagtgctaccaacatacatagcgaccattgcccacacgctctacagcgctcgatctgacgcttccgattaccttgattggaattaacaggtgcttggccagagttctttctgactgtgtgcaccgcactgcgcactttgcgagcacacgactatgcactatacgtcttgtcattttgtaggggtctctcccattgctatgacagactagattggttgcttgttgagaaggaaggtgtcaagtgaaagacagtgggcttttctggcattgcctgggagttgtggacttgttataatactggatacacgatgtcagatgacataatgaagttcggtgatccttgagtcgagtgtga

SEQ ID NO: 14059 - DNA, 492 bp, Emericella nidulans
tctggatatgccctagatcctaaactgcagcaccatgagctgacaacacgcacagagagttttatggatttccacctaacgatcgggtgggcagcacatcggataacggttgataacacgggacgtgatacatcacggtgatagaggcagaaagtcgggatatagtacgtcgcgacccatacaaacaaggcacgtagcaagcttcgtctctacggtatgagtccttgacgctgtccatattaatggagaatggggccaggtagccggattctcggactgcgttccatacactgacggttgagcctccgaatgctagtagggactgcggccatgtcatgaacacggagatctactagatcggcggtgctgtataataaatgcacctggggacacgactgtgcatttatgggatcggtataagcatatatgacagtatcactgaacggacatggcgggtggtctggctagtctaaggggtatggatcacccagg

SEQ ID NO: 14060 - DNA, 547 bp, Emericella nidulans
aaaaaaacattgggcgaatggacgttcttgggataccaccaggtgcgtttgcatttttgtactgcagggatcggcggagcggcccagaggaccatcaggggcacacggggcgtcctggagactccgagaataggatggacggcacgggtgtgtggattcagttccagtgaaaagggcgtgaaagattaatacatagccactatgttagtacggacggcatcaatggactctggtggtagggccggactaaacggttgggaggctacactggagctagataatggctaggctgcaaaagagctaatcttggcgatccacgtgcacagattaaggggcgaagctcctagcacgaacggatactgtcttgaagagagaagactttcgaacatgacaacactaatggtctgggtactatatgacaagctcattgagaacatcctgtgacaccttgatagtggctgcagtcaggtcgtcatacacaatgctgaacacttggtcaaacaggtgccatgatcactgaatgtgatgatccagaccagcacatggc

SEQ ID NO: 14061 - DNA, 453 bp, Emericella nidulans
actttgattgtcgtgcgcaacgtcgtgcttgagtactcctgcagcaccgatgttccgtgccttttgaggctttcacgaaaggactcggccaaaggtccctggggcgaggtcgtctagagtgagattgcgattactggacagtcgctagactcttgactggactatgggtgttgatggacagtggtactaagttatgtcgtgggtctgcgctgcccaggatgtcaatgacagacagacggtaaatgctgacattgatctggtgcctgcggacttcgacggcctgactgagttatgtgagaatcctgctgggtacacttgccagcttgttgtgtacgttgggattagatataacctgagttgctagaagatggttcgatgagggttgaactagctgctacacgcagacggctgggtctgtcagtactgagggcgccgtcttgcgctatggaagtc

SEQ ID NO: 14062 - DNA, 1459 bp, Emericella nidulans
caaatttccagtgtgccattgggccccttaaaggtgcccggcaaaattggggttttcaaaaaggccaccgcctaaaggaacacctttttgaattagttggcattcttcttttagatattttaccccataaattcaaagttttccctaaaggacttaaagcgtcgttagcttgaggacggctttcgccacaaacggattctctcactcttcacgggacgcctgtctagattttaagttcaaattagcaaaagtatatccatatcaagggggcgaattaagatttttaaggaacccacttggtgagaagcctatcttgcatggactgacgattgctcgataccgatctctcatggcggctggagatttgatcgtctgttgatccggtctgtcgacctcgtaaaggcggggtgggatcatcgcggtcagcgaaggcaccgggggtgtattcctgcatgatagcttgagcaagatgctgccgcagaaacaagacggtaccgcatctctgacgggtgagatactggggagaatgacgttggagggactcggtcgatgtagcgagagcacatgctcatgacaggcacagaagccgagaagattggggtaggtaatacgccaagacaaagtaaacctaccttatcaactcaatactaggcaccgtatttctgctagaggcataaaatgcggcttgtcggttgtaatagagataatagctatcctaatcatctattctaattcggtcctatactgcgttatactgcgtccgacttgacagagagagttcacgaccgaatgcgaccatgcttgctctgcagcgatcggcggttaatttcgagagtttgtgctgtttgcaggcagaattgggacccagcacaaaaaaaggagcagggggcactagtttcgtctcgtggtggttcaagagattattattattattgttatggtcggcttgctggtttagactactgttgtcctttctctcggactcgcttcctcttgtctgcttccaggacagccccgaagatacatagctcgttcaacgtgtttgttttcgcccattcactacgctgttgttccttcctccggtgctatacgaagtttacttacgctcgtaccctgaccaacgccaagtccagcagaactgctccccgaccaaacttctttgtcgactgcttcgatacagtcaatataaccccaacctgcttcttggagaaccggccaacggtcttatactcttcatattcagaatcgtgtctacgcatctcagaattcttggaacagagcctgctgttcttgatccccgcaatggaccgttaacgacctttcatggtcgcgcgacgctgctggtcaaggctttctctcgttaggcattgatgcaatttcgcttctgaatgttcttgcgattgggcgctcacaccgaatttttctcgctttccgccgtaaatatctctccctgggcgta

SEQ ID NO: 14063 - DNA, 566 bp, Emericella nidulans
accaatatatccctgacccggacgtaaggtccggtgacaccaaagcacacataagccccatgatccgattgttttatgctgtctaggattactggtctatctagagatctttggagattcagagacgatgaaccaactctcgatcatccagctgtgcagcgggaatgtctgcggacatggcatgtgtagatgtacgcagcttctatagttgctgatgcactagcctatagcgactgttaaacactagagtggacggcgacagcgactcatctcagatagagcattatgtagtacagtgtggatgcctgcatacttagaaagcacgtggaccggatagctcagatgccgaccgcagctattgaagattctactgactaatagcataaccagccatgtacattgtacactagacaactgacaggcactcgagtgatgcaggatgaacaatctgattctgtctgacgcttcacgatagacacatgcacagcaccagattgacgaacttgagtggtgacatacaacatgctacatgaatagagatacataatctaatcacacactgcata

SEQ ID NO: 14064 - DNA, 1345 bp, Emericella nidulans
ctcaagctccttcagccgtcgagccgcctccgtcttgaaacgggcgaggaagctctcgcctccggcagtcttcttgtcgccaccatcctgctgctgttctgtcttggaggagcctcccgcagcgcaagattccgtaggagttagagagccgtccgttgttcctcgctcagcggtggtgccaaacgctgtgctgagcgataggccccttgtccgccccacaaggctatctttgaggccggtgaatcctttgacggcttcttcgctggcggcggcgtattcctgtcgtgcgccttcgtagtagctttcaccatgtttacggacgttgccccagatgtcgccgaggcgtgagccccaagggcttgcggagaaggcgcggaaggtctcctgtagctcggtgttcaaatcgacggcgggttggttcgtgttggttgtaccctgctgggattcgtccttttctgtttgattgctggaggagaatagatccccttggacataatcgtagatatccatagttcggtgtttgttggggaagaggggaaattgggggttgcgatgatcagcgacagtcatgatgtcttggctctcagcaggcgctttgttttgttatcgggtctacgatgggccgaccgccgaactcacgaagcatgcaagaatgtagtggtctttttacgtaggaattaagaggcttaatctagtgatatatatacgttttcatcatgaatccggttgattgtacggttctcccacgctgtcctggctgctcatccaaaacccaggtatgggtatgctttccatgacgctcgatgttagaatctggcttctggaaagcatcgctcgaggcgcagagtcctgtccagcagttctcggcctgccagccctgtctactggttgtgaggattcaacttgaaccacaacgtttctcgcagatggaccatgtccattcaaggggacgctgtcctcatggcgtgcggctggtgaggactcaggaacaatgtctgtcggcgttctacttccgtcctctgaatcagggagagtttgatccagactttgggtttcagacaccataatcggcgcatttgacgtcagcggggctttcataggcgaggatgacggagttggggttatagaacgcaatccatttgattcctctgggaagagctctgccaatttctgcgtattaattgtaggcacaggttctagcggaaattgggtattgggatgaacccttcggtagcatattgacgcttcggataggagagtcgattcagatgaaaatgggccatactcaggctcttttacggacacaggctgtggcggtaattcttgagactcgatgattggggag

SEQ ID NO: 14065 - DNA, 540 bp, Emericella nidulans
  unsure (1)..(540): unsure at all n locations
aaccgccagggccaatggcgagtactgttcccaaagacgagtggttttagccttttaccggcttgcctggagtattggcagacctacactgcggccgacctggatacaacgtgcccatattcgccaagagggctagacagaaaggactaggacgcaccagtagagcgagccggcactggcgacgatgactgccggttcaacagcgaataggcgcgagataatgccaccgaagctattccaagccacaatgctgtcctccgatggcatccacaagggcactacaaggctcatgatcccacccaggaggtaaatgccgaccagcatgtgaccaccagggccgcgtgcgagcacatagatccggctgtcgtcgagactgctggggtacgacggaagcaaactaggaccggaccatgtaggctgaacgactgggaacacaaacgcagcttgaggaacggaagcaagcgactgactncgtgacctcagtgaccngatgatcacatccctgggaatcagagcaactgacagcatcagctgcaaaca

SEQ ID NO: 14066 - DNA, 527 bp, Emericella nidulans
atgcaggtggcggctccggcggactgcctccggtggggtgaaggcggctgtgcagctggcaagggatgttacagttgcaacggctagaacgcatgaggacagctggagccacagcgcaagcatatgtagtagtcgggcccgttggaagtacctagggcgagggccgccacaggctgcgcggccctcacgatgcagttgtaaactagtaacgacacggctagaacgctagacacccctcagagccatatgggaactagggctgacgtcggatcataagaaaatgcacagctcacacatctatcacacctgcctctacatctcttcggattgacacaggaccaaaggcaacaggggacgtcaacctcacatgggtatgctatgagagagagagccaatgcctctgacccactacgaattacaattcgctcgctatccagaagcaccatcatctgcggagatgaatactccagggatcttacctttcttcagactcagttggcgaccacagacacgcaccatccaggact

SEQ ID NO: 14067 - DNA, 611 bp, Emericella nidulans
  unsure (1)..(611): unsure at all n locations
gcagtgaaaaaaggcccatcgggcacccccgatgaaagtttgtgctttcacccctgaggggagcgacatttggcccgggtgcctctctagggcggcatcggacgatccctgatcgcttgtacgcacacgagccatttgtaggacctcttgaacggatatgaccgacactaagatctcaaattctgcattcatgcgctgcatggcatacgtgtaggcgacgcacatgagcttgacgagatgactgaagagctcgcggcgcattttgtcggcactgatgcttatgcacgtatgccaggggggagtaaagcacgacccgagcctggcagtacatggtacgcgaactatgatagccggttgacatgccatggatatacaagatactcacgggggacacaggcgcatacgagaggaggaaatcatgtggtgacagcgcccgatgaggctggaccatgaccacctgccagccaatgctgattagcgggttaacccngcatgtgtcccgttcctgcctatatgagcccttgtctcctactttaaagaacggccttgacttatatgataacaacggtggcaaggcacctttttttcctccagcccatagggtggttggc

SEQ ID NO: 14068 - DNA, 2068 bp, Emericella nidulans
acggcggcagccagatcccagaagtagtgacattctttgatttttcttattttacatttctcaggatcctggcattcagatatctggattggcgagctacaagtcggtcataacatctcatatgcttcatgcaacccgcaagctggatgacgccataaccaatacccgcaaggtcctcaagccaggtgaggagttggtcctgcttgaaaaaatgaaaccagacacttgcatttgccctttgtgtccagggtgctgacaggatggtcagactgcctacattataagacccgttcagattcagtcgttgcatcacaaaaaacagtggcatcagcttttgaaggaaatggctcctctggtgtcgacgtgcaggtgctggttcagaaaaaggagaagtaccggtacagcagcatcgttatatccacagcaattggtgaggatggaccagagacggattctcccccggatgtggtgttcctcgtcaactctgatattcaagatcagtgggatgttgtaactacaatcaacaaggctcagccgtggcctatcgtcagcctcgcggatgctaacgcattcgctttcaacctctcaaccacgctggtatttctcaatggtctgcataattcgctctgatcagcacattatggaaggattgggacgagcgttggcatcagactatacaagaaagttgtttgtaactttgccagtggactaatctgatacccaactcacattctaggttacatcccaaggtttgttgagaaaatcgagaagtattcgatagatgacctcgaggccatttatatcgcctcaaacggtaaactttgcataccgacagtgtccgatgacagcaccgcaagccagtggctcacccaatcgtcagcaattcccgtatcgaggaagtcaagtcgtccgctgcaaccagctgttccttcgccaaccgggtaggcgcgaaaagtcaatgtatactgagtacgaacaggagtcgccgtccctggttgaggatgaaatcatcgtccgcgttgagccctgctcgacgacgatccatcgctcgtcggtgcaatctgccaggtcaccaatagccaaggccttgacgttcagatcgggtgtctggaagactacgacggttccggtctctcatgctgcctcgctcctgagaggcacgcggtggacctcagtctccagagtacaaagaagttggacctcacaatatctggcttctctcgagtttcttatttgtctattgacatgaaagggatgcttgtcagaatgactgcagaacggttcttccgtaaggcctgtgatgtccacgtgttcaagaagctggggtaacccgaaccgatccataaataatattactgtactgaatctgtgccacggttcgcacaacatcaaccttcggatataagtggcctggacctagctgtgcaaatgcagtcggtctttccagacaaatacctgaagccacattgatactcgtgcaacaattgcgtaacctatgtactacaaaatgccggcccggagtgcagctccctcgtacaggaccttctcgacatctagcggtatctggaaacgattggtcattaccagggggtgaagcgatatttccctggactggtttctatgcggctgtgcagaaattctagggtaatggctgggtggttcttactcctcatctacagtcggatgctcacgcctcgatcaggctggcctgctgacccctatcatgatatcaccatactctatcttcctaaattagtatgtagacgctcaaaacattataattcgtcttctcgccggcaaataccccttccattttagtgcgcatcatcccccaactgcggacaggcctcgctgcccaaagtacaaagtatcgccgccattattcgtctaaaacttcatactcacttaaggacaacagatatcaaatttattttggcacattaagatgcgatgtggggtttaaagctcccagcgaacactcccatcgtcctggccgtctccggcatccagcgtctcgaagcgaacaacgccaacttactgatcgacgcgttcaatgccgtgttcaccc

SEQ ID NO: 14069 - DNA, 370 bp, Emericella nidulans
taagcccgccgtcgccggacgtgcccttacatggtgccctgacctctttcacgtttggttggtggatgcctccactacggtcacggctgtaggctgccactagctccacacgtttgcagaggcccgccataggaccatggcacgggctgcctaggtctcggttctggagcggccactctataattcacacccacggactgctggatgtaccatatccctgtatgagcgccggagtgcgtgcgattgtctgaatgcgcatgcggttataagaactggtctgggacaccaccgacaggatcattcactggctgtaatcgttgtctgacgccaccacagaaagactactgactctgttgtctcgtcaagcgtc

SEQ ID NO: 14070 - DNA, 459 bp, Emericella nidulans
ggatgccacggccaaccgggagaccaagaccttatgactagtctgtatacgtttgaggtttgtcaggatcccgggcttacgtcgcaccattaatatcttttgattgtcagagggtccatactagcagcaagggctggagaaaaatctgacccgttgtcataatcgagtctctgcagcacatacactgaaagagcgcaaagacttgtacaggatccctctaaagatcattactaggaacggcttattatatagggtgcacactagcttctaatgagtgattcgagttgaccaagtcagtagaccaaaagtcctctcacttgggccattcggtgggctatgggcatgcctcacacgcttagacagatgtaaggattgagactactggtattgtgtttcaagcataggaatctgtttaatgctcgagactgtagagcatactacctagctgggcgcggctgc

SEQ ID NO: 14071 - DNA, 1211 bp, Emericella nidulans
atcttagagattttcgcaccaagattgcggcgttcgtcggccggtcatgttgctctgtcccggatatgcgaacagcgtcacgtctctctgactgggcgtctttccccaatcgatccactcctcgacggctgcatctcctcgcaagcacatactctgaccggtagcaatttcccgcaagcctaccaggctggtatgggcatcttggtggtacacatagttgaagccgcggcgtttgctgaaacgcgacgccttttgtgaccgagtatagctggacatgcactcgcccaccagtttgatggaagcggtggcattggctgtgaagaccaggtcaaagtctctaggatctgcgccgaagaagtgcagaagctgcacgcgaatagcgtctactcgagccccagatacgcgtgatggagtattatctgaatgggggttcccatacagactcgtctggaggtccagagcatacgaccggattagtgaccgcgcatataccgtcgatcccgcgtggtcaaggtatatgacatccctcagtgtagggtattcgacctctcggacgtgctcgacgctttcgttatatcggggtcctgactcggtctctagatttcgtactcggtccatgattgatacacaggggcctgtttttgcaacagcaaatgcagggcaggacggacatcaacggaataaatctgcgaactagaaatgaccacgtccgagcaatccagctatttaatcacatctgccgctgcggtggccctgcgtcttcgccagtcgctggtcggctgatgttggaattcttccagcgcggcccagtcaaacgtcagctcggatcgtgcagggcaccgaatggctgtacgggtagaaggattgcagcccctgagcgttcgctgcgggcaagaccgtccctggtcacgcttgtataccgacgctgccaatcccataggcccgttctacagctatccagtccgcattccaactcaacggacgggcggtttgcgtgggcggccaagattgaccagggcatgaaccaatccagggtcccagtgtcagaacagccacggacgaaggcgccatcgtctgttacgtcgacctatgactcggcggttggattgctggccggggcccctgttgcgacccaagacttattttttggcctacacaactggctgaaccagccagggcccggtacctcacctggtttcttcccagtgatg

SEQ ID NO: 14072 - DNA, 2051 bp, Emericella nidulans
  unsure (1)..(2051): unsure at all n locations
gaacctgtccgcgatgctcgcaccatgagataccccaattacaagtcgtccaacgacagatctcactttcgtcctctttcccccatatccgccgccttcagacgtcctctacggacacacaagagcgtattcccatccgtaaacaactcaagcaggaagccaaagccataaaatctcggaagcgagaacgacgagaacaggaggaagcttctcggcataagtgggagttgactgtgggagtggagatacatgcgcagttgaatacagagacgaagctcttctcaagtgcggcaacccattgatctcctgatacttgcaagtatctgatcattcagcttgaataggagcaccgacctcaccctccgaacttcccaacaccaacgttgctctgttcgacctcgcgtttcccggcagtcaaccggtcggtccatatacaatccgcggtgctttcgggataatgctgatagattggactaggaattccaagtggcgacccttctgcctgctcttcgcgccgcaattgctctgaactgcgatatccagccggttagtcgtttcgaccggaagcactatttctatcaagatcagccgtcgggctaccagattactcaatactacggtaggacgaatcccgtggtcttgccgttcggaaattgacttgttcagaaccattcgccagaaatggctacctcgaccttttccgccatgacggtattgctccagaggacggagaccgggttcgtatcggcattaaacaaatccagctcgaacaagacacggcgaaatcgcaagaataccctccatccatgcagctcctcgatttcaaccgtgtttcccatcctctcattgagataattacaatgcccgaaatccacactcccgccacggctgccgcatttgtgcgtaaggttcaagccatccttcaatcgtgtagcgccgtaactaccggaatggaggcgggtggtctccgcgcggatatcaacgtctcggtacggctacgaggtgacggttcaggcacacatcaatatagcggcatcggtgggcttggtcaacgcactgagatcaagaacctgagcagcttcaaggcagtagaggacgcgattatcgcagagaagaacagacagattgctgttctcgagaggngggttgttgtccgaaggcgagacgcgtggctggacgattggaagcaccgaaacacggaaacttcgaggaaaagagggcgaggtcgactatcgatacatgcccgatcctgatattccgcctctcctgattggcaaggatatcatctcggcgctttcgaataccctgccggcgggtccggatgcacttatcgacatgctagtcggccagtacggacttgccatagaagacgcaaagccgcttgttgaacttgaagacggggcacgactagagtattaccaggatgttgtcgatatcttacgtaatctacagcaagatctcgattcaaagactcaagccggtctcggccgtgttgctggcaactgggttctccacgaactcggcggtttactgagcaaggctggcctagcctgggatgccgaaagagttacagcggagtctctcgcggcgcttatcgaccagctccagcgaaagcgcattactggagcgacggccaaaaaggtgcttgccatgttatttgacggagaccgacggcctgtcgctcaactcctcgaggaggaaaatctgatcttgcggccgctgtcgcgtgaggaatacattgctctcgcttcagcagctatagagctgaacccgcaaatggtagaacagatccggagtaaaaaccagcttggcaagctgggctggtttgtgggccaaatgatgcgtatgggtgaaaaaggtcgtgtggaggcacaaaaagctgacgcgattctgcgagagcttattctaggattgtcgcagtaggctggctactgactaccctgtgtaagatagagtgtacacaaagatctatgtgtagtatagatatagatatcgatgatgtcatggcaaaaagcaatagtgatacccagcaccataaacaaactgaaaca

SEQ ID NO: 14073 - DNA, 433 bp, Emericella nidulans
gggcgaagatccggccacacggccgctagcgtgcggtggatgacgcggggtttaagtgtatgaggccaatggcgcatatcgctggcggtgggctcagacgactaaggtgtctagggctacaactaccagactgagctgttgcaggagagaatggacggtaacgacatggctgtagtggaccatcatgcgttctactgatggactgattggggacctacttcagggtcagaggctcaataggcatgagacatgctgcccataccgctatggatccagtatggacctttatagacgcaccgatagggagatctacgccacaccttccacagttagagctccagacctaggcgaggcgacccaggacggctgacctggtgcattaccgtaggtcgaagaactacgggacgtgaggacgagatatgcggggaatcca

SEQ ID NO: 14074 - DNA, 1043 bp, Emericella nidulans
ttcaggaagatgacggtgttacgtcggcggcctcacatcatggcgactcccgtagctccatcaataccaaagatcccggctgtcagtactcgctttttaccgcctaccggcagaagctgtacctgttcagtactatggatcctattctttttgggcttcggcgaaggggctggattttcgattcaagttccagcagcccggtcatatcagtttagttcccgaagctcatcttagcagcgatcaacgtcgtgacgcttttctggtaagggtcccgctaccgataccgatgattgggctgatggcgtgagccaccccacatagttgacgatcacgattcggataaccgtgtataactgcataaaaaaggcttactcagcgggtgtattcttactaaagttaccgagtgcagtatattaggctaaccataactagttattcggagcttcggcatgtgaagagctcattatcgattcgattcagaccacttcggagacaatggaggtcatttccgtctacgatagagtattccaaagtccgccagcataaagtaccatcagcacttgctctgagtaagattatggatagcgtacggtccgcgcctccccgcacggatggttatgttcccgagttggtcaagagacgcgtcttagctaatgatacctaggcgcctagatctcttctgagatttatcataatgcatcggaactggtgtgcagtgccgaggctgccatagcccatgttatacgtggtgcaaggatgtcctcgagtgcgtcatctcggctcgctctttgacccgagcccggctccatgcgcagagctggccgcggtgaacgtggaatacagattaggaccgtcggggactttgattgtccgtgtcaaaccaattgacccaagcgtacaggttgctgcccaagtcgcagagcaaatgcgcacatggaatgttgaacgtggccgtctcctcaaggcggaaacactgcgccctgacacgtgaccgccatcccagttcttcgagcaatttcgccgcacctaagcatgaagggcga

SEQ ID NO: 14075 - DNA, 448 bp, Emericella nidulans
acgatcttaccttcactgcactgctatcaattgcatgcgcaccattctgttttttatttgcaatgtctaatgtcgctggactgtacatccttgtgtactcgtgtatgtgatgcacatgatatgagactccaagagaaattagaacctcagcggcttaacgctatcagttggatcacctaagttgcacagacagaaattactcattatccgcttcaacgcggatcttctgctccctaagtggaccgagattccagctcaggtacaaatacttatcttcgtttattatcatacacatctgcttcggttcagtagtcagggggctcgccctatataacgcctgtggcactatgagacattgcgccgtgccgtcttatgtatctatgtgcgcaccaccgagatagattatggcaagtatgtgaaatgacattaagacactgacaattttgct

SEQ ID NO: 14076 - DNA, 481 bp, Emericella nidulans
cacgcgagggagacacctgccattcgcagacccggactgtgtttgcgatgacgtagaagcctgacggtacccatggggccgcgcatttgacatatcgacgacggcgtgtggccaaagtgctatattgcgcgtgtcatgatgcatgactagaataacttgaccggacgggtaatcgctccgcaatgaacactgccgagccaccacatgtgggagagagtaaaccgatgaggacaacggggactatcgattatagcacaccagcggctatcatgagatccaggggtgcagggactacacggtaggccacgacgtcgagtatgtcggcaccatggtcggtcagttctacagatcgcgaccaaacggatactaacgataattaagaatccgcgcactgagggacaccgcttgaaggacgtgagagcaaactgacacaggaccgggaggaccggtcgacgagatacacagtctagatacgactact

SEQ ID NO: 14077 - DNA, 1114 bp, Emericella nidulans
atttccttcattttgcgaccagcaaggcaatgtatcagccccaaaggtctagacttaagaggccggatttattcttaatcagtaaacttggagacgcctctgcttgatgctctttgtaatacatggtagaaagcgcaatattggactctaaagtatataacctccattgttgactcattatatgtaatttgttgccactttccccgaaatcatgctaggccactaatatctggccgaagttgttctatatggtgatttcatttacaaggtgagagtggcagaccacatatatccatctaccaagttcgtccgacttgcttcatcgccttccacagcaagatctttgcataaaccacatgcaatttatacaaccaccacggcaccttttgaagtcctttccctttgtccgccgggatacatatttccgcacccaacggtcacatatgtaactttcgttgtctcacttgtgatcttctccacaatgaactcctggaatgcgccttccatcaatcgccaggggattccataagaggccgctttgtcgacttgatcgactgagcggcgtggaaacttccagtagaggacggttcctgctgcgtctgtttctgcatttatgttgctggccgtgatcatcgccttgctcggccggaattcgcagatagggttagccgtttcagagtgtagaataggttggtccagctgtatccttcgtgcagagctccagtgacctagcataaacgcccccgcactatgtgacctcccaaacaacaagctccacggagtgaaggatagttgcggaacatctttatccaggaaccacgcttccagccctcttgctcgagcgtcaaggaacgcagagaacagattccttgcaagatcatatgcgtctccgacttcgcttattccacacctcaccagctgtgcaacgggaacatcaacctgcagcgccacaagcgaagtcacccagtgcgttttctgcgtttcgcgcttgatcccatttgaacccggccactctgaaagcaaggctgacttatctgttctctgtggaggtcctggtgctccttcggacgactcgatgatattacgacaagcactggctttggaaagttaagtt

SEQ ID NO: 14078 - DNA, 991 bp, Emericella nidulans
  unsure (1)..(991): unsure at all n locations
ggccgccggcgtgcgcgtgctctcagagaagcaattgggcgaggaggcacttacagcttcgttcattttgcacgccttatccccaaccccttgcttcggaaaggtaggactgacaggagttgccatttccatgctctccttcgaaaccttccattctccaactgtgacgacacgagactttccgatccgacgagatgctttggagatgctgaggactgtttcatcataaacagaaaaacgcctatactttgtttccaccatgacaccgttgaagatgtttgtctttacccgttccgaacgtgcaagccatgctctcttttccgcatgagacatcccctgtatgctgacttcatcaagagcgtaggaggacattatggaatgaaagtccgagtttactaggtcctttgcatcaaaagacctagggatgatcggcctgctgggtatcaaacagatctcatcctcagtggtctcctccagatccgtatggtgggttatgttgtttccaaactctcccatgaccttgtctgctaagtaggccttcttatccatacgccggcgcatttggtcttctactgttcccttggcgtgtatcctgaatatttgtacgggctgtgtctggccgatgcgatgaaccctcgattcggcttgccgcattacctgagggttccaatcatcatccagaaaaatgactatggatgagctgacaaggttgagaccttcgcctccggcccgggtcgaaagcaagaacaccatataccggggatcattctggaagagaaaaaccgaaagatttctccatgcggaggatgtgctcccgtctaaacgaccgtacttgaatgaaaactgtgccttttccatttccaggaggtcttcgcacaggtcgagggtttggtcaaatcccgagaagatgattgacttcttggtctctatccaacatactgncggatcattttctgagaacaatgaacttgcatgaggcttcgacatatgg

SEQ ID NO: 14079 - DNA, 649 bp, Emericella nidulans
gccacgggagcggagagggaggaaacggaccggcccatacaaagtcccgcaccagacacccgacagaggggcgaaggacccacagcagcacgcaaccacgcccgacacggggagccaaagagggacgccgcgaaccacacccagggacagcgcaacgcaccggacgccagcgagccgcgagaagggcaccccagaaccaaccagggaacccaagaccaggcacacggaccagggcaagagccgacgacccgacaaccaacgacccacccaaacaaccgggggaaacacaccgcaagcacaacccccacaaacacaaaaaacaacaacaaaacaccccacaaaccaagacccaacacacaaaccaacagcacaacaaacaccacccacaaccccccgccacaaccaaccccaaaaacaaacccggcaacacacacgacctcaccgcaccacaccacccgccaggcaccaagccaacagcaccaaacacaagcaacaacacacgccaccaaaaaccaacaaacacaccaacaacaaccaaacccagaccccaccgcacacaacacccacacaaaccccagacaaccaccgaaccacccaacccacccacccaacacacccccaatacaccacccaacgccaccacccccaa

SEQ ID NO: 14080 - DNA, 539 bp, Emericella nidulans
tcccggattgtgctaactaaccctggggagatgcacagatgacattccgtgaaaaacagggttggatacttgatcgctgacaacgattcatagatggcaagcgatatgcaaggtgatgcaaatacgctcaccggaatacacatcactttccctttcattggcatgcatgattggctcatcacataccgggaatgaaagggcaacacaaatctgaacgtatggaccgagacatgtatctgagatatgacaaaccaagtaacaacatgtgcgccatgtcaaacaaaacctgcattactcagacacatactgggtcggtagtatggcctgtgagaccgaaggcagactgtgttgttgtgctacaccatcgggtgtgactcataggttgctgacaggatcaatagtcatcgtacgctgccataggaggtgtcggacgtttagactataatgatcaatgctatgcagagtatggaccttctgtagacctatatctatgacagacgggcatctgagagtggataagtcgttgcagtgctaggtca

SEQ ID NO: 14081 - DNA, 445 bp, Emericella nidulans
catacgtggcggctgtgcctgccgtatcagtgtcattggcctgattgtcgattgactcatatacacaggcggggtcgcataagccaccgatcttgctgtagtccaatgctggctgtgctagaatctcatgggccgcatggtggatgagacagcctaattcggtcgcctgattacagtaagacaactgccgtggggatcgcttgatatcttcttggaagtgtgaggagcattcacctatggcttgcgagtgagaatatgacaggccgccttggacaggcaatgttcaactgtaccatgggtagagtcgcacactaaggtagatgcctgaggggagcgtatcttgctgctcctcatgggtagctccatgatagcatgcgatgacggagtgcacagactttcatgttgagcgaactcatggggcattcgttttggagggtccaatggt

SEQ ID NO: 14082 - DNA, 719 bp, Emericella nidulans
ggaacacacaaacacgacaagaacgaaaagggaccccacaaaaaacaaacgaaaaagaaggggcccgctgacgacaaccagggaccaggcagagaacagggagagaggggggggcaacgcgaacaggcaggcacacgcaagcttacttcccccagcggacgcagcacagagggccgggccgagaacgaagggacggcgcgacacaaccggccacccacagcaaagacaggcgccgcgccgaccaacagagaagaacaccaagacaccggagaacacaaaccgacgacccgacaggaaccagaaagcaaacagcaggcccacaaggacccaaccaacacacggagcaaacgcaggggcccccgagcgcaggagccagacaccaacccgaccgggagcagccaggcagcccccgccacaacgggaggaagcaggaccgggccagccggggaacgcggcagccgaaaccccccaaagagcgcccaccagccgacggggggacccaacacccacaagggggcggccggcagacggcccaacagagggaacacgacaaccagggggacgggggggacacaaaagacgggacgacaacccgcgcaccaaggacaaggggaaagaccacgacacgggaagcaacccccagggccgggacaaccgcagaaaaccaacaacaagcgccaggcccaagcacgggacccggcacaggggaaaaaccaccc

SEQ ID NO: 14083 - DNA, 1294 bp, Emericella nidulans
gatcttagttgagacgcacacccatgtactgtcgcagcgagctagaacccttacaaaacgagttaaattctcatcgtcccagcatccaagcagcccatgccctgcgttagcctgatacttcaaattacaagattgacgagccatcttacatcgcgagtcaaggcagtctcgaacagttaagcatacgtgcaattttcacagcatgacttcttgccgcctcgtgtcgagcgcttgaggcatggagaatcatgtgggagccactgggagcttgcgagcataaccatcattttaagaatgcaataatagtagacaaatgcagatgtctctgtagctgccaatctatattgctggttggagcacccacacccctgctcaatcgcgcatcagaccatccacgcgtccgaggtggaccagccagggaagcaagcgtgatgatccattggtttaaatgaggtgtttatctcggactaactcagttgatatattgcctcgtggccgaaaacctgcaggggcagcaataacaacgccatagatgcagccggataaatcttctacctcggaatgtggggtgtgggagcggaaccgttcctcgcaggtggaagatcacttaaaagtgtagaagacctgttcctcctgtataacaatcccgtcaaacgactccaaatggaggtcctgaactactccaattctccgcaattcaaggatctctatcggcttctcctactttgacctcaaatccgtatatccgtcaatggtaaaaaacgaaatgatctaccgcgggggatttccgacacagtcaaaattagccaatcagaccgcacagagaataagatttgcttattgatcattatacatccccatgcggggggttgcgtagttttgctcgaatacccctcttgacttcaacccttatatatcgcctctccccacgttatcggagagcaattgacccaaatcccaccttttcttagattcagccagcaagtaaccggcacaatggatccctcacaagtcaaaatcccgcctatgaagaaccttacggtcgagaacatcaccgagaatgtcatccgcatcaactcgctctgcgaagacgagcgaatgaaatacgtgctcgaaagactagtcacacaccttcatgactttgcgcgcgagaccagactctcctcggctgagtggatgactggactgaagttcctgaccgaggtcggtcagatctgtacggacgtgcgacaggtatgcaccttatttcttctttcctcattctctctgaaaaagaccgagactgacgtttgtt

SEQ ID NO: 14084 - DNA, 2068 bp, Emericella nidulans
ccttctcctcattctccaaaatcaccatagctgcctctgccatgagcacgcccgtgaagtgatacattgacgatcccgcatacttcaacttccccaacacacgcttcggcgtgtcctggtccggagtggcgatggcgcggtactcgcatcggtcattacggccgctctccgtggttggcccgctgccaggggcatagatggctttcttcaccagccatcggaccggtgccaagatcaagaaagccgttcccaccaggaaggcgtaattccacaatattccaataaatgtgttgcggacgttgaggaattggcgaaagtaaaatctggggccgtagagttccggcatcagggtgctgcttcgatggatgatagtcatgtcgcaaaagtccgtgggcgacttagtgagcgtgcctaagtcacgaacagttcggacaccgaggatccgcgccacgaaggactcggatggaatgtcctttggtggcggggaggctgcaagggcgaacggctttgttgattcgaggagttgagatccagagaagtcctctatacaggttaagatagaagccagagtaccgccgctcgcgccagaggatctatgcatggtttaataacaccaacgcggatggtatagaatgtagcatacttgaactcgtagattgagccggtaatctctttagtttggcaggacatcttctccctaacttccttgaccagggcataagctaacatgtctgcaggcgcgctttcaatgccgacacagtggattatctacttcgattagacaatcgctatacatgagtgtttggaggttacttacaatggcaccgttcgacttcgctgttccgtgatacttgtcgactgtctgcttgacccatggtgtctcgccagtcctgcagcaattagccgttgcaataatcttgccagattgaaacttacgcatcgacatagtgggtgccggcattcgcgcaagcctcgacaacaggagtggagtatatgtgataaggaccaacgcagttgataataagcttcgttctctctgcgagagagcgcagttcctccttattgagctggacagagatgatctctatggacgcatcagcagagccgctccacaagcaccagtacatagtcttaccgggatccaagcgatcagggttgagcttcttcaactcctgagcgacgccctcaattttcttggtggaacgccctgccagcgcccatttcaggtttgtgggcagatgagtgacgatatgctctgcgcagtactttccagtatatccagtagggccgaggaccacaatatcgaattccctgctagactccatattgcctgtgtgaagaagggactgtaaccctgaatgggcttggagaaccgaggttgttcaacaaggctacgtccggtactatttacgtaccaagtcagagaaactgaaagatgtaaagaatcaacacttcactaaaatcaatcaagcgaagcagctctggcaatggacgaaagatgcgactacgagccttataattaaggggatctggcagccgcggctcggatacgtcatggcatgcgctcgtgctgcttaaggctgggtccgcggtacagtatcacagatttgacatgcatttttctggtctctaggcgatgtgattagacgtatatagagtgataatctatggtaaaagctacagccatattggctctgtactagacagcttcagtccacaaccatgacctgccatccaaaaacactaaccaggttttgaattggcttatctaagaaacacaccagtaatttctgcgcttttttgccttttctgaccgcctgctgttaagaggcttcatataatttcgaggtcgccttgtgtccccgacatctaacatgatcttttcagacaaaagagaggactggagtttagaaaaggcgtagcggttgaattatttttctccattctatctccacctgctgtgttaaaaggccgcgctttctgtaaaagcactgcaaaagttaggataatatatcacgtgacgacaagtccaagccctagcgcagcgcgaacttatcaataatggggg

SEQ ID NO: 14085 - DNA, 541 bp, Emericella nidulans
cgttgggggctctggtactgtgccgggcgctttttcttgcaggtgagggtctttccttgcaggatgcgttggagggtcaggctgcttattctttccatgcataaagtctgatcatcgcttgtagcgactgtcctcttatgtggtgccaagatgctcggcttttggtgtccagtagtccaatgcgagaccaaaaactgctcagattctgccatgttcgagcagaggatcggtggagacattgcgggcagatgttgcttttcgatacgctgtcacggataactgtcgatgctggctccggctatgaggggatcgtacctgtggtcagtagagtgcagtgactgatattgcttctgtcaatgtttgcggtgcggactacactcatgtgaccggaaagcttgagtgtttagtgctgcaaccttagaccttgctgtggggtgagactcggtcgcacgagggctcttctgcatgtatagtttgtcttatccgctacagtgatgggctaatgggacgtctatttatatgggctccggctgtttaggtg

SEQ ID NO: 14086 - DNA, 1901 bp, Emericella nidulans
cattcagcaagatttggaaccccacggtcaatattgtcatgataatcatgatgatcgcctgccctttacaggagacagacccatgagtatcacggaccaaaaagaaaagaccaatcaaactgagctccataacgtatataccggtgaacaactggttgatcgcgcggggaaagagtaatcctccggtgtcaaagcggaatttcgtgacatagagagtgttgtaacggtacacaaaccaaaacaagccaaaggtaatcacattgaacaccatgattagaggagcaatgacggagtaaatcaacccgatggatgcaagagtagtgtacactgggaagaacgtaccccattgcatctggttcaggttggtcgtccgagcccattttctgcgcgcagttgaatccagaattggcgcgaggatgaaccaactcacgaggctaaagatttgaaccagagctccagcgctcacagatagcgcctgaaggatcatataggagaaaaagtagttgcttgaggaagggatgttctgagccagaagctccggccagtttgtgaaattcgtgatgttgtcgatgatcgttgagaagctggacgcgattgcaacaaccaagaacagctgcacgaaaagaaaggcaaagaagtaattctgcaccgtgagctcaatacccatacctgtctggagaccttgtgctcgacataggaagcgaagcattagtggcagaagggccatcagtatggccaggaataagggtggtaaaataccctggacggctgatatgagccattctggcattcgattaatccaggatagccacgtgaatgcgccttcgagatatgaaagctgagaaagcaatccagtaaaggctactggaaacgcccagcctattaccatgcctgtgacaatagcatagactccaaaggtgcgtagatagcgctcccaccatttgatggacatgttgtcccatataacgtcatcgggtgaaatttccaccgtgcgaggagccatctgtttaggtacatgatgactgacggcctgacaagccatatgcgcagcaacctggtggttaaattgaatgaatgctgaattcatgagcgggaacctctcgggatgctgctgatctatctcgatttccaaattcaaacgagccacttctttgcgacaatagtcaatggtatcgactttctttccaagaagccagatcgaaggcatccaacttattccaaagattggcaatcgcattgtatcccgatcctcctgacgaatatacttcttccacaagggttcgccaagatcttctttctcgaaattttcattatacgccactgggtaagtatcatcctcgatttcagcaccgtcatttcgcgtgatgtcgatatcattctcatcacgggcttttgttagcgaattcccgctagagctcgagaactctccatcttcaacgtcgacaggagactcgggagccgtaagcggaagctcatctgcctccgtcctgttactggatttggacatggccgagggccggctcctccaaaacggtctttttggctgcgagctgtctccttccgtgctttctccagctggcatagctgcagagccttcccaaacggaacgatctgcagcgttcgcgtctgataagttgtcttggtgaggcagctcctcatcaggcgcgccgtgatggtcatgtttcttgacagtgcctaagaccgacttgcccaatttcccgacgccctgaccgacagctcccgctaaacccacagccggttcgagtggattcatatacttccgtttgtgcgttctgccgtcatttgatgccattgtatcgcgatgcaagacttcctgaagcgtatgggcctggtgtggattgcccgagctgataccagcaccaatggtcggcttcaatact

SEQ ID NO: 14087 - DNA, 610 bp, Emericella nidulans
  unsure (1)..(610): unsure at all n locations
cccgacacgtacaggaacaccccnaggggcgacagcacccacggacagaccgactgcgggaacggagggtgnaaaccggccggagagcccgagccagcgcggggaggataggggagacaggcgcgggccagcccgagaanaaagggaacaagaagagagaacgcacgccgcacgccagcagcaaccaaacccagcaggagaagcccgaacaacgcagccccaaaaccaagcccaggaacaacgacacagagccgcccaacaggaccgacacagcgcgacggcgggggagaacgaagaaccggcgaacaggggccgagagcgcagaacgcgaccccgggcacgcaacgacagcaacaaggaaagcaccgcagcgccaacagcgaagggagaagagggaccgcgaaaccaaagcgaagcgcggggcccgacaacgcgcgaccaaacacgaaaacgacgaccacggcaagacaagcgcagggagcagggcacaacgggccgacggaacagggacgaacaggggaaaccaaaccccccgcaccaaagagccacacccacaaaacggggaacacccgcccgaaggacaaaaaggccacaaacaaaccccaacgcc

SEQ ID NO: 14088 - DNA, 772 bp, Emericella nidulans
cgccaaaaccaaaaaagaaacacaagaacacgcgacacaacgagaacacacaaaaaaaaacaaaacaaaacaaaaaacaaaacagaagaggggggggcgccgaccgacaaccaaaaggaaggaggcagcacccagcaaggagggggacacaaacacgcagacacaggaacacgcaagctcgattccgcagcgacgagaggcacaaaggcccggggcgagaaaaaaagccaggggggacaccaaagacggaagcaccccccgccggaccaggcaccagcaacaagccagaccaggcagaggcagcccaaacaagacagaacgaagcgacaggagcgacagacgggaaccagcaggaacagggaagaaaaaaaacaccgggcaaaagaggggcccaaccaaagcccagagacccgaaccaaaggaccacgcgcgcgagaagagcagaaaccaaacacgagacaacccgagcaacgacaaaacggcaacagccaaagaaaggggcagaaccaccacaccccaagcaagacacgcccagccagacggggaagacaccagcagaaaccaccggcacagggagacgaccgaccgaagagacagagccagacgcccagaggaacaagcgggacagaaaaaaagcagacccaacaagaccaccaaaggaaacaggggggcaaaacaacaaagaaacaagggcacggggacacgaggaaaaacccaaccgcaaccacgaacaccaaagacgaaaaaccaggagaccccagagcgggaacaa

SEQ ID NO: 14089 - DNA, 746 bp, Emericella nidulans
ccacaaaaccaccacaaacacacacaaacaaaacaagaaacagcaagaaccaaaaagaaacaaacaaaaacaatagaaggaggagcgggcgactcgacacccaaaagagaacaagaagaccaaggcagggagcggcccacaaaacaaggggggagaccacccaaacttggatacccacgcacagaccaacaaaaccgggggggacacaagaaaaaccgacggcggaacaccagccagaaaacgacaagcgcacagaaacagcgcaacaaacaagaaggcaggcacaagcagaaaaacacccgcgacacacacaaaaacacgcgcaacaacagcaaaaagacaaggaagaacaacggaccaaaccccaaacccaaagaacaaccagaaaaaaacggagcgaaaaacagccgacaagagggggcaacaaaaaaaaaccccacaaaacgacaaagaaaagccaagacaggcaccaaaaaaacaaaagcgagaaaaacacaacaaaacaacaaaaagccaagaaaccaaaggaagaacacaggaaccacaaggccagcagcaagcccaccaaacaaaaaaaacccgacacaaaaaagaaggaccaaaggaaaaacaaaagcccccaacaacccagcaggagcaaagcgcgcaaacccaagacagggaaaaaccaccgcaagacggcgagccaaaccacaacaacaaacaaccaggaaaacaaggaagcccaaaaagggagacgcccccac

SEQ ID NO: 14090 - DNA, 1348 bp, Emericella nidulans
gtcataccgtactcctcttggtattcctcttccaagtcctggtcgcctggtgcttgactaaataccacagccaattccttcaagttagaaagctgttgaatgcgagcttcatcaatgtcgaaacccttcgtgcttctatgatctcttgctgccgcgcacaggtacgtcgtatcgtcttatacatccgcgtataaaaaggttgatcgcctgagacatattccatttcgtcccaatcctcataactgtcgacgtcgtcgtggtattcgcatgcttcgacgtattggccaggggtaaggatctctgttctaaaaatctcgtaattccgtatctctgagttgaagttagtcttttccataaatgatttgccgcccggagggatggtggggagggggatcctgtacgaggttttaccaactttgggacgatgtactggaaagagacgatataccgacgaatgctcgacttcagaagactttccaacaagtcaaaaccctcggtcgaaaattcaatgttgattttgcgaaataagactggtaaacaaacgtccctcacccgtttactgacgagggaaagcgtcttggtctcccggttgcaaagatgctccacgatgtcgaagagaatttcggtaggaagcaactccatacagcaatattcgaaatcagtttaccccatatgctctcacgaattgtttcccaaaccctgacttgaaacacactggtctatctatagattagctggggatccccttggtccaagaatagatcttgtattttacatgacgttgataagaccagaatggtgtattttacacgaaactgcaatacgcctgctaccccctcaccccgcgccaagccacttgagcccaagcttcacactgagtccttttttggcttctctcacattccagaccaccttctgaaagcttaccgctatctgcccagcttcgtatcatgtctgggcttgaggctttaggtatcgctgccagcatcattcaagtggcagacctgggcaccaaattatcagtcaaactattttccttttacaaacaattcaaggatgccaatgagtctatgcacttcctttccagcgaaattgcttttgtgagcgcgatcttgcgggagttgggtgacactttgaaagatgaggagtcatctaagctttgttccgaggaggcatttcgaagtctaaaacataccctggaccagtgtcgagacgtcctcgagcaaattcaaagagtgaccagccataccgaccgatctgggaagacgcgcttacaacaagttgctgggaagtttcgaatggtattacttgagccaagcctggatccattgaagaaacgcttggaaag

SEQ ID NO: 14091 - DNA, 378 bp, Emericella nidulans
ccactaactgaatacaaaaaacccgacggcggcaaagaagccacatgaaacgcagccagcacaagctttagtacatccccccaccactcggcacccaagcggggccctacaaacgggaggggggtcacacaggcacggccaaggcagccagccaagaacgctaaacagtagacgacactcggccaagccgaacagggacccagtacgacccacagaaacaggaccacgctaagcagccccaccatggacgaaaagacgcgccaccgagagacaaccaacaggcgaggggccgacacaggacgactggaaatggacccgagacatgacactcaccaacaaacaataaaagaggtcaaggccgggacacagcatgacacc

SEQ ID NO: 14092 - DNA, 609 bp, Emericella nidulans
ggaggggaaatgggcggaacacattgataccccgaattttattttgcgaccgcgcaggcaaaaacacaagggggggggagtacgaaacaagcaagcgggccgaccaaccaggaagcaaggggcaagtacaatacgggaaaaacagggaggaggagcaccccagaaagaaccgcaacgatacgggcaaggcaaccccggacggacggaaacgggcaagacagggcggaaaaaaaggcaccaaggggatgcgggatcggcccggaagatcagccagagtggcaccaaagtcaggcgggaccgatgctgagaacagcactaggggaccgtccaggtgaggatacagtcgaacgacgacccacggcaatcagcaccggacacaagcctggcacgtacgtaaaggcaaaagacggcgagctcggacaacaaaaagcacgagcgaaggacgtgacaagcaacacaacaggcggaaccaacggaaaggttggcacacatagacaaccggggcgggggacaaacctaccgacaagcggggccaaaaaaaaccggcccaagagacacgcagcaaaaactgggccaaaacaagaagaccggcaccatgaacgtaaagca

SEQ ID NO: 14093 - DNA, 1731 bp, Emericella nidulans
  unsure (1)..(1731): unsure at all n locations
cggatcaacactaaaagtccccttcaaccaagtctcctccgcaacaaaaggcccgtcgggcgcattcccaaccgcgaccccaatacgaaacaacccttcatggtcccgtgcggggaaatacagataatacttcccattccgctccgccgcatcaggggcccagagttgcttcgaagcccaaggaacctgctcagttttcaggacggggccgtggtctttgacctccactttcacattctctgtggaggtagaggtgaggggagctagagtgtcgatggagaaaacgtgataatcggccatgtcgtattggtcgccattgtcgttgaaagggatggaagattcgcggtcatgggaggggtagatgtagagcttttggttgaagacgtgggctgaggggtcggctgtgtagaggtgcgagatcaaaggtttggggttagactgaggcattttggtgatgttgattaattgaacgtgaacttgactggcttaaattttcgatatgccacaatatgagtggtatggatacgttgatgagggaggatctatcctgattatatgaatacttgtagatgtgtgatcttgacttagaatattgatggcaatggccgcctatttatccgccggctaaagtacaaggtgctgggcatttccaatttccgtagattggagctcgtggataaatgaggaaaaagtcctgaaggggaacggagttccttccacctcccaggaaatctacggcctagtctagcctggagatttgtcggggtaaggatgagatttctcataggttgatttactatggagtagacttggcccggccagattaggccgaaaacatctacagaaggcattgcccggtatggggtgaacgggttaaatatgcctaggatacctcttcagatatatccaaactaagactacgagtcctcaataaattgttatagggctagtccagccagatgcccagcttccaaaatatagatctcatatcatatcaaccggcctcccagacgggccataaaagcctgataacatatttatcaagtagaatggatcaaagtctgttcaaagtctgtttggacaaggagtcaaacattatccaacccatccatgaacatataactctcctccacgttcctcatctgcactgccaatgcattcctatacctcctttcccaatccctctcaacctgctcaaccacactcccctcatcgctccgcgtcttgaccggactctcacagccctttagcccgatgaatcttccaaaccgtctccttttaacttctgtatctacgcccagatcccgcaggaagccattggttgcaagccacggcttgataggaagtggatacaggaaggtctcgcgcctcggcggatacacttggtgaaagtgaagtgctagtgcatcgagctgcgctgatgtcaaaaggttgaaagcgagaactgatttgggaaagtatgggtgtatgaggcccgttgagtacgagacaagcgggtggagcttgcgcgcgaggtgggcgattttgttttgaaattcggggtgaaattctaagactgagtttgaagctgattgactcggtccgtcatagctaagttcaagtccaagatcaaatccggattgctgcagataggacgtgatttgttgcacctggcgcctttgctgtcggcgctggaggcggcggcggacttngcgtgtcgttcttgcgtatggtactggcgcacgtgcctca

SEQ ID NO: 14094 - DNA, 1399 bp, Emericella nidulans
attatgaatgaatcctcatgaatttaattgacaagtgcatctcttcaagtctcaaagaccaggttccgtgcaagttcgaacgtgcaaataccttctaacggtaacatctatcatgatgcatgtatcccaggaaggggagctgtgggttcaacaaagaagcttcactttggaagccaacggcgattgactccctcagcgagtgccgataaaatcttctgcacagcaatagcgcggatgtacgcatccgagtgtagctcgtgtccccatgtattcacagatactaccataataagcgtcaattccataataacatttaaacaaacacatctcatccgtagctctctggatgatcttgtttagactagccagactgcaccccatttttggacagagggattgagaaagcggagtgttgcacgactctctagactcgaactgacgtttgcgctgttccatgtatagtctctcgaggacaagcatcgcggcaaatgtctggcaccaactcgtgaaaacttcagagatcatgatcgcctcataattacccaaggcttcagcgggcgacgatgtcgccgtgctctgagtatagtgtcatctcagatgactggatagtcaggatgaatcaaaaaggcgaactgagtcggtgtggttgtcttttctatgctcggttggccaggggccggtgtacggtatatgttggatagtaagtcgtcaaagctaatatggaataggtcacggccgatgtaatgtgatgtccgcctagataaaacgacgttgttgaagatgggcttcaaggcagcaaggacagaacgaggagcaagacacggctctcagtctttgcgagttaggagagcgtgcgcgcgccctctgcattgattcggctctcatccgctacctcttggcccaacaaggtcacgactcattgcgcaccaaaggggacaagctggtattcgctacgtcgccaacggccctgccgtcggacgcatggagtgcgtaatcgggatagcgcgaagacgagaccgcagatgcaagctacggaggctattcccacaatccagtgattgacgttatcgagggtagattcctcaccggtgcgttggagtggatcagtcactcccaggacgtttccctccacatccaatgctgctagacgaaatacggggctatcaagctcagcaggtactgatatctcagtctcgaacccggtcttctcgtattcttgcactgcgatgacgttccctgtgcgatccggctcgtcgatcagctcgccagatacgatatcccaagtctcgagccgccaggttacgacttcggttgcgccattccagctcacatataccacatctcctagcacagtcgcatccggctgggactgcgggttcccaatccaatcggccttgta

SEQ ID NO: 14095 - DNA, 1786 bp, Emericella nidulans
gcaagccaagctcaaggtatgatggcgccgacatcgatacgacatgttctcgataactgatgctgggtttctgtataatagcaacttgtgcccggaccccgctccttctttatggatgtcaagtgccccggctgcttcaacatcaccaccgtcttctcccacgcccagaccgtcgttgtgtgctccggctgctctactgtcctctgccagcccaccggtggcaaggcccgtctcaccgagggctgctctttccgccgaaagtaaacgtctcgacaacggagttggagcgacgacgattgcaacgtggcgtttttcgatgatgatggattaatactatttttttgagaaagcacttcagatagaagatggaatcctcgccccttgcgagaaacccttacaacactcatggacaatgagaaaaatgttcctacacgtcacatccaccgttcaataccaaaaagcgttttcttcacagtgaggggagttccggatatctggcacttgatcggtccatactttgtcaacttattgctttgtttccgtcaaaaaccagtttcttctctcctttctgtgttatgcttttatgctgtacatcgttgtcttgacgagtgtaccgggtttcacgcaccaagaggttatgcagcgcgcgtccgcctgagccatgtcaattgaagcgagttcgaatgccagaaggcataggggcgacgaaaactccattggcgaatatgaatgaccgtttcggtgacatatgctttcatggatgcgttggcctcccgttgcagtctcaacacattgaaattgagctgtaagggagagtggcatgagctgtgtctcctaggtgcagtagcaaatgtacacctatatgcacttgatcctcgaaagcgtaggccgtagtatccactttgctatccctgccctgccccatttattagcccatacttgtttcttgtccggggccccgggtccacctgtcagttttatcgttttatacatagtatttgccagtcgcatctaggcggcttcttactcagtagactcgaagctgatttttgacggaaaacccctaagtcttaaacttacccctacttgaagtatcgtacacatctcgccttacggtgctcaatatccccaaacccagcgacattttgactccctgggatacgctgcctctacttacgtagcaagcgctagggactgaaggtacctaatataccaccgttgagtacgctgtaactcattattgatgattttgcaatgctgagcaggcccagggatctccccataggaattagactggtatgtgtggtcttcgccacaaaccacgaacgttatcttatcagcataaaattgtactatctcttccgctgcgttgactccaagcccctcactaaagtctttcctgttctttcctttctaccttcaccttaactacaacaccgacgtccaatcttcggtcatacagatctatctcaaaatggccggccgcccgccacttaaactcctcatgctccacggctacacccagtccggcccgcttttccacgccaaatcccgcgcgctcataaaacacattacaaaggcctttcccctccacgaaatctccgcaatatatcctaccggtccgcttcgccttaaccccgctgatattccagggtatacacccgcgcatgactccaacggtaatggcgacgataaggacacagaaattgaagcgtatggctggtacagacggtcgaataccgcggaccgccactgtatgtcgggcttgaggatggactaatgcgat

SEQ ID NO: 14096 - DNA, 1321 bp, Emericella nidulans
atacgactcactatagggagacccaagcttaggatcaaatcgtactggagcttgaaagcaaccagcagatcggattccttgacaacaccatttgaggtcttcgatatattccttgcgtagctagctaggttggcttggacaaatgccgccacttcagaaactttgtcccatagagctgattgaccgagagcagggcggaaaatgttgccagtccggtcaagtaattcttgctttcccatgtaagaacgttgttcatttgatcctgcaagttctcgcccacggtggggagattaacctttactggtatgctgtacttacgaagaatgtctgggcttccaacaccggacagttcaagaagtgctggtgatcttaatgctccggccgacaggatgacttcttttgaggcatatatcatacccacgccctgtggaccagtaacctcaactccaatagcactgatttcgccatgggtggtatttgccttgatgatcctgttcgcttgtgtgttcgagatgattttcaggttcgggcgagatttgtacggccagaagtacgctctcgtggcgtccatgcgaacattggcctctctgtccacagtatcaggatggaccgtaaacccaaccatcctgcctcctccggaatcgcgattataatgaacgcccaggtgttcaaaggtctccttaagaacaggaaagacgatgctgttggtcattgctgtaggccaacccactttaacgggaccatttcgcccctggtagtcggcgtcgtaactggcaccatgtgcaattaggtcttgagcgggcacctcgaatccttctgattcctgtggtatgagaagaggcttttccagttccagcctttgtttccgaccagttcccagttgtcgatttggatgtcttcagctcgggtataggatattcctgcggaaggttgaattaaacacatatgttacgaattgagaaggtatggttgcagttaccattaatcgtgcttgtaccaccgatagcctttccagcgcgaatggtttgtttgaggtctccagcatatatatgctcctcggtttgatacgcccagtcgatgtcagtgtcaaacgccaagctatggccctcaacataagtgatattgaaattattgagcaccgagcctccggcttcaataacagccacagtgacattgctcaattctgagtctgttggcggcaactaacccacttgtccccaccgacaacgacgaaatcatactcgaatggctagccatagtggctgtctgccgcaactcccagatagaaagccccaacaacaaaaaagaagattaacattgt

SEQ ID NO: 14097 - DNA, 1052 bp, Emericella nidulans
gtgaccctcacctggagttaaagaccactatatcttcctcaagagaaatatgaagtaaattacccattaatccttttgcaaccactgatgatgtttggctggtcctccccgcagaggccgctatagcgctccgctggcgggagttcggcctttttcgaatgtgggggatcgagattgaaagagactcagccattcttaaatcttccacttctccccaatctatctggtttcctgttttaccatccactaagcaacggccagcttatccctcgcaccactgaactccggccaaattccgatacgtccgaactcggcttgcgtgccgttaatttcttctttctgtcagcggtggccatcatcagcaagccgtctgacaccgcgaccaacgacgaccctcctcggtcttgtacctttattcatccttccatggcttctcccaacttccgcgatgactctataaagccccagaacctcaccgatttgccttgctcaccctctcctttaaccgactccgcagccccaccattatcagacccgtcaccctcaacgtcgaagaccgtcggagcttcgctcttacgtgactatgccttgcatatagacccttcacaaactccgaacgaagtcgccgtgaaggactctgaagagtcttttacacccgctgccagcaccgcctcaccgcaccgtgtgccggcgcaagaagaccactcaccatcgtccaacccgactgccttcccatttcgcgcagcgttctcggtgacgcggcatagtcggaaagccttctcttgcgatttgatacccagacaaacaatcatgaaagccctcgttcgcgaccgacatcgaatcaccagaactccattatgccgctggcggcgccctttggtcttcagagtccgacctctccctccagtcctccagacgagacagagcgccgtccacacacatcatcgtcgcagaaactctccgccgctctgtcgaatctacagctcgcatcagacgctgatcgcgttcccactacccgccttattatgcagtcgccgtgttttttctcatac

SEQ ID NO: 14098 - DNA, 528 bp, Emericella nidulans
  unsure (1)..(528): unsure at all n locations
ccatgactgctgcgccagatcttaccgaggtacaccaggtctgggcagcaagaggatcgtttcattggttgctggatcctactggccatagggtgacgtctagtgcataacgatcactggatgtatcaggcgacggccatgatgagctgaggggcgaatgctcaatattactgtcctaacacagggatacgtcatcgagatgaacggcgttttgtcatcgctccaagcgttggatagtgagctcaagatcgacccgctaatgacgatgacacacgctaatgaggtggagtactgactaacatctgtttgcagcataagacatgcaatcgttaaccacacacttacaaataatgttactggagaacttgagcagagagattagcgattataattaagggaacgaccctattacgcaaccgatgggcccatggctaacatatcactcattgtggtaacggtacaacagatgaagtcctcggacatcatgcacgagacgactaacgctnttatatcgctagagatgcttat

SEQ ID NO: 14099 - DNA, 757 bp, Emericella nidulans
ccaccactcaagaacaccaataagcaacaagaagcgcacaaaaacacagcaaaaaaagacaacacagcaacatcaaaaaaacaaacaataataaaagaaggggcggcgaccgacaaccccagaagagaaaaaaaaaaaaaagggggggggcggagaacaacacaaacaagacgaacacccaaacattgattccaacgcaaagaccaacaaaaccaggggggacaaaaaagaagggagggcggagcaacaaccaagaaaggacaaaaacacggccaaagcagaacgaacggacaagaggccacaacaagaacaacaccaaccaaacacaacagaaacaccagcaagaacggcaaaacaaaaagcaaaccacaggaccaaaaaccgaaaacaccaaaacaacgagacaagaacgaaacgaaacacagcgaaaaacagagaaaacaaagaaaacaacccaaacgaacaacaaaagcacacaaaaggaacgaaacagcacaaccgagaagaacacaacaaacccaacaaagcgcagaaaggaaccaaagagaaacagaccaaaaaagcgcgcaagcaagcccacaacaaaaaaaaaacgaaaccaaaagacaaggaacgaaggaaaaaaaaaaccgccaacacaaccagaaagaaacacaacgcgacaaccaaaaaacaggaacaaacccagcccaaaaagaaagacaccacccaaaaggaacaaaacacgagggaaaaccaacgaaacccaacaaaagga

SEQ ID NO: 14100 - DNA, 1300 bp, Emericella nidulans
ccatcatcttcgcataggcgggtgaactcgtcacagaaaaatattgcgttcaaacagtcatcagcgtgttggttttcatcaacagcctcggaaagctgggcgacacagaaaatggctgcctcgaacgttctccaatcttgatttgcaagagaagtccttgcatgcgcttgaaatacttgcaccagatccacccctaaaataggatatattgcaagcagaaaatcgcagacgtcacttcggaacgacccaaattcagcgcggtcatcgtcgctccacccacacagctctccgggggtcgggtactttagcttctcgaagcagtccagagcagcacgagcaagattcaacttggctgtttccgggcctttctgttctccgggtctaaaaagctgtcttaaaggtcgtcggcggcttcagtccaccactccagggccaagggggacgcagtgtcttccactgcggcataaccaggtgatttgaacaaggtatggattagagctagcaccttttcgtgcttctcgtctagatattgggtgaatatttgcgcctgttttcgggtggccaacgacagcagcagttcgatgaaggtcatattctcatcttcgaagtcgccttccataagagatgcaatatgtgcggtaccggcaacactaatgacgtagtctagtatagcctcaatatgactcggtgacagcacactctcacggcgacccataatctcagtcagaatatgaccggctgtctttgataaatacgggatgttcaggctccctataacgcaattcgtggcagacgccaactgtgggacagaaatagcatcatgcagttgaagcgaactccgaacgaatatccaagactagcgagccacggttagaaatatctacaggcaaggatataaaatgcagaggacttacatggtaagagttgattgcctctgtcccaggaacttcgttagcgacagacccaccggagacatcatgcttcaatatctgagagaggacaaaatccacaagcaagaaagcatccccaagattctcagagatgcggcgagtatcttccggcttccgtgattctccccccgagcgacctatctcttctgctaagatttttgagaaatagagtagcgagatcacctgaatctcagacagtgctggaagtacatcttgcagactgattgatgcgcattggtcctcgggtacacttttaccgttggccaaagaaacagctaatctcaagacagcacggctccaaggagcatctgccttgagaaaaatggttgcaagagtcgaggcgagtttcc

SEQ ID NO: 14101 - DNA, 526 bp, Emericella nidulans
tagaattattgaatggtaccaccagagcaaagtgatcttgttagggacttttgtgttagtccacccgttctgctgagacaaagcacaacgttcctggcgatcaactgtataagtgaatgtcagatactggcatggaacttaaatatgtgcattaatgacagggaatactgcagtagtggtgaaaatacacctgctaatacacctgtaccctgaccatttgagactgcatgagaacctccgttgtgattttcttattgcttgaagagctcgcttaacttactccatacaatcattcaagcagcctccttgactatttcagttccttaaacgccctactcaggcacctttccccttccacttaccactttaggactaggtgcgttcgactgaggtgagatccaataaatatctcactacctctatacatccattcatccatcctttcatacaaactgatacacgcaggaagttgaagtctttctcatcccaccagcctgatacacgtgtcacaacgccccaaatttcc

SEQ ID NO: 14102 - DNA, 1033 bp, Emericella nidulans
tccggccgataatacgactcactatagggatctatccaagttcctcggccgtgacacattccaccgccccgagactcggccggaacccttttaggactgagtagcactgaaattatttcccgatgataatgacgtgacgtgttttcatacactgtaccggaataaatacattgactccgctcactcctgaatagttcgagttcaataccaatcataccatggtggtattgccgtaacccaacagtgacagctcagggacccccatgcgatcgaccgacccagtctgtcgggctcaagagcagtgaaggcgggatctgttgaagcaatggaggactcctggtccagaattagactttcttgccaaagccagatcgggagccatgagtcgggtagcttttggctattgatcgcgataaccaatattcggtatccttaagcttgatttccgactcagtatgcggaggaaggatggataaccatctaaccttgccgcttcgaatgtcatacaagaacggtacgggtggaatccccctattcatcccgctagaagagggttcgagtggctcgccagctgattgatactggattaagtttcaccaggattgtggacaagcaagccacgacgattaatgctgatttctatatctaccaattttttgtaactcaggtatatatccatatgcgacgatcatttaggtcgacatttttttccctgttgggtaaacagcaattgttgctgctatatgtcgctggtactgtacagatagagtggcgtgcgttgattggagatgttcatgactggttctattcggccggatgtgagatccggatctagctgctttcgacaatagcgccagccacccgtgcaggactttacgattccagatgcgatccatatcccgatcaggtgttcgttgagatttgtccgtttgcaaaccgtcaaaaatcggtttgttacgaagagcgttttttcagtatcacaactgagtttggctcggggtcagttgttgggaatataagaatgccaattggc

SEQ ID NO: 14103 - DNA, 1470 bp, Emericella nidulans
acgacctgagaagccccccaggcgctcacaggcactttaacaactcaaaagcttccggtccgcatcgattatggcgaccaaaagggtcgttcttgtggggaggaatatctcgagtgcgaaccctaatacgaacttgcacgcagtcgtcagggaaacctctacctctcacagcgagggggtaatgaggcgttagcgaacgtcttctccctgccaggagtcgagatcaggccgacgatcggtcgtgtcgatgctgagaaggccggtctcaccgtcaccttcaccaacggctcgacagtggcagacgtagacaagctcattttcgcaacgggctaccgtctcgtctaccctttcctcgtgcccgaccccgtcaccccgagtaatcgggtggcgggcctctaccagcacattttcaagattggggatcccagctttgcaatggtcgggcaggtccgcggtgctctgagcttccgggtttacgagtaccaagccgtcgccgtggcgcggtactttgcgaaccacaacgcaaagccccttccgagcccggcggagcaggatgagtgggaagtcgggcggctcaagtacaagggtccgacgaccttgttccacgagatcaagccggacttcaaggagtactttgagtatctaagggagtttgccggcccgcctggcccagggacgaacgggtacgagctgcccgtgtttggtgaggactggccgaacttggggttcgcgatcctacaactaaaggacaagtactggcaaagtatcaaggctgcttcgcagaatgggaaggagaaggtccaggcgaaactgtgaagtagatgttcaggttcgagtatactgagaaatatacacaattagtcttcgcctcacatctgttgtcagtttaagacttgttctgctagctttacaggaaggctataggctacttccttgccctaggaactagacagacacccagtatgatgctgtgtaagacggccatgggtagattaagccaattgcctgtcttgattgtgaatgaacaccatgctgaaaagatcaatgtactgcatctctttgcttccaaagactcctaaccctagcagatgttgtctggactacctagtatattaccactaaataaacaatggcagggcctggtaatagtaaagtaagaatctgcagtgtctgcctataggaagacgcaatcgaacaatggggactttagggcagattggacactgtcacccctttcctgggccctagttctagggcacccttcataccaccaaagtcccggcgtcggtgctgggtgcctacagaggactacggctaaattaaatctttcgaagacttccaaaactaacaaggcatctgggtgtgataccagcatacattgtaactttagctacttcgctagatggagatacctgtccggtttaagcgcagatagaggtaggtgaccctctccttccaacctgaagttga

SEQ ID NO: 14104 - DNA, 548 bp, Emericella nidulans
gacaccgttggcgattgtctttcagcctccgggcgcaatggggccctctacttgcggggggtgtcctccgtttgttttacccccatgcatggaccaactgaaccaccgtgtatgctgtgggatgtatcgcacaccaccggccattcaagtatcagcgctcggtcggtgtgtaacgtactgctgtgatcacatagcatattatcatcggtgatagatttgttttctcgagcggcaacggcaagatacatatcctgacagtttaacatatccttatacacaagagcattctgaacagaccggtgcctctattgccgacaaagtgtgctatacactaaaacatcttgctgctgaccctgatagttcttgatggaaccaacgagcacatgtcgagatcttcacaacaagatggatcaattccgggcagcgagggagcactttctgttcgaaagggcctgcaagcaagaccatctcacatactgactcggactctgaataggctggatcagaaatgaaccattcatcccgccttgcgaacttagattgtgacg

SEQ ID NO: 14105 - DNA, 767 bp, Emericella nidulans
tggaagggggtaaaagaagttgtctgcacagatgtgtgtacagcacaactggatgcgtcattggcggaagctcatggtgagtctcgaagttagttttggcccgttctcttccaggacgctgcataggctcaaaggagctgtatcaggttgaccagctaccgtttgataagagccgtacagtttaccaagcacataatatccgacattgattcctcttctcttagcagaagaggtgatatcgtggttttctttggtttgctgaacaattggtaacgtgggccacaagaactcaacgtcaactgaattctatcattgtggctttttcccagtaggcacgtcttgctcacctatatgtgacgaatgcgggctcgattcggctggataaactgcctcctcaaagataattaagtattatagaaatatcagatagacaattgaagaaggccttgatccactctcctttaattactgctgaggctggtgttggctcgaccctggtcggatttcattcaagtgcgtggggaaaatggtaaagacaacaacggccaggcttgctaattgtccattaactcataatttctgtgcttgaagttgcaactgtatacaccatagacatacagcccgcgagtatgctggcaggaacaataatagagcgataagtcttctctcgatagcaatagtcattatgtccgtttggactcctcattaagtataatgggttataaatagatcgtaaaaaagggaatcaatccgccaaactggatagg

SEQ ID NO: 14106 - DNA, 614 bp, Emericella nidulans
gcggcggacgggcccgaagacgagcggccggcaccgagtaatgacgccacccaaaacccaccgaggaccacagaggcataattggccaggagagacccgggaacggccaagacgccgaggccaggaagcagccagggaaacagagacaagagcacaaggtcggaaaaacagaaacagacgcgccacaggagcggaaagaccgccgggctggaacacaaagagcggaccccgaccaagaaaaggaccccaccacacaaggacccagaggaagaaggcaagtggaaagagcaggaagaagaaaacggcgaccggcaacaaccgagccaccaaaaaggacaacaaaggagaggacaaccagacaggagaaaggccccggacaagaagaaagacaaaccgaccaacaccggacaaccgagaaaggccccagaccgcacgaaagtcacggcaaagaaggggaaagagaaacataagcctagagggggcccgccaaccaggcggacaagaccgaaagccccaagacccaccaaagccacgctaggggaccccccccgaagacgaaggcaaccaaaggccctcccaaggggaaggggcagacccggcgccaagaggccaca

SEQ ID NO: 14107 - DNA, 842 bp, Emericella nidulans
taccttcttttaaattttaactaaagtcaccacactacgcccttggtggacactctttcacatctcattctggtgtttcaagatctaggcattgaacatctgtatgctgcttgtttttccctgggctttatgttttcgtcatctacccaaggaacgggatggggcatggatgatccatggatcaaaaaccgaccttacttgcatagctgggtaatggtttggaaatcgtacctaatgagaacgcccttaacaatttgaataaactgattaatcgccgctatgatacggctgcagcgctttttcatcatcgaattcagctgattaattcaacggcaggagaagattgtgctcataaccatgtatacaattaaaaacaagacagcaacctagcgattgatacctaagctatctaagaaatataaaccaattccaaaaggatgaaaaacctggagtaacctctagtactcaatcattgaccgtactcctcgtaactcccgcatattgataaactttccctggtttcaagcacagaaaacatccgaagtcaaacaaggttgaaaaattgagcaccaacacctatacatcggcgacaaaccataagcaaggtgttcgtaatcggaccaaagcagtagactaccctctcccttccatcgtctcgaatattccgctcatcacaaaccggggttgcgagtgcgagatcaacccgtccatctgcaccgagacatcttcctgagctcgggtaaccttatcaacaccatgtccgccatcgtttccaacaccagcattactagtaggagactggatcggggagcgggcctgtgtgacggtaggcagcgactgtg

SEQ ID NO: 14108 - DNA, 538 bp, Emericella nidulans
  unsure (1)..(538): unsure at all n locations
gcactggaactgatatcgacaaccttctgctcgaacaactactcggtatcagccaaagacaacaccgtgacgagggccctatttgacgacaacgggggcagccacataccgccgaggtccacgctgatgaaccggatacctcatggcttcaagcggcacacacgcctaccggccgctcgaaccatcccgagcgcgccgcgacccagcagtgactgccaacggagctcataggtggggggcaccatgctgcccaagctcctgaggcggcgctggggccaccaaatgcccagactacagggagcaaaccatggtgcaggacacaatgacggatgtagactcgaatttctagcgcatgccgtacgcgctaagagcgtgctacccacatcgatgctagggcagtaactacaacgcaaaggtctagtggcaaatgacaaccatggactattaggtcccatgcgagccacaacaggccactgcacaaacggacctggagcgtacgagggtgacacacacgcaccaaccngactgaagctgcgac

SEQ ID NO: 14109 - DNA, 1288 bp, Emericella nidulans
ccaggcttcgtttgtagctaacccttatttacacacgaactgtaaagtgacgggtaggagtcattgctctcacccgctagcgagagcaaacaagtagctcggaatgggcactttttggtgaaatcggtggagggtttttacgccagactgggggacagtcgaggtactgcgaacaggtagcccgctggcaattacaggcagaggggaagtaatgttgaaatcgaaagtgcacttgacatcgggcgtgtcttgacacgggaagattgaccgtgcatggatagcctggcattgagaaactggatcccagcgatgattagtcgtgaaaccacaacacattaaccacaaagctcagaaggtaatactaacacatgtatggatgtttcttgttcgacgtttgagctggagtcagccattggagtgcagtgcactccttagtggtctgcacagcgatctataatagtggttagtatattagctcaaaaggcagcctacacgactcgctcaacacacatcaacatcgattatctcgttgagtcccacgggattttcaagtttgattttcagagccgtgccataagggcccaagggagggagaagttcccacgctttcacaggcaagcccgccacctggacattgcgtatgtccacatgatgagagtcgaggatgatctcgtccgtctcagcgttcgttattgatctgagcttgtggacgacgttccctacgagtttcttttcctcaaaaaagatctcgaagttggcagtagtatgagtgcaaagccagttgttatagttggacagggtatttgggtccctgacgggattcataagcgtcgccatgctacgcccgtagagattgaacctggtcaaattgctgagggtagcgctttgagataaattgatcttccgaaatcgaagcaacggcgtccggaacatacggcagggtggtcgtggtggtcgtggtggtcgtggtggtcatcgtgagaagattggacgattttggaaatgtgttacgtagctggcgggaagatccgattcccgttgttagccgcgctctctttttatcgagtctcaactggagaatgcaaagttacgattacttctactgatacaaagctggatcttacagagataaatactcaggtattcctttcagcttcatatgctgctgtaccctatagtacgcatagcttgctgtagaaagtcgaccatatatagggctttggtcctgcaacttaatgtagctggtatgaggagaaatagattagctacagtatatttttcatttctg

SEQ ID NO: 14110 - DNA, 592 bp, Emericella nidulans
ggcctgagtagcggggggtatgtgggctctagaccgaagtcgttggccgccgacgacggcccgagaacactgggcgattcaagatggcgatcgcgccattcatcgcggcaggtctcatgaagcaagaggccttgcaatattacaacgagttcaagaaggtcccaatactcgtatccggacgcgggttcacgtcatctgaccaaggcaagttaagagtgttctgcgagcgatggcatgctttcgcgaagcgagtcaactcgtcaggccaagttccgatgagatacactgaccagctcccaaaagacaagagcattacatgggccggctgtggagcgggaatttcaggagcacaggacgcagcaatacgatctcgggcatacactaggatcatacctgtatttgggctacgagcttacttcctggtcggacaactttctgtaagggagcagtaaaaggctcaagatggccagaaggctgtcgaacacccccgcaagaaaccctcgattccatcagaaaatgcccgactcagaccattcaaacattaaaatgggggagcccctggaaggaaacatgaaaccggtaacatcaggac

SEQ ID NO: 14111 - DNA, 868 bp, Emericella nidulans
gatcagctatggcttcgtttgctctttcttggaccttacctctggtggcttctgaggcctcgtggctctgcaggggtgccgactgcattcctccactgcaaggagcctcccttgtctgcacttcccagccactgtgtcgatctggaaccgcgactttctttctgactggtcgctgcgttcgctcctttggttgtctctgaatctcggagatgtctagagaatgcgctccttcctgctttgttgttctcctggttgttcccgtttgatatactactgcccggcgcagtggcgcaagtgttactctcctttccgtccaacgacaaactccaagcaatttatctcgctatgttctatggttgaagactaacaccaagcgatagctacgcgactgagtcgtgaagacgcaccttcaccacatttcgctccttaagaaatccacccttggtcactcctttgccttatcgacacgatcatgccttcgaagatgcgcctggacaccagcctggtagcttgtctggccgccttctccggcgtcgctgacgccttctggcgtctgccctgccgtggccgaagcgctctcgctcgcatggatcctttgatctcacccggcgagccgtcctaccacgtccacgccgttcacggatctaaaggttagctggtcggttggaaacgcgtggggctcacccgctaaactttaataggattcggtctcaccgcggatatggctactctgcttgatggagactgcacttcgtgcggtgtcaagcaggacaaatcggcctactgggcccctgccctgtacttcgtcgacaacgccacgggcgactccgagcttgtggacgaagtcggaggaatgcttgtgtgagtg

SEQ ID NO: 14112 - DNA, 1484 bp, Emericella nidulans
ccgcatatatagccgccctgtttgcgatcatcgttgcctggttcccgaaatcgagcaaagcggcgtgcaggatcggaccggcaactgtgaaggcgcccgtgtacgcgccgattgcgatgccggtcatggaggtgaggaggctgatggtgatggagagctgggtgacgtatttgtctatcacaaggcgcgagtagatcgggttgaagatcatgggtgacaagcctgcgatcgagaagaggccgatcgtgagcgtgtcgtaattatacggctttcccgataataggaatgtcagagtcgtccagaaggaggtgaaggttgcactcgtcaggaagcccatcagcgtcgcctgtacgaggactggatgtttggtgaagaggaccgcgatcgagcccagtatcctgaagtaggagatatccgtgtttgtggaggggtagtctggcatgaacagccagagcaggaagaagatcaggtactgcagtcccagcgagagccagtagacattgcgccaggaggagctctcggcgatgataccggatagaagccgcgcgaagagaagacccagaacaagccctgaggagacaattgagagggcggttgcgcggcgcgcggggggcgcgaggtcgccgacaagggggagcattatttgctatacctctgatcagcgtctttctagggctgccctgggttaccatggcagttaagaagggtgagaacggccgacatccgcgataattcgcggatacgaggaggaaagcaagaagggaacctactggtgtgacggtggtcatcccacacagaagattcaacgcaaggaaaacgccatagctctctgtgacacacaatccaatccacatagtcgcggtgataaaggtcaataggagcacaaacggcctgcgacgcaccatgtcacccgccgggcagatgaaaatcagacccgctgcgtagccggcttgcgaacaggtggggatcagagacgcccgctcttggctgacaccaaagtaggacgcaagcatatcgagaagcggctgcgcatagtacaagtttgcgacagtgaaggttccggcgaacgcgaagagcccgttgagccagaggttgaagttgggaggtgcgctgggtgtatacctgcatgcggggggcgtgtagaggagcgcgcggagaagcggatgttgcttgagatcggggctctggggccgggaggaggatgtattaggggaactctcagtaacctgctcgactcgtcagtcgcgcattttcccagatgtcgttcggcatgtagactacctctgacctgggcaaatcgtgctcccgcgggttcagctttctcttccattccgcgagccgagctatgactcgagtattcagcttaataagaaaaaaaaatatatctcctaaaaaaaaggaagaaaaccaaagaaaaaccaaaagcaaaaaaatcgcttaatcctgacaacctgagtaggcgttgagtaggcctagacaggatg

SEQ ID NO: 14113 - DNA, 575 bp, Emericella nidulans
accagccggaaactaagctaaaagcccgggtagtaggcgggcgacccccccccaagcaccgggggccaggaaggacgccgagggcgccgcacatcgccgaaggccccacgaagcaagagggcgcgcggggaaacaacgagcccaagaagggcccgccacagggatccgcacgcgggaacacgccacccgcccaaggcaagccacgcgagcgcagggagcgaaggcaggcccacgagaggcgactgaacgcggcaggcccacaggcgacccgacccacggaccagcgcccaaaagacaagaccgcgcaaggagccggccgaggcacggccaacccaacaacacaggacgcagaaggccatcaagcgccggcccgagaaccagaccagcaaagaggatacgagccaaccgccggcccgacaagcccgcgtaagggaggagcaaaagggagcagacggccggcagcgcgacggaaagcgccagaagaaaaccccgggtagaaccggacaggccagcccaagccacccaagacctgacacaacgccaggccccgggaagggaccaagaacccggggaca

SEQ ID NO: 14114 - DNA, 522 bp, Emericella nidulans
cctggggaacgccgctgaagatggcgcgcaacttcacgatccatgacgcttgcctcttttttagcacggcttgacgggcgacgcatatagactgagtgctaagctgagcatcactgcgtcatgcccgagaggtgcgtctataccacaggccgaggctcctggcaggggtagcaccgaccggacagggggtaccggtaccatctctggacaggggtccaaagaccgggacgaagaggctggctccagatgacaaggcacatgtgggatgcgactcttaagaagagcgccagaaactggccagacgggagacgacaacgggtgatcaagtgggtactagcagaggtggctgctagaacatagagagaactatgtacatcaaaccgagatcgccataaagaggtgtgacggtcactcgtaaacacgtgggactagcgacggagggtgagctatagaccctgcaaactgcgagtgagcgaaattaggaatgcctgttggaacggccaaaaagccaaaataaaacgg

SEQ ID NO: 14115 - DNA, 568 bp, Emericella nidulans
acgagcgggagcacgcggctattgagaaccatgcccccagggtcggccacggaccccatgctagggtctctggggcggggtttaacaggggaacacggcgcgccgcgccgaaacgcatgtagcctgacaccgcccacgctagcgtcaatctcgcgaaccccccgccaccagaagacacacaccagagagtgccaaatatcgaaggcggatggcccgagcgcagggagcgtatacagattctggagaagagggtgagctagccggaggctgtgcagcaggcactctcggggccgctgacagagcactagagctagcaaacggcgagctctcgagaaagccaacttccgagcggaggagtccatgacggctgttgcacggactcgaaaaccatatcggcgcggtggactcgaacatgcccacgacaagacagactctgtagcgtgtagaggcaaaggagcgaactgagcggaggcaccgcgcacaggtgctgtagacaaaggtatgtaggacatggaatgccaaacactgtccgtccaagcacgccgcagggcaagcccctagaggggaa

SEQ ID NO: 14116 - DNA, 408 bp, Emericella nidulans
ggggaaacccccgggggagactagggccagctggccatgtcgtgttccggccccgtgtttgtgctccgtttaacggggctgagacaaagggaacttgctttactgagactcctgcgttattgagcagggtcaaagaaacggacccggcggccgtggcccgaagacaggggagcagaccggcggaagatcgtcagcgtcccgaggatacaggcggtggaagacggtgaccaagacttggaggccagagccttgggcacgttcgcgggtcggctaatgagcaggtagctgaccaaggcgcagaggggaaactcaactgagggaaaggcaggcaggagatgtcgagtatctgggaatatagcagcaaggaggaggctcaagcaaacattgacggtgaggcagatgacgctg

SEQ ID NO: 14117 - DNA, 1382 bp, Emericella nidulans
agtgaggaagcaattgccacgtatctgtaggggaaaaaagggaaggaaacatgagggggtccaacgtcgtctggtcttgccgttttcgctctcgcctcgtgagacatgcctcgtggctgacagcaacggaaaatatcatcgagcaaagattgagactgagcaattgttagtagttgccgagagttgtagatggagacaagcctgggaagcgccatcggagaggccgggcggactttaatttgtcccgcagatcttcttgtgaacctcatatggaggagactacagacaccgggcggagtcttcaaagtaccgagtgtggcctcctagcagcgattctgcacgctgtcattggtcaggacacatgattcggggctagcggccgcattccgcagctctctccactctcgtaagataaacacagtttaggtaccatggttcacagtgtttggagtatatacggagcactacgagggctactcggtataaaaccgaaattaggccgatgaaaattaggatattcttgtcatgggcgctctcagtgtagaaggagttgcagaaacgtgactgtcgggcccatagctggttgatcgtttcaggaaggtgcgttgcccccggggccccggggccggatcgactaggaggagttcgacttttccgcaccaccagtctcccgagtcttggactcctgggctccgcaagcgacactatggaacttctatttctcgaatcgagtcaagggccacatggtttggagatcatcgcaccagctgttttgagaccggcttaggaccggctattccgtgcattctcctaacactactactgctgctactaatggtactacaactatactactagtagtagtaccagttcgagtcccactaaactcatgaaatcatataaatgggctttagccagatccgctgcacaatctcctaatctgggtatacagagaaggaacagaattatggagcaaaaacgacctttttctcagactcctggggatgctcgttgcctactaaggcagcgtgaaattgcaggtgatagagctttacattcgtcatttcgtatgcgatgtttgggtgttccgggtcacgagacaaggttccacagaaggtcaaacattctctacaccgcactctcgctttaagtagtatatacagagtaccacatggctttctttctatcagtagaatgccagtttcgactccattgggtcgtggagagtcacgaagcacaattatgtgggactcttcaaagggcctccaagcaatatacacacgctctggcccttcatgtcgagtgtcgcctgctcatggagccggctctccacagagcctctagctctgctgctgccccctatcgcccttctgtgctccatt

SEQ ID NO: 14118 - DNA, 394 bp, Emericella nidulans
cctcagggtcttatgagggaggagcgtcgctgtgcctgtgcttcgtggatggtggcagcgaggcaggtcgggtttttgatgaccaggcaagggtttgtattcggttgcggattacgacatgcaagcgcgaacgaatgtctgctgctatgaatccagccaaatctactacatcaggacgtcctaggcgtatggcgcgactgtggagaggccgatccaatggcatctaccagcgcagctgtacgccacgggctgagcttgtactgtgccaatagggctgttggcattagacgaggaaggtacctacgaacgacggtaacgagattacttcgtctccttggcatgtggtggtataaatacgaacctaagggctaggtctccagaaaaggctgccaac

SEQ ID NO: 14119 - DNA, 432 bp, Emericella nidulans
gggcgggatgtgacggggaaaccgcagggggaggcagcgcccgcgccgcacagacaacccgaagggcacttttttaaccccgagagacgggccaaaccaaaggggggcccgcaaagaggaccggcccggaaaaaccccacaggggggggacacgcccaaaacacaaggcaccccacaaacgggacacagacccaagggagaccaccggaaccagaggcagaaggccagccaccgacagagacgggggggtgaggccaagcgcccaagccacgagggcggggcgcatagcaaacagaaacgcgccagagccgggaccccgcagacccaccagagtccaacgcaggaacaagcagcggaggcacccgcaccagacgagaaaggacgacaccgcaaagggaagacggccagcaaagaggggcggcgaccaaccga

SEQ ID NO: 14120 - DNA, 504 bp, Emericella nidulans
gtagcaggcgcccggtccgggggaagagctggggatggttccgcccgggtgacaattacaatttccaggccaccgtctatactcggatggacgggccaaggaaatagggggcccgcttagatgtccatcccggataaacgccacagggggtggacactctcaaaacacaaggctcaccacaaaggggacaccgacctaaggaaggccagcgctaccagaagcagacggccagacctagacagagacggtggggttaggccccgcgccttggccacgtgggcggctcgcttgttcataaaagaggcaaccgaggtggagccgcgcgaccgcaattgttgctatgctgcaacaaacagaggatgcccacgcactagagtgggcagacgagaccgaatacacagaggccagctaagcagagcgcggacttgctgaggaacgactagggccttgccaaagagcacttgatagcagaccctgtagtcccggaataagaaatagggagct

SEQ ID NO: 14121 - DNA, 1354 bp, Emericella nidulans
  unsure (1)..(1354): unsure at all n locations
aaaacccaagctgacgcttctaggatgtggcaggcttgcagagctgtggccagcaaaagagtgggtgagttcgttcccgctgatgaccaccagagcctctgtctgagatagcttttgacctatgacactagaacgcgtcatctacatttgcggggaatggggcacatttgatagcactgccaaagttctcgagaaattctacagtgcgtctttgcttcttcccctatgattgcgtatgcaaacggctaatcaatccgctgagcaaactaccagaccgtactttgaccaagaaataccgctctgccgaggagattgcttctgacatccgcgagtacgaatcgcaaccagatgtagaagatgtgggcgttgtcgaggtggaacattggactatcactggggcgacagcttgtccgaaagagaagacgcttcggcagcgggagaaatacttttctgcagtccatttcatgtcgctagaagaaatgctcagtttggctgaaagccagggccatgtctagcttgttgatgcacagaacgtaatattggagcataagatgggagataaccggcataatgctcctttcctgtcaagagttcatatcttactcattccataccgagctctacgtcaatgcacattatgattttagcaataactagtctagtaaacttgaacgccctcttgtctgctgtcaagaatgctacaaaataatccttattagcagctttgaccttcaaacgcaatagccctccagctcctaccaagtctgtcccttcctagaagatactctgcataatccaattgcgcctctaggatcgtcatcatttgtttccaccaaatcgatttgatgttgtgctgaccgaatacgccccaactgatctgcagtcttccatgactgcctaaggatactaggccctacccaaccctactgtccttagtgtttaaagactgacacgcacgcgaagaatacgggggtggatatgacgctggtcttgatgcctcgaagccctgtatcgtgggccggggatgctgtgggctgtttatggccatacgcatgcggccactcgtggtccagaaccttttacccatgcccgtgatccaatgcgtgcacctttccggcctggcgacggctatagtgacccagctatcatactgatcatgccgattgctgggttggagactagcccttctggcctaaccaacaagagttctggatgtggacagccgatgctggacagttataccgcataaacagtcttacctncccatacaaacctgcaaatgtattttactctcccaatatatatagaaagtgtattaaaatgacatgtncagcgaatgctcaccatttttcat

SEQ ID NO: 14122 - DNA, 1446 bp, Emericella nidulans
taacaatcggtatttcacgttgagaggagctttctatgacaccaactgaccttttaagagagtgaggctcttcctccgctggagtattaggcctcgattcagtggacgcttgcactgaaccctcctggtcgagccatgagatattgactgcggaatcgggactcccaaataatctggcctcagcgacaacatcagccgcttcatcttccccattgtcgatcacaagattgaggacaatgcgctcattcgtatagtaggtgcttttcaagtttgggatcgttaatcgaatctttggcggcttcggttggattttgcagcggtcaacgtcacggcccttcccaacccgcctccgagccggcccctttgttgtttgctgccaccaaaatgcttcttgttgagccaggtccgttattgcatatgtaagatcaaagtcttcctgcgaaaccaagagcgctattgaggctaccctggattctcctgactcccgaggtatgcaggccaaattgtacaccttcgtttgagcaggcccaagggtcagatctgcaattccggtaagtgcgttcagggcactcgtggtagactgatggaccgatgagtcggaggtggcacttggatcgcgcagagaaggtgacgaaatgaggcatgtagtgcttgtgtccgcatctatattctggtctgactgcagccgtattggacgcagacagccctcgaaggcgactctaagttcagcaaaccgaacaggaaccgatgacttctgggcgcaggaccttaagacaagctggcactgtaaaggttcaccaacatttccctctgctttttgaaatataaatgttgcggtaactgggcaagagtcatattatcagtcagtgtcttgcaggttttgagaaggtactcaccacttgacacaacatcctcggctttgatcacgatggatggcttttgttcctttgatgcaaattctgcaaggctctgatgaatatcgtagttccaatcagggcgcggtgggaaagctagatgaccattaagacgttaaaagaatgaacagccacctgaaggacacaaagagccctaccaaaatttagcaactcccagtcgacccttaatactgtttcactgtcctgagctcgcgcggcacattcgcgcaggatccaagcaaacttcgccatgagaagccaccacccagaacgcctccaggtaagggccggccaaagcgggcgaagcgtctcataagcttcaatccaagaacccaggcgcatgtactcttccgcgatttccaaactgagactctccgtcattcgcacttggtttcgcttcgagaattcaactagcgccgccttgagagtatccaagatgagtgtcgaatgatccactccgccgtcctggcgtcgcgcagcctcgatgtgggtttctggagcaagatatgtgtcatagagataggctttgctc

SEQ ID NO: 14123 - DNA, 2136 bp, Emericella nidulans
agcttggctgggtagtaggttgaacagtgggttgagttgtaggtataacgctgggttcggtggtggtggtagtgctagattgaggactcggcacaaccaccgtactcgaatggtgcttttcgtggcaggtggttcgatcacagacagtggtggtcgtagtcacccaggtagtgtggaattcagagacataagttgtcacctcctctgacggagcagaggtgacagcggaggatgtctcatgaggctcacctccaccggcagacgtgacctcttttagagcagcagtcgtggtagcctggtctgcggttgctgaggtagcaacgtgggactctatagctgtgctctcagcagcattcttcagctcctccgatgcgtgtgcgctggcagttcccgccgcgagggccaatgcgattagagggtaggtattgaagagatgcatggcggcttaagagtgacgatggcttgttaactggaagaccagagcacgagagaaatgatagatgcttggagttattcatgggcctcgaaggcgtcctttatatcttgtcagacgacgccgaaagcatccatgactgagtcttctaacgcgcacgacgacttgtggcttgttgatgctgtccatctggaatcgggacaatgctttgaggccgatgatcaatcacactgcttccggagatctattaataccatttaagcatagacacttgttttaagactgggatcagcacctgttaactctaatcttcaaagcttctccgtctccaggttcaacattccagcaggaggcgtgtgaaatcacgtgatatacgatttcagtatcgcaggctcgaaaacagacatgaagctgaactcgcagcagtcaagaagacggcagtctaactcggattagcggcttggtaggtagcctgcactgatcgaggaatccctagcgctgtgcacaccaatgcggacatggaggcattctgtaccagataggttgcgaggatgcaagtcgtgcgaattagccatgttttgcggcatctcctagctaagaagtcaaaaagcagtccactttgtgtatggttcaaagtataccctgttgattgaaggaattgaggatgggagaagacggtgttgatatcaattccttgatttcttggcagtgttggcactgcggtctcgattccgtccatggtccgtcaacttctcctaggctctttcacccacaacggccatgatcctcatccccacccatgtcgtcaaggacaagacgcgatctcctttcaccgcgcgactatgatgatgacgcggagtcattacggtctccgctatcagagcaggactctgatagcgaggacgacgaattccttgcccagtctcgcaccaccctagagctcgccgagcacgaccgcgccgttctcgacgaggaagaggagctcgaaaagctcctcactagatccggtcctactcacgacattcgtcgaattttcagcccgaacaggagcaatgtcaggatcgggaagaaggaagaagcccggcggcaacggcgagaaaaagagagaattgcacgcaaagcccgccgcgagagacggcacggcgacgatgaggaaatgtatgagatggaagagggacacccagaagacgagagctctctgctgagttcttcctcgtccgatttggatgagcggattaaggagcagtatgctgatattcaggtctgtctttgtacggtcatatctcttacgggtgtcgctgactttgcaaatagaaccgccaaaaagtctcctggcagaaaatgagtcttgtcttttcagccatgttcgttctcttcctcatcctcttgctcggagcatacaaggcgtcggctggtttccgcgcatcccactcctctgtgaagactctgctgtccaacggaaccgccttgtttgcgcctacgaccatattaatctcgctcgacggcttccgcgccgactttctcaaccgggggctgactccaaccttgaacgccttcatttcagagggcgtatctcctccttatatgcatcccagcttccccagcgttacctttcccaaccatttcacccttgtcactggcctatatccagacgtgcatggaattgttgggaacacttctgggaccagagctacaggagcagt

SEQ ID NO: 14124 - DNA, 1817 bp, Emericella nidulans
  unsure (1)..(1817): unsure at all n locations
tgcgtacctggatgaccgcgcttgtcttcaagtggtgatccggtgcactgggtgcacctgcttcatttaccgaatgagccgggcagccccggaggaaatgtaggtgggcatgtggaagttgcccgcggcgattttcttgaaaagcgccgggatgtaatcgtcgtcgaatgggagccgtcctaccagcagcacgtacaaaatgactccgcagctccagacgtcgacctccgggccggcatacaacttgccagagatgacctcgggcgctgcatagttggggctgccgcagctggttttgagaaagttgccgtccgtcatgatattacttaacccaaaatctgcaatcttcacatttttatccctgtcaatgaggagattttccggcttcaaatcgcggtgaacgatcttatggcggtgacaatactcaacagcgcagatgatctgctggaagaacttgcgggcttccgcgtcgttgcagcggcctcgcttccctaggtaatcgaacagctctcgttcagcatattctagcaccatgacaatatccgttttggttgaaatgacagtgtacctaagacgttagcacggcccagacccaattgaacatcgacatacagttttataatatgagggtgccgtagcagctgaaggtattggatctcccgctcgactcgaccgatcatgtcccgggatagcagcttgcggcgagagataatcttcatggctacctgacggccactgggctgatggatcgccagcttgacctttccaaacgagccctcgccaagaaccttgactgtatggtactgatcgaggcgctgcatatccctcattgtagctggggactgccgcgaagagtcactaccctttccgatcggtcgcgcgggcgggggcatagccatggcggactgatgcgaatcggacggattgggctcgttggtgcgctcacgaggacgatcacggtcgacagcagggagagagaccgagaggtcctcgtcgtcaaaggcagcagccatgctggcaactaggactcgtcgtcagtagcggaggtgatgtggaggacacaaggtgacgtgaccacctccgcctactccgtagacttgtagttccgtgccctaacttatttttccacctcaattagatggaaaatgaatttcgaactgttctcgctcaagtctcgagaggagggggatacccgatcgtgggactatcggtgggcgagtcagttcatgttcgtccgaggtgtccgtaggcaatctctgcgcggcggggtgggttctgaggtagccgggcggattcaatttatgtgctgtgaattgcaaagacgacagtaaaggaacatgggaagtccaaaggatatgaatggaagatgggagaagagaagttgacggagaaatgtacaggaataaagcagcccgagggcggcagtccatcggtacggtagtccctcgtcagagtcatcacccatcagcattatatcagcactcgcacaaggccagaggatgtaacacagtctaagtcttatttttccctattcaattatataggcatagcgtaaatagatctactcggtattatctgaacatctcgcttgtgcctttcgacttccatctccacgaccccgcccagcagcaaatcgcttaccctaggtattatggcagagttgacgattactacctatcgagcgtcttggcaattatgatggttcgtaaataatagacgagtgcgaagtattccattgcatatacaagtaatgctagtcgatatacgccgtagatgtcccccttcccccggagcnattggcgtcatgtggtggggga

SEQ ID NO: 14125 - DNA, 807 bp, Emericella nidulans
agacaaagaggtcgaggtctgggttcatgaacacgagctcaatgcggcgttttggtctgtggcgacgggcgctgatgcaggggtttatttggcacattatctgaacctgtcgctgtatgtcggcactttttcattattacatttattctgtccgctttcagtggagcgcttgctgacgactttgaagtaattggaaaaccttcaacgaccaaacgatggacttctgccagggaatcaccctgcaccatctaccaggccacacggacgggctgattgggatgcagatcaacatgcctgagtcagggacgtttttcttcatcagtgaccactgccacgttctagagaatgtacgccatccttcacccttgtgtttatactagaccgcggacaagctaatgatgacagtggattgacggcatccctcagggatggctggctcgagaccatcctgcctggttccggagcacgcagcggctgaagcagctgcagcggatcacgaaggggcaggttatccccgggcatgatgagacgacgtttttggagctgaaaaagcaggcgaaagtgttcacttagcgaattcgctgctccgtctaaagataacataactctgcatccagccttggtaatagactggtagtcattacgagtttgtataataccctgcatttggcgataagcatgaccaaacaaggcacttcaatgaaagacagctggagtatagtgactggttttcttgctttttttttccgatttcttttcccctcccctccccctcccccccgctttcttttttgctttctatttccg

SEQ ID NO: 14126 - DNA, 387 bp, Emericella nidulans
gggatgttctagcgaacaccccccggacttgatagagtctaagcattgcggcatccagcggagccgtttgtatccgtaagcagcgtgagcaaatactgcaggggcttcatatgctgcagatccgcagacaccactgagaggggaagcacatgagggcccagatgggcgaactatacaggatagtcccacacggacattggtgggctgatagaggagcagacatggctctgatgtctcactggggaggacgcgggtacagtagaccagacgaacagagtgatagcgatcggtcttctccgcgcgcgggcaatctgagacggcggaggctgaagccggtggcatgcgttgatctagacgctaatcgctgggtgactggctaccgcgact

SEQ ID NO: 14127 - DNA, 2816 bp, Emericella nidulans
  unsure (1)..(2816): unsure at all n locations
tacgatttaggtgacactatagaatactaggatccctctccctatcacggtccctctccagatccctgtcccttgtatggctgcgatctcgatcacgatatccccagtcccggtatctctcccgatcttcacgtcggcgccgctcatatcgctcctggcgttctttctctcgttgctcgtctagggcgcgttgctctgcacgccgttgttcctcacgctctcgtctcctagctcgttcctcttcgtccttctgtcgttggatttcgcgctgtcttcgttcctcttcctctttccgacgggcctccgcttcttcagcttccctgcgctttcgctcctcctcctgccagatcctctcgcgctcgtcacgcttagccttgaccagtaaagcgtattcctcatctgtcctattgcccgctataaactcgcgggtagcctgctcgtcgccaacctcttgacgacgaatctcctgaatggattcgaatatagctgaaaggtgttgtgcggccagcgcatatagcgttttctccaccgaattgtacatatcactgcggtcgacagcgcctccaatcagcgtcgcggctttgccctgttccctcgagagtaattggggttcgcgctctatctccgactctgcgatctccgtaagccgtcttgtaaattctgctttcccttcctagcatgtagtcagtgtttctgtctaaacgaggtaaatagaatctgcgatcctcgtactccatcatgaaactccgaccagattttcttccggatatggtcgaaccctcccttcttcttaaagctgtgtagaaggtcctcaatagctttgtgttgcgcagcagtcaagggtagctcctcggtcttgaacttcttccgctgctgaaatctctcgacatcaaacgacggtcgctttacgccaacgccattctcctgcgctcctgaagcattccacagacccatccatagccgcacaccaagagagtcagacgaaaatgcctggactcaatatgatcgcatgtgttgcgccgtgtccgagaactaccctggtttgcagaccccacgggatccgcaaaacatgcgttccgagccgatggggaactgcggccccgtgattncgcagactgagtgagcacaacctcaacccgactactgccattcttcctgccgacggagctccattgtgacgctacctaactcgagccgccattgcaaatctacctgccacattctcagcggacagaaccgaataccttctaccttccaaaccgcacggtccgacgcgaccccagcatccagtatggttcacaaagtcctcttctggagcggcttcggtacgtccacctctaccacgattggctccgaggattcttttcaattcgcattgtatccttacggatcgcccgggtacatttacagcttctatttcaagaatactgaccggtcaattccaggcattgccgtccgactctggcaactcggcattgagatgcgcccgctcttcgtcaaggaatccctctgggcctaccccctcttcgctggcatcggcggtagcttcggatactggatccagggcattgaacaacgacaactccaaatcctcgcacagcaaaaggaagctatcctcgagaagcgacgacgacgagatgagggcctgagcaaggtggaagaggcgggtaccttggctgcgacatcgtgagagatgctgtacgattctgcttgtgtttatatcatattcgttcgcctactttatgcttaagacaccgtgtgggtggatcgaagtgacggacgggttctttcttcggagatagagagtacatgtgtacttgtaccaaaatacaaagagttgattccgacgtgatgctgtgtttgggattgagtatctatttgtctgcaggatggataggcatgttggatagactcgcggcagatatgttatcgggttccatattgaccgctcgttcaacactatcaggcaaattagtagatcaaggaattacgctgtgtacgctgtgtagtctaccggctactcggttatcacccgagttaaataacaattatgatatataggtagtccggcctgtctcataacttggctttatggtgttggcttaggctcagatacaataggcgaacaggctaaggcagtctttcctgctacgctgatgttatacgttacgttctaaccacgttaagtaaggctggttagccagccttagatatattatatgtatatgtatatgtataaataaatagtccaagaagcccttattactgcctccctgttcagtcactgatctattcaaataaccctggctaaagcttcgcaacaacatctacggcaagtaaagcaggactgtaccgtgtcttggtggtaattctccggtactcgatgcatcgccagatgagcgagaatatcaaccacggaatacgcacccctgaagacgaaaggcagtgttctgtatccgccatccggcgaggaagagtagttttgagtgacggtgcagtacagagcaactgtttcgtatctgatgcattcctttccgccctgaaaagagatcactgctttagaatcgccgatgacgcggtgatagaacctgtcggccgttttaacgatgggcaaacccctgggagattcgctcaaatgatatcgcatacactgggttatacactcagcaagaaatctcagtgggtcaagggtcttgggcctcaccaatctccctaacgctcacttttcgctccataaacaaggttggctagatcctaggctgctctctggattccatatgtttataggataagggccgagtcgtccgtgagtctat

SEQ ID NO: 14128 - DNA, 435 bp, Emericella nidulans
ggggtaagccccgaaggagagtactgccgtacgctgattggatgtctgggggtcctttgtattctcgattagacggaccatcgctatagacgcactgctttaatgtatatcctgcaccaatggtctgggcctgggatacacacacaggcgatgtattgaaacgatacgtgggacgtctctgtgtaagaatcccaccagccggggcacaaatggagaacatcacacagtccgtatggtcaaggcctgcatcttacatatgctggcgggccggcctatcatggggtaagctccacttgtgcgagcactcaatcggcttggttcaaatactgaaatacgtagctgagacccgtgccctagttgagaaagagcaggacgcaaacaaacagtacctgtattcgggtgaaattcactgacaaatactgcgagcgtcttgag

SEQ ID NO: 14129 - DNA, 413 bp, Emericella nidulans
  unsure (1)..(413): unsure at all n locations
tgggatcaccccngctccgtgccattgctgattgtaagcttcagcggggtgacttgatttttttgtacgttaggcggactttgtcaagggaccgtgtgatacagtaatgcgcctgtgtggatgggaagggcactggcatgaagcgcatccgcggtgacaactagatggacgaggactttgtagtgaagcacttatggcctaacatactgtacatgtcgaacgccgtctagaagaccaacggctgtgatgattacataccggcgtgtaacgccattgatacaggtaagtgaacataggtgtgcgctactatttagaccggctaacgtcagggatagctgtgcccacgtctgatccacgaggtacaagcgggcaggatgtcccgatactgtgatagggctaggctccatttactg

SEQ ID NO: 14130 - DNA, 491 bp, Emericella nidulans
aaggcaagccctgcgggaaaccagttcataggaaccgaactaagcattcgaccatgtctagcaagctccgtatgacccaggcaaccaaccagagtctcgagcctggaaggttgccagacacgtcttgggacagagcgggtatatcgaacgctacctgtggatcactcgctggcatggaaagagttgacacttattacgatcggtgataaatggacgacaggcccatggcgagcaggcagagacttgaatgcgagactcgcacgtaactacggcatgccgcactggagtacagcccgtatgtggacagactgcaggggacgagcgcagcgaccctatggactggtgtgaggctggagaggaagagactacggcagtgatatctaaacaggacgaaggagacagtatgacgaactgtgcggactcagatggcggcgtcgcggtacatcaggactttggcatcaactcggacgacgtgacgcatgggctgtacg

SEQ ID NO: 14131 - DNA, 508 bp, Emericella nidulans
ttaccccagcctttttttgtgtcagttggggagagatcggcctggggatgtttatgaggtgctgcgggtgggcccgctttgcataccaacgcggctaggtgccttgtaatgcacttgaccattcaggggatgcttcacacgaggaaaggttgatccaagtaatagaggccgaaatcctggggctagcagggtgaaacgtgggagagagaagcacgaaaaatgtccgactgttacgcgcaggcgccccaaaggaccctagcgacgttttacctgaaaacaaaaacttcgggacgtacactgcgggcaatgatcgttgtagtcacctggcatgagggttatagtagggctgaatagatcaaaggcacgaggcgagcgttttcctagctctgacgcccccagcgacacttttgacaaaactagtgattgacaccatggtaaggcctcgtgaaacaaaactgcgtaccctcctttggtaggaaaggaagaatttggtcacccaagtttgtcg

SEQ ID NO: 14132 - DNA, 428 bp, Emericella nidulans
tttgttagacccgaccggccgggtccagccttgtctactgatcaacatgaatcccgcatttttacggcgactctacccatcgacccccttcgcatcgcgatggctcatggatcgccgccaagcccgtctgtcacgcggctacagcgccatcgggtccaaccaccttacaaaactgctgagcgggggaggtcagcatgtatccccgaatgctagggatccctgtcacggacctcagtggggaacgtgccagctaacagggagactactagcggttctaccgtaccggaccgcaggggatttctgggctactgagttatttcggggaaggtgctcccgcgatacgatcatgagctcggggtggagaatcggcccagactccatataaaagcactttatctgacttaaacatgcaatatgtgaacaggcca

SEQ ID NO: 14133 - DNA, 536 bp, Emericella nidulans
ttttggtcacgagtaatcacagtgcgggctcacttgtcacacgggccacaaggttcacgattgttgtgtccgacaagccggatgtttaagaaggagggcatggcgtggaggacctggcctgccagtggactaatgatccacggcaatagcggtgaggagcgcgtcctcagccagatgatagagtgcaccatagttagtaggcgaggtctgtctctttactggaagcttgtgcctgcacaacatacaccacgcaaggctatgattcagaccacaaggaatagacttagtaggagtgcctacccattaactactcaacaaggtgactgcaaccgttggggctcatagggatacatgccaccacgcgcggtaaaagacactaacaaatctacccacctttgcctgcatatttagatgtagtggagctcaatgtgctctgaatatggctatgccactcttgtctgaccgccctggatttgtctggtgatgaacgttacaacgatctagctggacaggccatattttcttttaccaagatg

SEQ ID NO: 14134 - DNA, 375 bp, Emericella nidulans
gaccgaaccaacacagcgccaacacaccatatgtcgaccacagcagcaaacaacgaacccaccgaaggaagccgagagccccctcccagagaacacacagacggacggaggaaacgcacccgccacagggacagagggccatgaccccgaacaccaagagagcaggaccagagaaggcgaggaagcccaagaaggaaaagaacacgcagcacaggccaaccaggacaggccacacgcaaacacaaacccggatgcgggaggcggaaagcgccaacccagacacacacggagaccagggaactcaaagaacccccaagaggccagcggagggccacaggccgagaaaacaggaaaccccccagccggagaacgaaa

SEQ ID NO: 14135 - DNA, 2419 bp, Emericella nidulans
cagctcttcttctcaagctgcacaaggatcagaggaggaacgaccatgatcggggtcgcgttcagaactcggttgaaagctgtctcaccgacagcgatcttagcagcgaccttgctccgtccgagactctggaccggctcgccctctttctcaggaacggggtatacgtcgatgccctgacggatttcctcgctgcgcatgaggaatacgttgagcgcgctggcgctcgagacggcagcgaaggggacgagtcggccgaggatgagcttggtattgggggagacgttcttaagacgggggacgagagcgttcaggccgagcgcgacggagcatgaagcggacacggccatgaggtaggatttagccatctgcgaaacggagaggggtgttgatttgttcgagttggcattattgattgccacgttgagagactgatttgcaatctgccagagcaaagtcccggtggtctaagtcccgtcagatatattattctgtccatataggcgaggctgttaccttaaggcccggtgtgagcattcccgccgtaacgaccaggttagagaggacgtagcatgacatgcggaaggggaggaagacaggctcgcccgtgtctattagcaagcacaagtcagccaaaagaacagtgagccagtaatagggttcatatctggaacatacccgggtgtaatgtcgaatccaccaccttcttcgccctccataactccgcattcattgtcgggacctcgttctgcttgtaggaggagataaggcgctttgcctgctccagtcccgctgaagagacgaatagcatcctgcactgttagcctgcagttaacaagcagcatacgatatgaattaccttggatcggaaatgtcggccgcatggcgcacgcgaccccagtaggtgtttaggtcatattgcgagtggggaagctcccgatcgccgggaagcgaggcggacatttgcggccaggtaaagagtgacgaggcgcaatgagacaatgacgataaagagtaagacaccagactggaggagaaagagaaatagtaataagatgcggcggcgacaagcgggagaaaatgattcagcgtttgtcggaggcggtgagcccgataagcggggttagccaatcggaatactccaatcgccatctggctcagggaccgaaaaatactgagggctgacccctcttccaattccattgttagtagccagtggccgaaagtggcggattgtcagactcagacaaaccaaccccgggactctccgaactacgcccaagctccaacaagactcatacagaatgcccccagaaagactagtgcgcatgcaatcactctcctgcggccacgagcactctccaactctcgtcactcaaaaagtcttccgacaacagctcgattaacgaggcgaagatcagcagccctgctgagatggcgttcattgtgcccactaggagcagtccgacctctgaatcagggctatacagcgaatgcgttgcgataccaatcgcttgcccgatgggtgtactaacttgctcagtaaaggtaacatgtagctttggggaacgtacgtgcatccataagccagtgacataagccatggctgaatggcctgtcaggccatttccaagctcgcgatgcgagagccaagcgcgaggccttcaaaggtttctacactcgttagaaggtttatatgaggatgaactgggaacatacgatgaaagacaatggcgatcaagagaaccacgaaactcattccccaccgatacactcaaggacatgccgatgaagacgctgtgaaatagaattccgacctcgagcataaacacttgcatgacatccttattgtacttctgcttctccgacagctgaaactcgtccacgctgccttggcggtgggtaaaccgcttgacttcgctgactcgcggaagagggctggcttcgggcgcagaagagatgcgatgtatcctgtccgattcttcgccgatgcggtggattgcacggctgaaactggcagctctgccgactaatggtccttttggacgtatatgagggcttctatcgcaatcgcaagattgttcgtggttgccaccagagaggtgatccgtgccagcagggggtgccgactcttgatcagtttgttttgagaccttccgggtagcttgtcgaacgggactaaagaccatctcaatcaaggtgacaaggaatatcccgcccagggagatcgctcccggcatagcagggtaatcggtggtccaaaagttagacagacatgggtcgcctagtaaagtaaaggccgtcgggaggagatgcacaaaagctgtggcaatgaggacgcctgtaccgaaaagacgcacaaaaaagagaaaagctggcggtatacgcagacgagagaggcgtatcccaaaaaggcaga

SEQ ID NO: 14136 - DNA, 1086 bp, Emericella nidulans
ggagtgtgctgtaaattccgtcgcgtcccctggattgtacctgaagatcctaaagatatcgagcttgttgatctggtaaaggtagcagcacagctgggagcgcttttggacaaggtacctcgtgttgcggctcatgtagagcccttggagagcgtccacgttgttgttgtgggtgatttcggtaccagagccggtctgaagatgcttatctcaacgcttgaaatgcaattgaaacaagacaagacggagatactcctcgtccataaccctgaggaccctttaacaaatgcagcagcatcctctctcatctatcgttccttgaaagaaggaaatggcgttgattctacgcgcattttggcggacattacatcgtctacctcgtcagacgtagacgcacaagaggcgtccgaattttggttaaaattccaacccttggttgaggcactgggtctttcatctggtatgaacggtatcatcgtcaatggtcgagtcatcaagcccagccaggacgtaaccgcagaagatcttggtcaacttttactctacgaagacatcaaccgaattgggcctgtcacgaaggctgcgaaggatctgggactcggctctagaatacccgatccgctgtcatttgcgaaactcacttcactcatggccatttcaacagtgtctgatgttcctgagggtttatatgaaacatcttctgatgtgcgggttaagttcttcgaggagtggaatgaatccagttccgtaattactgttcccggccctgaagaccccgtgataaccatcagtgcgtctcttgacccaacgtcagaaatggcccaacgatggctaccaattctgaaggtcatatctgaccttgacggtgtcaggctgagactcttcatgaatccacgggatgagcttcgggagctccctatcaagcgcttctatcgctatgttctagacgcgcaaccttcattcagccaagacgggtctgtttcacggccgactgctaccttctccggagtgcctgttgaagcattgcttaccctcggtatggacgtcccaccgtactggctcgttgcaccgaaagaatccatacat

SEQ ID NO: 14137 - DNA, 297 bp, Emericella nidulans
cacccgccgtgctcgcgtgagaggccctcaacataccacggttttgtgtcagcccactacgaccgaggcttcctgggagagtccgtatcgcgctagtgcctagcaaggcctcgaacacagtgaagaaatagagcactggagtttgctactgcgctatgaacaacgcagccctcgatatcacaagaagctccgcgccagcagccggaaggcactggcgagagtgcaccgaaccatggcaggctttcgagaagggagtgttctcggcggagggcacatctttggtatccaaggaccaga

SEQ ID NO: 14138 - DNA, 284 bp, Emericella nidulans
ggggaaaacgcccccaggaagcccatacaaggaccacaaccgcacaacaaacgggcagggattcggcaggaccgagcaagacctgccggcgggcatgcacgataaagagccccgagcgcccaggccgggggagaggcgcgggccaaaagggcgggcccaacacggaagccatgcgaggacagccaaagggcaagcgaaacaaagcaaggaggggaaaacaacgccagggacggagtcggaagagcgcgggcaacacgcagaggaacagcagacgcagcagggca

SEQ ID NO: 14139 - DNA, 1509 bp, Emericella nidulans
gaattccgttccctgttctctaaagatccctgaagtcgtagacctcagaaacacacgcccgcgtccaatgcaagtgtcccaacggtgattaatatggaatggattcgacaggtcaagtcggcttcgaaaagcgttacgcacatacatgaacctgaaacaatgccacaaggaacacgttcccgatcacggcctagaacgtattagacgtcacctgtattagtttgcccttggatgttgtctcttcgccaataaatcctgctgcacgtcagtggaaattttctggcagccgcttactggtgggagcccatgcatgccgaacgcctatcgcgattaaaagatctatttttgacattagttgtggagtggacccttgtttatatctgcagagaccatgccacgccttggaccttcccttattgcgcaaccttggtagttccatgaagttgcctatctacaattccgcgaagacagtggtaggaatcgaagcagtcatggcaatattcaatcccctcagcccataatgctctatttatcttttattttcaattctatggtgctctctgtatccaaggcttttaaaagtacctagttttctacattagtgaacattattattgagatagtgaggcatgtcctctggcttcaatgaaggtaatttgggtgtaggaactgaaaaagcatgggttgttcaggccatatcctgtaaagacatgtttaccctgtattctaatgccctacagttatacattatttagaaacgagaaggcaatccgaattttatactgccctgagatcttctgcttaaccttctggttatccttgccgtgaaggctggtaaaaagaaattccaaaactaacggcgaaacttagactgaaaaaagcataccaaagcccttaccaaattagattcaaattgagcctcaccctcattgcgtttaaaacttcaggctctccgcagaccaatggcgacccctcgccatgggttgaagaatcggcgtcgtccattccttcccctcgagttctccttaatcgacaggcattggaactacttgctgatgggcttctaggcgactaagtatactaggaagaagagatcagcctcccaggtttccttccagaaagaggccattgagttacgcattcaccttcgtcaaacttgtacacctacactcgacaggatttaactctgccgttgaaagcccggtactatactggggcagttaatccattgtacgcctcactatgtcgggatatatatcagtgcaaaaatcccggatgcttcattctttactattttggtttgttgttttaggaggtcaatagggcgctaactacggctaaacggtgtgagtcttagtaacagcctggccctagcagatataaagacataatacggtgtctttgaagacgacccgcgctcgaatgttcatatagtgcacctggcagtgacaaccgctataaaataaaggatgagagttgaaagtcacacatagatagagacggccagag

SEQ ID NO: 14140 - DNA, 2327 bp, Emericella nidulans
gccgttcatatgggcaaacgtggcttgaaaccaagatagacgactatctaagtcggtgaacaattagggacatgttgaaggtgattggaaggtgaaagtgctgggttgtattgccccggaaagaaaaaggagccgaggcgggagcgcttagtcatcattctcacgtcaacaaaggtacaagcctcaagcagttatgaactcatacaactcgtgaaactcgactcgaaagctgttactatcgtccatttcgcgagtgatatttgactgggtgtcggtgtactttgggaaggaactctcgtctcaaattaaatactaatattctatgcaaagaatatacacccatttcgtcggccggtatcactgtgtaccatgctcaaccacgacaaagcctaaactccacacagcgaaatcgatctcttgaacgtcctttgattatttgcagcagtgagtgacgagattatcagcttaaagtggggttaggttcttctgtgcctatgcggggtcgaatcgatttgtgaacacagttatagaaggctatataagcacggcagatggcgctctgatgagcggacagagggcacttggaaattgagccatactacactccgcactcaacttcggctgtggaagctcggcattcaattagtctggcacttcaaaagcccgcgcggtcaagcgagatggctacggcataggcacgttaaaaatatgccgtttgctgagtctacaccccttttttccctacactgatgcgaaaaggatgtcatgaatgagctctacggctcgtgaactaatgacaagctccagtggagacggcacgagcagcagtaaaatggtcagggcaaatgctgccatatagccggtctgataaagttcgatgctcggctgagtaagaggggtccaatagaagcacagctgcgtagaccgagataagttgcgaaaaagcgtccatgctgctgatcagccagatctggttggtatggaggggttggagttggagactcttatcgtgcctaggtacgttcattgcatggggccgagttggagtaaggtgatagcgcagatcgtcgtagatgtacaacagactaggttccaggagcaataactctccggcgcaattattactgctgctaatgagtcccgagataagatatctttcaatatcagcgtactaagtaccggcccggaactgcataatctgatatgacagaacgccgagcagccctaatcctccctaatgcaagctatttcaagctctgccgtctcacgccaccccgacatgacagcgaggccagtctgatcggcatttgctttccctgtctgcttccagccaagatagggtccgccacaagaatgcatcaatgtaacagccgttatcggactatccccgtcctatcaagaggggaagcgggggatgcagcaggaaaagcaatcagataaccttaaggtctcaatcgcttaccctgccctgccttataaaggcccttccctgccagggtatggcctgcctccccgttctattcgccctctgactttttatattcgggagaatcctcgcttaccatggagaaagcagctggcccttctgggccctctgcaactggcctagactccaaagtagaggcagagacatcaatcattcgcgatgttgacctcggcgagatgctggagatccattacacgcccgagcaggaacgcaggctcgtccgtaagctggaccttgcgtacgtcctgctgctgattattgccctcacaggctagactaactgtctttttccaggctgatcccaatcatgggcctcgtctactgcatgcagtatatggacaaggtggccctcagccaagcgacgctgcttaacctccgcgaagacctcaacctgcacggccaggagtattcctgggcctcgaccatcttctactttggctactttgcatggagctggccgagctcctacctgatggtccgcttgcctctagggaagtacattggcgcatcggtgtatgtttttcttattttctgctgcccccgccagcacatatcaatactgacaatgcagtctaatctgggccaccgtcctgctgtgcaccgccgccaccaaaaacttcgctgggctgatgacagtgcgcttctttctcggcgtaggagaagctgccataggtccaggctttggtttggttattggcatgttctacacgcgggaggaacaaccagccaggcaagtcagcccccagtcgccagccgctacctgacgaagtagttcaccatctgacagagcacatagacaagccgcctggttccttggcaacgccgtctcaaacctcatcag

SEQ ID NO: 14141 - DNA, 1879 bp, Emericella nidulans
aaatctgcctctattttccattctcgaaaaaggccgccctctgctcgcggccttgatactcttagcgccgtccgtatgacctcgatgctcaaccaatccttggacgtgtaaggagaagtagcttcattctgtaagagaagcgacgtagtcaaatgataggtcatatcttgcctctcaaccgatctgcaaggataaaagtctaccagcgagctcctctgtagctggtcgcattatcgcggagcagtcttgaaggggcaagaagctcaggcaggcaaacacaagccggaagggaagttttctgcagccgcttgagcgtggggatctccactataatgaagtttggcaaatcgtgttgctgattctcatccttgtcgtatccattgatcctgactcgtagacagtccctccgcgactgcaggccatctcgcatcctgtccaacgcgtttggtctcttttccaactccccgttcgtcaaggaagtaccgcgactgtgcgagttgttatcagcaacgggctaacgcgagatcaaggcagaggagctgtcgctgctttgggtggcgatctagaaatacactttgtaattagcagcaataagcgtacaactaataactttaaattttaactgggttatgcaagccatcccggttgtcacgttagttgtccgttagaccccagtggactaccagattcgcactggcttcgtctgagtgactggcaagaccggcaatatctggatccgtagtttggacattaagcatgggtcctcgatgttttgttttcgtacaggcccgacgagacagttgttgagaaagaggcatcagccttcctgtctccctttggtctagcgcacgcacaagtagcaattgggtctggaaagaggggatagcgtccatgattgacaacggggctgggagatggaacgtcagacgtatccgatcctacaaagaagacccgaagcttggaaagcggcgatccttcccgaatttgctctggcagtgaagagagtcacgggacctgtcagcaggatgcgaggacaagccatcgtctaacaaattaccgaatttcaggtatctctcatctgggagtttcaggtgcagaggatattatatcaatgtttccctttgcaatgccttgcttgggaacgacggaagacgggagttgtgggagtcctgcgcacttggctaattcgccctcctgggccgaggccacagtggataatctggtcagcagaaaagaacaatggtcgaccatcaattgtcaaccaggaggcaacaatcaggaacagagaataataccagtcctagtggttcctcaatgcaaaattaaaccagcgttttctatatatttcgtcctcttgcaagcccatgcctattattgctgcgacggggagaaagcgtcgcagagttcgatttccatcaactaaccccacggtccaggtagagaagcctcagcctcagaaagcccaaacccaaccaccggcgagtagcagttcttctctcgggtccggttcaaggtattatcaatcgccaacaagaggcgtcaaaatggcggacgctactattcatgctgcgatccctcgtctcttccaagagccgcctgtgatccgtgacacactcatcaccgaaacaagcgagctgcaggctgagaccatcaacaagtgcctaccctttctagcaggcgctcacagcagtcaaaagggccctctcaatcgtcatggcgtgccttctctcatgcgcgatgtgcatattggctatctgtgcgattctctagaagactacccccagggttcgttgcaatggatgccagtcggccttggatgatttattgggcgctacgtgctttgagtcttctcggagaagacttgagcagacaccgtgaa

SEQ ID NO: 14142 - DNA, 1416 bp, Emericella nidulans
atatcgcgcaggttgaaggatacttgcggtggtcattctggagtaaaaattcattaaaggttgtcttttgagtctgcgcactaggtatgtactccgagaacgatgcagaacaagcacgccagacaaggggtatagagaaagaagactatactagagaaataataacgagagaagagagaggaaacccaaaacaaggtagacgatttagatggagacgtcctgaagtagagtaccatacccccaaccccatcattttccaaacgcctccagatgcaacgagagcgagaagagagcaaataccgcgctagaaagcacagacttaaaattgcacaatttagggacatagggcggatgtcatgtttttgctttctttgcagcgccttcccccgtggggccgccgtctgggctcttgcgcttcttatcttgctcttcttctcgcccaaagcctggaccgttctgcacctggggagtgggaaacactagcggactcgggagtatattgctgtctggaccagacctgccaaatccccactcggcgggaaagaaactggatggtgacggaagaagcgcatccgagacaaacctgcttggcaaggccgagatcggcgtctcgatgttgttattgttgttgtaagcagtggtgttctgtgccgccgcggccgtggtcgacggaggcgggggcctggcaaacggattcggcggcccttgagcacctgcactgtgtatcgcacctgccgatggagaaggcggcggcaatactacacccggatgactcgcatccagttttgcagaagttacagccttatttcccgcagaggacgatgattccgcggtcgcgctaccccggtctgaattctcgctcggtatctggactttcagttgtggtcgcttggaccctaatgtgccactgttggttcgcacagggggtttgatttctgatggagggttggaaggaggagcttcggttttggcccgtaccggaggtgagggtttcttcagcggctttttctcatcggcttcattctgtactgactcggtcttgacgcttgcattgtccccaaaccctacaataaaattgcgtgccaaaacagacccatggtcgtcaatcggcgtaaagatactacgcgattttgcattcgaaaggggttttataagaggaggagattgtgctctttccgttttcaaattcgcttgcagttggtctgactgtgcctcagggagggatgctgtgcgctgtggatgcggatgttggtctgccatatacggctgagccacatgaggtatggatggatgaggtggctgtgacatcgccatagtagtgggtggttgtgcgagagcgtgcgggggatgctgtgggtgatgctgtgggtgatgctgtgggtgatgctgttgtggatgcgcatgggggtgaagtgg

SEQ ID NO: 14143 - DNA, 802 bp, Emericella nidulans
gttcctaacgcggtcaaagccaacgacaacaatagccaattgttgacaaaagcccactgaaattaacgcccccaaaataacagatgatacgcagtgacaagcagtgacagattcattgatgatgagaaggcagaggataatggaaaacgagaaatcaaaatgaaatgaaatttaatgatgataatgatgataatgacaatagtaataagtaataatacggaaagaatcttctaggcaggcgagtgtcttggatagggtactcttaagcgtgtgacgctagagcaacagatagggtctttggaattttgagattaaccaaacgttgaaagtaatagtagtaatataagaatgaaagaaggagaaggagaaaagacgtgggaagttgagagaagctcgaaccagagcagcttgatcacaagcagaagcgcaaaccattccaaaccagaagcaacgctccgcggagcgcacgcaaagggaaggatatgcaaagaacaagattacaccaacgccagtgtcacgggcacatatccatatccaagatcatgtcggcacagggaaaaaaaaaataaaataaaaaaaaaaaaagagaaaaagaaaatggaaagaaagcgaggaaagggtaatagccaacttggcacgaggtcgacaaatgtacaaacaaaacaagggtataagatagctttgatttaaaaaccattgatttcgttcagagaccactctcggtgccagtctcaacaccgtcggtgtatgatatgcttgggtcgacccgaaccctgttgtaccgtatcggtgttgaggaatg

SEQ ID NO: 14144 - DNA, 557 bp, Emericella nidulans
cgatagtgatttaacagccaaaaaaaaaaaaaaaaaaaaaaaaaaaattgcagacgcagtctcataatgtcctgctttcaatcgttgcatcatacgtttcggtttcgatcccataggccacgcaatagaaatggttgtgctaggcgaccgctgcagtatgagatgatgcgcctgaggtgatgcttcggtgcccaaatactggggccgtagccactgatattcaaaaaaagtacaaagcgacacgtcaaggagtttgtcatatgttacgatggacgcacatcgacattgacctgcgcacggagcgaagtcagaagccttgttttcacaaaatggtctcgatcaatgtggtgctcggtgctagatcaaagccaaattcatgttcccgccgccacggcgccattgcccgaacgcggcgatgaaggaaaagcagctaccccgtgcactgcaggcagcgtccgtgtcatcccaaaagtctgggaagtggggaagctgaaactcacttgtccgcaggcgttcgagagcctcgttgtacgactcgggagacgaaatttgacaac

SEQ ID NO: 14145 - DNA, 483 bp, Emericella nidulans
attcgcctacgtgcgcctagtatgatatatgttgtgccatttcacgttctggtcgttcgtgactgcttggcgattatgttgcctatatttcacttgccgtaggtaagggtgcgcatagatcatcaaatcgctcatgtgcctatagatggggtcggacaatcatgcatggctgctcagtagcgttggttctggcacatagactgacgcctctacttactctcctgattctgatgaactgcggtaccatttggctcgctaagctatagacatggtttaaatcaggcgatttgaattggtgctctttgaaagaaatatgaagtctatcaagccatatgtcactggcatgctgtacgcatagacttagcgtgtgatcgttcagaaaattgtggtttgtagttcagcagagcccactgtagctcatgtgctatgttgtgcaaccggatttgcgacagttatgggccgatttaacttcattgcacctat

SEQ ID NO: 14146 - DNA, 1094 bp, Emericella nidulans
catcttcctcctctttcttctcttgggccacagtagcatcagccttgggtttcggtaacgtggcggagtccacggtccctaagaaagcctctggtttgagattctcctccagaattcccggaggatgaatgggatcgtattcttcagtagcgtcctgacccgagagcttgagaattatcttggaaccaccagggtgctctgagaggaaatcagtgacctgacagtgtaatggtcagcattgataaagccaaagtcctgtgatgaaggcccgtacatcgtatactttcccgtacagaatcacccagcaactatcttttgtattgtgctttgcaactattatagagttaagagctgtcgcgctgaattgtagtatatggagaacataccttcggccgcatcgaacaccttgcccatcttcgcaacctggtcgttccaaagattgaattttatgagaaacgaacagagataatgccagagaaggttgtgtaaaagaggagaaagccaggccaaagtgttagttggagactcggagtcggtctaatctgtcccggcagactatccccaatctcgcggcccttctcgcccgagcgccttgaagattcggacccttctccgacctcacgcttgctgcggtctggatggagtgtggggaactccaaccaaagatgggggcggcaattgaccgctctctctcgggcaatcccaatagccgacagtgggaggaattgttaataaaacagcataattggtggaagaaccgatcttcaaaagaaccgttacccgtccaatgaggggcgcagttctcctgacggcaccttaattcggtcattgattccaattccaaatgttgagaacactactctataccttgtgcatcatattatcaaagacaagaagtattcaccgtcaaaggtgcatcactcgttgtcacgcacatggctgtgtctcctgacgcatgcgtaggtgtctagttgagactcaacgagccgactattctactttctgacgtcccacgtgagccaggcagctcgggcctcattcgctccacacactcgcaatattataagctcctcaaagataatggtgagatcaag

SEQ ID NO: 14147 - DNA, 641 bp, Emericella nidulans
tggggtcatctcatgatggtcagcagttcgacgtgttaaggctctatactgcagcactttttgtgtgctcggcgccatagtccgcaccaggtgcaggggcgtggaacaggtcgacatattctgagagtgctggtgaatagccatttgggatcactagatactcagattcatgatgtgggtgtcacagcccgccgtgaagctggctgactcttactagcagcttataaaaatgctgtgcacgatccaggagctgattaacagcgagcccacctacaagtctgatgatgcctgatttcggggtgctggtacttatattccgataatgatgggttaatcagcctcggtgttgagtagctgtggatgggacatgtgtaattgtctaaacactcttgagaaagcatcctttcttccctgatcgactggttataacctgggcttggctggtgccgaaccctgtcttcttcatctaggtttgccttcctgaatgctcttgattaacacctaaacactcttatatttctggaacaaggcactctcgacgctttagcccaagctcattggatcttattgatgttgacgagtagccccctatcttgatgcgaattcactcaaaggaccctttgggggatatatccttcaaa

SEQ ID NO: 14148 - DNA, 496 bp, Emericella nidulans
ccctatatggctgaagtatagaacacacatgtttatgactggtcatttgtagaggatctatgtaatgaaaatgtttctaaatctttactgatatttgtctcttaagagcctattcttactatccggacatcacttaagattgttcaaggctatacaactaaaatttacttatggtaatatgctcaaaactaagaactacatatctaattgaattacttagacaggacctagtatacatactcgcactatttaaaataaatttacaacttaaaaatatttaagaatatatatttacctggtctattagatacatgaaagaatgttaatcttataaatattagtactgaatcatagattgtggaatctctctatttatgccaacatttttaatttagctacctaacattatgtataatatataaaattcttttatgaagaggatcctgcgcaagagaattttcaaaacaggatggcagggccagatcagcctggaagc

SEQ ID NO: 14149 - DNA, 1567 bp, Emericella nidulans
gcgactctggtgtccttggttactagttcttactctgtatgatactgtatcgtcggccagttacgattacggcgtacgacttcacatgtaagcctcgatgaaaacatgacgctgccaacccgaccaaagcatatgaagttaacgtcagatccaaagatcacaagagtatgattgtgactaaaacatgtgccagattactccgactccgatacctagggttctctaactctagcgactttagccatcccatgctccagataactgccgagggacaccgggctttatccgagggcggatgcactgccgatcatgctgggtacatagccggtggcggcaaatcctcatccgaacagtcagaatactgattaccgctgtataaactagattgtgatctagcactgtggcggtggatacaggaaacagtggcaatatattcctaactgggggcggattccattactcttttcatttccgagttaccccgaagaacccccgtctggggtccccagagtcaggagcatatattaccgtacagtggatacgcggaggagcttatgccgagaaatcgacacgagtcagacaccgtctcatcttcagctcaactcacgagtcttgcttctggtaatggtcgctgcatttaactcagcagctgaactcagtccaaagttcaactctggtttcggcgagaatcgacgggttaccagtactgaggaagtgatccgcgcctgccatttggatttagattcccgttaggactgcacccctcaatactgaatttggccattctggccagaccctggattctgaagtcctccataactctgagcctcgcttggacccatcttcccttgcagatacccagtgtggaatcggggaggcgcttccgcggtgaggagtcacatctgtacggtagcactgacctttttctctgtgtagatgtacgaaattcttacatatactcccagtcaatggacgccacagagttgatggactcgtcagtggcgtcgttcccgcatgaaagctgtaatctgcagaaggtagcaggaacagcactgtgccaccaagattagagaccaggacatccatccatccatttccgctggattcgtcacaccgtacgagtatttgtcaatcctgaacagcttgggtgtaaaccggactcggaaggtatactattgatttgtccgtcaaagtccgtctcatagcagagccggttaattgtatcctctggagtcagttggtagtcacgtgacaagccacaatgacgaaccgtaaaacccgattccggtagtttcaagctttctggggtccaagtaccgcgtccgcgaccagtatcaccgtcagataccgtggtgtagcagatgatttgcataatctacctgtcccttgcgttgagatcccggcggggaggaagacccgcctgcccggcgctggaagtatggatggccggacggatccaagctcagtacagctcagctccagcgccgcaggaagctgaagaatcaagaatctgggtagtttccagggtttgtgattgcgcggcggggttattcttcaagggtcgatt

SEQ ID NO: 14150 - DNA, 2346 bp, Emericella nidulans
agttggatagagggacatcatcctcgtggcagctgtgttcgcgagccttccgagcaagaagagtgcgtttcaggtactcaaaagttgacagatcaatggcggcatacggaaacattccaatgaggccaagaggcagaccacgaaagaatccgaaaatgccgtttttgttccatacctttcgggccgtcgccgctatgagttgatttcctttcagaccaccttcgacaacttcacattgcattcggctaacatagattagcacatgaaagtaccaaaagcaaaaacaggcacgtacaacttcaatgtatcaagaggatagacaaagcacctgtttcattgttagacggtcattttttagtgagtacctgaataactgcgtactgagcaaccattccgccaaatccgccagacagaaattgtgaagtgggttggagcctttttgggtcattgtgaccctcaaggcgagcgaaagcacgtttggcagactgcagcgtgtcagcacatgttatccacattgtaaatgctatatccacggggtaaactaacctcataagcgccaaatttaatggctgattcaggcatgactttgacaacattcaatccgttgccttcaccagtcagtttagttcttattgctatgaaaacctcacgtaccagcgaagagactgcgaatgcccccagctttccatagctcgttcaacgcatccatcagggatctcgaagccctcccggctgcttttaatggagccccatctttagcggcggtgacgacaggagatggcgatccggtcttcgcaatgagatacactttcagacggtccaatggcgcagtggctgtccttgatacggcgcctgcaataccaccagcaataaaataacctagttgaggagtattctcggtcaacttctgttcataatatcgaaaggacatccacatggcgacggtcctgggtatgggcaaccactccaattctaattcgccgtcacggactgggggacctctcgcaaaggcggactgcggggtttccgcatgggctgacgagagaagggctgtcaaaatatgtgctgggaaaaacttgtgcaaaaatgttctgatggccaaaatataatgtctaagaaacgagtggtctgtacctaaaccctgcagatcgttgatgtggacatctcctttccgggtttagatttcccgtggcactgtaatatgatagaacggcatgcaggtcggaggaggagtaaccggttaaaaagagaagaaagtccctgcatgacacgaataattagtaaataatcacaagcaacgcctagtggaatgcacttacctccactctggataagtgataacgccgtcctggttcgtatctacgtccgcgaagaactcatcgagtttagaatttgaaaccgtgacgccggacttggagaaagcggctttgagctcgcttttgtcgatttccccattctgattgcgatcaatacttttgaaaagttgccaaagctcctgctcagcgcgatcgacgaaggcccggaattctaggaataattaggttgatcaaatcaccagttggcggcaggtgctcgagtgtcgaggactcgtcacgatccgatgacgtgtgatcttaccagagtactctataatcccatccccgttggtgtctaccgaccggaagatagcctgcagcatagtatcggcattcttcagagctgaatggcggcacgaaagttagcaccaccattactgcgagtcaggtgccattaagagcacgggatggatgaggtcatggagcagctcacggtgatcgatcttccttaagcccttcttcaacccattgtagtccagatgctccttctttttcgcgccaaggcgcgaccagagcctggcgaccctttggtcgcattcggctttcgactcgccgccggccatgttcggttgatataagattattatcgggcttccgtcattattttgaacgaggggctcaagaacgcgcgaactgagtgtatccccggcgaagtaggggagttttggcgtatgaatagcaggggcatcgaatctgcggttgtaatgatagcagacgagttgctgatatcgcagattaacgttcaggcctgataatggccatgagaaatcaagcagcaatgatttgctttctgaataattgcgggcggaagaaagaaaattccgaaccagaactcttcaagagcaccgggccggtgatcggcttcactattccagtttagggaagcgtgtacttaggcctgttctcctctccagctccgttgaagaccattccatctacacgccatattgctgttatatatctattggcgtctgcaacaaaagtgattatg

SEQ ID NO: 14151 - DNA, 587 bp, Emericella nidulans
tgccggtttcctgacttcaccaccagggactatcaggcaccttaggttgacggtccctcgctaacatattctttgactgtagctatcgctggcgcggaaagcggactcttccctggagtcgtgtgctatctttgcatgtggtataagcgaaacgaacagcactaccgggtggcattatttttcagtgccgcgtcgcttgcaggtgccttaggcgggactcttgcttgggttagtactttcattaatctacagagcggtgtgcagcgtattaatgatttgcagggaattgcgcatatggatggtgtcggaggttatgctggttggcgctagatctatatcctatgtagcagcatatggcgatatgatacagattgcggtatgctaaccaggtgcaggaaggattgctcacggcagtaatgtctgtctgtgcatacctgaggacttacaactacccagctgaccgcgaattcttgacagataaggagcgatgctcgattacttttcgcctaaagcacgacaacgatgcgacacgcgaggagagatctcacgggcgctggtactgatgctttaaagaccccaagcttgct

SEQ ID NO: 14152 - DNA, 520 bp, Emericella nidulans
ccccgacccgaagtgcgggcgtacgatgttcagcagtgaccacagggtgatgcttgcccacagaaaccgagcttggctaggggagttttttggttgatagcgcgttgcctggcttgaatcgcagtgtagaaatacatgtcccgaatttggaaatgccctaggaactcctaggagcccatccgcagactaaagaccgtgagaaccgccgggcgtggctgagaaaggcactccggacaaacagctgcgtccgggacgggacagtgctggtcagacgggatattaacttgtgaccaacgcctagactgaggaagactgagtgcactgtacttgccgggtacgaagagaagaaaaagtgagcattagtctgtgtatatcctctagcgtgtactcgacagccaagacctatgccaaggactcgaagttgagcaccaatgacatgacagttttcattgcggtgggaaggggctatagaatgggaatgcttggtggaacacaagtgtgacaaaactgccctccccca

SEQ ID NO: 14153 - DNA, 1330 bp, Emericella nidulans
ccttcagggaatatgataaattaagtttgttgcgctagagctgctttggcaagaccggattaaggagaagcgcgaaacttagctcgatctgctttggaagacctccgtgtacacaacaggaatggtgtctgtttggatcatgggaccgctgttactctctgcgatatcgttgacagtttatgcattaacgagaggggagctttctccgtcagttgcctttacagccctgagcatctttagctcgttagagtcgtctctcgccagtctgcctgatttattctccaaggcgatggaggcaaagattagtgcggatcggatcgatacctacctgtcctcagcagaaaagatgtcgaacacttctgatgttgagagaatcaccttcaaagacgcaaccgttgcatggccatctgaggatgagaatgactgggagactgacactgaccgtttcgcccttcgccatttaacccttgagttccctgttaagggtctaagtatgattgttggtaagtctggctctggcaagagccttcttctcgcctcgatacttggcgaatgcgatatccttgcaggctcagtaaaggttccgcgtgcgccgcctccatcacaaaggtttgaccacctcgcgctgcgtgagaactggattatcgacacagctatcgcatacgtagctcagagcccatggatggaaaatgcgtcaatcaaggagaatatcttgttcggactgccgtatgatcggcagcgataccgccagaccatcttcgcatctgggctggagaaagatatgacgatgctcccggacggagatctaactgatataggtgcaaatgggataaatctgagtggcggccagagatggcgggtttcatttgctcgagctctatactctcgcgccggaatcctaatcatggatgacattttcagcgcgcttgacgcagaaacaggccggcatgtctatgaacacgccttaactggagaactaggccataacagaacaagaatcctggcgacgcaccatgttggcctctgtctcccgcgcacagactactgtgtcctcttggaaaacggcttcgtcacacacgcagggacagttgctgaactgaatgctaccggagagttaacgaacctcatgggtaaagccgaaatcagcagagaaagagccgagccacctcttcgagagttgccgaaaccgaaacgctcgtctgctgctagtactggacggcgttcgtcagcattcagtgcgcggacgataccgaagttaaaccaggaggagaagcgcgagactggtgcgatatcaatgaaggtgtagatttcgtatctgaatggggaggca

SEQ ID NO: 14154 - DNA, 438 bp, Emericella nidulans
cgcatgcagtcgatttgggtggcccctggttccgtggaacaggcccttgcatgtttttacagctcatcgttgtcttcgctgggcacagcagcttgggtagactgccctgaaagcccgctaatgcgatgtaatggcaaattctgatgagcctatgcctttccctagccctcagctcgagacccccatctcgttcactcacaccagcagccgttacccttctcctgatcccgagatgatgagttactgtcactactgggttacctattcacccagaccggctacggataatactgcttgtagactgatataatttatgcacgaatatgatgctgcgacctataaatgggtcctcttacctcagaactcatagggtgtcgttctttcacatggtcgtctgtgtaggagacctctatctcgctacatcaatccctctgttcg

SEQ ID NO: 14155 - DNA, 928 bp, Emericella nidulans
ttcactttgcggcatccttgtgccaaactatgatggaaccttctctgattctagcaaccagcagggagtattgagctggtgttagcgtagagctgagcatactccccgcctcatagtgtgagcgatgctctgggtcagcagtatagagtacatatcaaaagttgcttatagtgcagacgttgcagttgagccaagtcgtctgaagtagatatggcatgacgtcatcctgcacatataattgagctatggagtataccccggggaacaagctctgaactccggtcattattagcacgagatttgagcttaatgccgaactaaatagttgagatctagcctcgcataggacaatcgtaagaaacctcagcatgagaagaagtctgacgggatagttcttagtcggggcccgatttgttccgtgtaagaagccgagtcgggagctggagcgggagtcattgtcaatcaaccactcgtttctccaataacaacgaatacaatctcattactcaccccaattctccataattatacttatccctgaaaggcagcgtagagctgagcctcaattgacgaacagataccatgttcagcttaagcacacgccgctccgttgcgagtcattccaagtatctctgtgctgcaacgaccggcgcaaacgttcgatccccggcagtgaattcattatattatgcctcaactagagagtttcaatccactccatcacaagccgcgtttcggcccacctggatgcccatgcgcgtgaaaacgccatggattgaggctttgaataagagtcgggagcagccccagtcgggcgaggaggaggctcctcgagccaagccggatttgacgccaaagaggatggctgatagctattacagtgctgtcagtattcttacgcttcttcgttcgaagtgatgtggctgac

SEQ ID NO: 14156 - DNA, 1492 bp, Emericella nidulans
cgccaactcctcgcaagagacatttgcaaccgccttccagcatcgaatagaatactggtgtatcaacccagccacgactttgctcaagcactgctgctaacgggacgccacttttcattcgtttccgctgacaaggcgagctgcttcagtgactgggtttatatccattccagagcctcgcgccgtgccatccagtctcgtctgccgaaggacttcgacgccctcatcgactgtacgggtgaactacctgaaaacctcatagcctgtctctcgaggaactgcagggtgctcaatatgacgctccatcagctcgatggcagccttctgggccctgcatattctgccgctcttgcccatgtaagttcctcgagtattggaccgagcatccgagtcaaagacctaccccttgctacaccctccaagctgccgatggttgattggacaggggtcgacactgttgaattgacgcttcagccgcttagcatgagaaagctattctcatcaagcgccacttatctgcttgctggcatgacaggagaccttggtctttcgttaaaccgctggatgattgacaatggcgctcgaaatacttgcctgacgacccggaatccaaacgtcggcgaagtactgctgcaagacatgcgcaggagtggtgccgatattcgagttttccggaacgatttcaccgaccaaaatgctgttcgtactctggttgagaatatcagattgtcaatgccgccaattgccggagtcttcaatgcgtgcatggttctccgggatggactcttctctgaaatggacgttgataccctcaatgatccactcgcgcccaaggtcgacgggtctaagattctggacgacatcttccaggacgactctctcgacttattcgtcctcttctcttccttggcgagtatcattggcaatgctggccaatccaactaccacgctgcaaacatgttcctctctggtcttgccgccaaccgccgcaagaagggtctggcagcgtccgtcttacacatagggctagtcaccgatgtaggttatgttgctcgcaggggtcaagcaatggaggaacgactccgcaggctgttctttttgccattgtcggaatcagatatccatcatgcgatggcacaaactattctagctagtccgcataacagctcgcgtcacagcgaaattatcttgggtttagagccttttattgattcacccaacgcgactaagcggcccccttgggaacacaatcctatgttctcgcattacgtctcccggccattgcttcaagaaacgccggcggctacgacggtggaagctgcagcagacgtgaaacagctcttgaggtcgacggtctctggagaagcagtcatacctatcgtgcaagaggcattcgcaaggaaactcgaatcgatgatgcagctccctgccaatagtatcaatctgaacgtccccttattgacctgggatgtgactccttgctggccattga

SEQ ID NO: 14157 - DNA, 486 bp, Emericella nidulans
ttgctgtgttcagcagaccccccaggcccgtgatcccgccgaattgggcgactgcgtccgcagatttttctactcggcacactccatgcactcaccatgactagggctggcgaactcaaccatactcgcagacctccgtgctagcgagccatgtaagaggctcacacacccccggtcctgccagatgaatgcgtatgcccggctttgggcggacaggacacaacaacaggccacgtgcgctagtatttctatcacacttatcacgaagagagcgaggggtaaccacgtaacacagagcgaaaggatattgatgcaagatgcctacatcgtctataatgcgctgctatctccagacatgacaatggctgtataccgaatcgcctctagggcaatgagaccagtttcaggagacgagtaactccctagacagtaacgccctgcaggagcatcagagcctatgccatgatgatacgacgcaggcatacg

SEQ ID NO: 14158 - DNA, 545 bp, Emericella nidulans
tattccttttgggcagagccgccgctcctacagcgtcactggtggaggagccctgacttgctagacaacactttggtcgagctcaactgtctcagttaggtgggcgcccgcaactggactctgcaaagctgctgttagctcttccgaacctgctcctactgcaccaggctggttaggctccctgtaagcatcagcttaatcaaggtttttaccgtctaggtccttgtcggattcatcgctgacttcggactggcctattcaattaaagggggccctaccagtgttggacccatatgagttgacgtatgacgaatccaactgcttgcgttagttgccagctacagtgtatatacgcatctagcgtcactcggcgatatcagcgaaggtcatgagcatgggctagtgtggagcattgatacaggtgatggagttggatgaacgcatggacgagcagtgcccaggcgagttttctacacacgattcctactgatctgcgtacaggctaagtgtctctcgttactaatgcagcagcgcaagcctgtttg

SEQ ID NO: 14159 - DNA, 501 bp, Emericella nidulans
gaacagccagaatggagcgcgtgccaggctgagactgtctgggcagatgaccttatttactcgttacagatctggaggtccgcctgatacatatacatgactgaaccagagcaatagccctagaagtactaaggctagatatgcctatatctgtgccgacatatcgagcagattgagcccgagttaaactggaagtaaaagcataaagactgtgctcctgacgcccaggggccacaacacggagagctccagatatagtgatgacttatatacctgcagcaagagtcatctgttgaccaggacatatgcaatatgttctgatcgggggctgaatctaatactgtaccaccgagcacggcgaggacggaggaaagggcgcttgaactataaaacagctgctggctgcgacacgctcagagcttgtataattgcacaaacaggctcaatctgaaagcatgccatgcaagtatctgctcactgcatgtgaccagctagcagcga

SEQ ID NO: 14160 - DNA, 480 bp, Emericella nidulans
gcgctggtgcttgccggatatacactgggggtgccgggctcacacgccctcgctctgcatgctgaacggttcttacgcctgagctctggcacacggtatatccgggggaggctggggattaggtgctgctttcaagtggatgtccttatacatgccaccatcgcgactgccagcttggccgagcaaccattcactacatgcttgttgttgtcccttatggactgacactgtaagactactgggaacggccgctaggccctgctcatggcatgcctgacagtattatttatctcacatagactgccactgtagcttagtgttggaaccactttagtacgcactggcagctcgactaggctgtagaggaccgacccgggttatgagctctggctgaagccagaagctcctggctcagatatcccgagagttacacaacgcgtaggttcttaggcaattcatggaacagtctggtagaaccca

SEQ ID NO: 14161 - DNA, 516 bp, Emericella nidulans
ccgggtcgcatcatggagagagaggactacgccgctggacatttttgacaatcgcctagacagccgggcacggtgactacactattactagggactcctgcacggtcatcgcgtagaatggagagcccaacgaatcagcagactgtacatatggcttctatagcgactgaactggcgactgattttgtggacaagaagctcctcactttgagtgcgatggcggatctcataggaagacacaactggtggagcgcaggaagccatcaactcaatcgggcatattcaaacacggatattcagcacactgactcagacaccgcaacatcttccagaacacaatcacagtactacctgttacatagacgatggaggtcgggggctcgatgacgctgagcgaaagacacacctcgatgagtataatgcaccatgacacgacagtttctaaatcaggtacaagcgacgagcatgacgattgatgctgacaccctaggtgccgttcgtgcattcatagttcgc

SEQ ID NO: 14162 - DNA, 465 bp, Emericella nidulans
ggaaggaaccctgctggggacatgatttgcctgcgcagactattgtagaggcccttgtttctattatacaagaaactcgatggcggtatcatgcttagctggatcttcctcaaacggagtgcatatgactatacgaccaacaattctctggagaggacaaagaacacacatgcatatgatgagcgtgctctccaaagggaaggggaatataatggaaccgacactggcggactcagtgtaccatattggtattaatctcaggactgccatggctttgtactgagagagctgaacagatgcacaatggtggagcatagtacgtaggacagcagctgccattgcggaccgcatctcatactgccatgactatagtcaacgacctggctccagacaggaagctatacaggcgcggtcgactggtatgcaaccactagagagacatcagcacaatgtgacatgccatgc

SEQ ID NO: 14163 - DNA, 502 bp, Emericella nidulans
  unsure (1)..(502): unsure at all n locations
acggcacgccagagcacccaccaccacgggcacggtcaccagcctgagtccgaaccacaagggcgacacgccggaaccggaaaaaacacagacagcgacaaccacggcaccaacgcgaggaagacgcaaaacgaccggcacagccagggcagcagaccgcacaacgaggaaaaggccaagacggggaccgaaggcgnggcaaaggccaaggagcaacacgcgacccccaccagggaggaagagagaaaggccangcaagagcgagacgacagggccgaccagcaccaacgggacaccgccacgcagaagagcgacaccgcagagcaaggccgacaaaaacgaagaccacggccgagggggaccgaaggccnccagnggcacaaccgagacgcgagacgncaaagacaagggcaacaggggccaacccaagaacagaaacgcgcaagcggcacgcagagacaggacacccccagcccccaaaccggagcggggaaacaggaag

SEQ ID NO: 14164 - DNA, 2046 bp, Emericella nidulans
gtcctcagccatatgtcctctgtatgacttatttctaacgccctttcctaccattcagtctcatatatccgtattacgtatgctttaagttctgacacgtagccacaacgctttggtaatactttgcttagcagccactatgagcctctccacagagtttcttgcactcaaaaagcgagctttaagtcaatcccaggccgattctgctcagatcatgtcctacgagtgagctgtcaccttcttcccggcgtattacggtccgaggatttgtcggatctcagcttcccagtaatctcgcattcaaggttactcagaaccatcctgacgacgaaccatctaaaacaacggcgagagaggacgccatagcttacggccgattttttacaacagtggtcagtcggactccatgatatatgaaatcaagcctgatctaccgatcaaggactagcacctgcgataaataaatcctcgtttgtttcaggggcgtggattcgtccctacatcagctagatcaatataataatgcgagctttgatcattctttacagaataggtagtgagcttcttaggtactaatacttctgcatgattatgagtgattgtgttcaactcaatgagctaactacgctagacattttgacatattgacaagcctctaagcacttgtctctgccatggaaatttggtatattgcaacatattgtgcagagtttatatatctaaaattgctcaccacgatccactgtgagaatcagtaggcgaccgcaactatatataatcgtgtactacacaactctgcaagtgattagcgtatcaacaaccgccctggaaactcgcactcagtaagttggtccaagcaaaatcagcttaagaaaaccagattgaagcagagttaagactgtatactggcatggttcccgccatctgactgctaccatactgaagaacatcctgaactgctgttggaacccactaagaaaatattagaatgattcacagtctacaaagttctgattgaccattccttgcctaaaacgcaaagaatctaccaataggctggcatagtttaaaaaatggaaaccgtaagatgtccctgaatcctgtgctttgaggtgcacgaatacaatcctcaaacctcagcaaaacagactagagtcaacaacgttactgcagaacgtagacaaagaaataaactggcgccaatgcataactccgcagccacagccatagtatctattaaccggaatgtatggatttggcaagccgaagtcccgctttgcttacacactccttgcattcctccattatactcagttctcgaaaaccacagcctgcagagcttttttttttgtgagatggtttcgtttgataaagtacgtgtgagatatgtgacgggctgggtcccagcccaattcagtagaatcgccatattgctcctgataaggaaatagatgcctgttcattactgtctcacgaatatgttaacttgccaagctagcaatagtagcaataaaggacaatctcttaaaagactcggccactccgggactgatgcagcagcaggatacactgcctgaagcggacgacccgggtccaaccaaggctcagctggagccacgactttaggcgctggacgcctaaagatcttgggagtcggcaagagaccgaacctttgtgtcaatcggtttcgatactccccagagttgcactatcgtcgacggataggcgttagattgatgttgtgtcttgcgcctttgtgccgcttataccattccctctttgtggcggttccttatcgtaaggcgacttgtggcgcatcgacattgagcgccagacttggccttctgcacagcacttgtttacccctgaggtcgaaaatatggttctgttcaggcaaatccacagaagtcagaagactcgaccgttcgacgaggtttatgagggcccactggcgacagcgactgcaattgctcctgtcaaggtacagaggataagggagtcaaaccgatgctgtctgagacggagcattgaccagtttcaggatga

SEQ ID NO: 14165 - DNA, 530 bp, Emericella nidulans
ttatcgatactgcaccagcaacatataaagctactgaccttaggtgtgctggccccaaatttctgtttagtccagccagggcgtgcctctgggactattgacatgctgatcacactgtcgggccgacctcagaaatcaagggagcgttcgaacgtttaatgacatgacacattgatttagctccatcctatctacccattcgcaggacatttccgggtgtctacaagctagtaaatggccacttacctgtcatccgttcatgtacctggcactaccacgttaccttgccaaccctgaatatgttctatgaacaagactccctggacaactcagaactgaccccatgactatcattttgactaggaaaccaaaggcaatgtgcatctgctccccttgaaagcctgtcaccggacgctagttcatgaagacgccgctttagaagctgtacgcactctcatgcctgctgagatgaattacgagccactgcacttctcatgaagtgtctactgatatttctaatgatgtgcctg

SEQ ID NO: 14166 - DNA, 1047 bp, Emericella nidulans
aagctcctctacttaattttggctcctatataaaacaagcctagcccacaaagactatcccacatggttgtgccacagttccactgccagctcatcaattcgaaattcgaggctgatcatccattgtcgcgcttatttgaaccttgcgatcgtcctttaatgttcttgcagctcgcgtctgtgccacagccacagtgctgccgtccttgaccttcgaccttcgccttcggtgcaagtgctctctatttcacccttttttctctctcacaagctgagtagggcttgacaatgctctactgcacgagtgtttatagcaaggaccgataactgtttgtctttctgagcgcccctgcgttttcgagctttaaccgccctttattcccgccaagcttgggggtatattgaccctgatcctgcaactgcacttgacgtttttttatatccggctttgatgcctcgtgtagcaagtcgaccctcgtcttttcaggagggtaacgagagtctgctgatgaccgacttgaatcgcccagctgctcacgccagcaatggcaacggcagcacgcttcccatacatgatggccctgagcgacacaaattccgccgggaactctttcgagtgcatactgccgggcaaagtgggaggagcggagttcaccctctgctgttcttcaaggtctgcttcaggagcacctgtaccctctctatgatagtcaatgtcttgtggccttttgttcctgcggccgtcgccatacacttcgctcgaccggatctgcacgtgtggatattcgccctgaattacatcgcaatggtgccatctgcaaatctgcttggtttcgccggaggtgagcttgcgaagaagctccccaaggtgttcggcgtccttctcgaaaccacgctcagttcggtggtagaaattgtcctgttcatggtattgatccataacgaccaaggtggaaacctgatacccgtcatccaagctgccatcctagggtcgatactggcgaatctgcttctctgcctgggtctatgctttttcttcggaggtct

SEQ ID NO: 14167 - DNA, 588 bp, Emericella nidulans
  unsure (1)..(588): unsure at all n locations
gacagtgtaagcaaaccaacccagggaggcgcgccaccaacccacgaaccagggcgggccaactcccccgacacacaaaagcggcggaaacaccgaggcaccaccaacaaagcccggggcaacggcccacgnagagaacagacgagggagacccaccagcacagggaccaaaaccagcggacagaccggaaccacgagcgggcagggccgggcaccccgccaaggggcacagaggaccgcgcgaccaccaaaagggaccagaagcgaaaccggaagcaagcgccagaccaaagagaccagacgcagcaagacagaccccgacagagagacaaccaccaacaaagaaaagcancaagccagccaaaacaaacgccgaaacgcccagcgaccggcacgaagcggaacaagcggaagcaccagaaagcacagcacgaggaagaagcggcggacaccagaagaaaaccagaaccgacacgggaagaacccggagcccgcaagcagaaagcaggaacgggggcagcggcacaaagacacagccgcccgcagccaaaccagccaaaccagcaactgcaaccggaaccaaccacg

SEQ ID NO: 14168 - DNA, 603 bp, Emericella nidulans
  unsure (1)..(603): unsure at all n locations
ccccaggaggccacgtgcccagtgaatgcctgaccgagaaggcactgtttttcgcgccggccgcgtgacaggctggtggacgttaaccggacaattcctgaagaaggagtcgagcctgtaccatgcacaagggcgagcgactacccaagaggagacagatgctataagcgctaggagatactagagtactggtacggaggtcctaaagaccagcgatgatgttgagcggacgagtaccggctaatcgaagggtgtcggtggccaactatacatgacagtgagattgaggcctacccagattgtgctcttgctagacaattgacacccacagctgctggcagcagagaccatgtacaacgactctcacttgaggcacatccgaatagagaacatgaacgaccaactcatggcggaggatccatgataaaacgagcagagtgtcaacaccaataactagagcaatngtacaatgcaccaccagagtagtaattggggatcggacatggaaaccacccctcgtccctataaatgccggctcgagagcgcttactgggagcagtagaatcgagtgacagatgatgttgaggctgctgaatgtgacta

SEQ ID NO: 14169 - DNA, 2330 bp, Emericella nidulans
  unsure (1)..(2330): unsure at all n locations
ctcgcatataaaacaaacgggttgccggcgatcacatttgacctttcaatgacgccatggtaaacaagaggtgatgggacgagcgtatttcccaatgagggaagcggagatagacggagaggacgatgaggggagaagagaggtggagcttaacggggcatacatgatggacgccgttgaggcagtaacctagcttataagaacagtagtcgtcttcaataacctctcaccaacctgagagaggtggatttagcctggcactttttcattgttcaaagtgggtgggaatatatattatgaagaacagcaagtacgccgagagagcgcgacccaagcatggcgaatagctcgatattaaaagctctaactgcagtgaaggcagtagttacgaatacaccccttataaactaagccaccaaggtagttatcacttgtaaaagaagcaggtgcttggactgagacaccactgacccgccaggctaatctggcgaggcgcgctaacacttacaccagcgcacgcttgtttccttatatatagagaatgacaaggaaagcccattaccaccgcctcagtaggcgcgaactcctaattcccacagtcacattccactgcgcagctaggcggcttcggcctagatgattctcatccgcgctctttgccgctgaggctcggccaatctattaaacgacacactaagaaggtcagatgggcgaatgcccttgaccaaaacccatgcaatcacagcaaagaaacgtccgaagagtgttgggtcaccaagaggcaataagtgaaagctgttttcagcgccctgttaactgtgtcatcgaataatgggtattaagtccgctttcacttcatccaattcacctgaccaccagtcgtagcaagagagtcgcgaccgtatttcatttccacgtatcacagccggatagccactggtctgcccacatccactctttagaagcatgttttacacgagccttgaatatcatccactcgtccaaacttccctgatccgaatgagccgaacccaccgccgcctccagggccgccgccacctcctccccgacctcctgagccaccccaacgaggcctcgtattgtccttgttcccggccctggtcacattgaatgacgaatttcgggcagcctcgtacgggtcaagctgcaggacgaactgtcagcacgcaaattcgagcaaggcgcaagcaacgtggcggattaagaaaagcatgatgttcatcataccgcgaagaagctagtgaagtacagcccaaggaagatgtagatattctctatgaagcgtcttatctggacggacactggaggactgtggagagatgattagtgatcggcgatgacgggataaaacacggagtgtttaggtgcggctctgcttacgcttggagaacttgtccgttgtgcacatagacactaggttttgacgattctcttgatgccatgatgaatgcacatctgcagtcaggatggaaaagcgatgatggattgattgaacttggtgaagttggcagaacggaaaggccacgcttggcgttgatagcggcggggcccgtgattttccaattttggaacacttaggccggcacgagatcaaatacttcagaatacgcttagaaaaaaataaatgctcattcctagagatctaaagggtatcattctaacaataaccagtcaccatacatgctctcataaattcacgccgtttcgttcatcatcggtacctcgaccgtgctttgtaactcatccaatcctcggaatccctcttcaacaatccatttttgatcttccggtttatgcaggacgtggcagcttgctccaactacaagtaggccaggtggtcgtgagcccttgacttcaaaggcctgcaaacatgcttgagcgtaaaacgaatcacccgttggtcgctgcaggaagcacgttcaataatagcgcaagggttttccttggccacagtgtctgcgttgtggaggcggttaaagtttttgaggcggattatagaagtttatgaccccgaaggtatgtccccataggaaactcccgtgtgcggcctaagtggatgtaggcccacccttttttttggctgacacaaaactgtagtacccttggggtgagatttccacaagacttcaagctggtgccgaaaactgtagctattgaaatactttccttgccaaaggccttttggaacttgctttagtcatctggaatatttcctatattttaatcccaaacatttngtttcccccctctgtcataaaaatgttttatcgaatgtccccatcaatttccttttatttttcttctgtata

SEQ ID NO: 14170 - DNA, 525 bp, Emericella nidulans
gggtgtgacgccgctatgagcgatcggagggacccggtttccgacagagagactggtctcagggactggatatgtatttgacatacactattctctctgcaacttaacaaaggaaccaaccatatactgcgctcgggcgttagacaacggacaggagtctatgagggcacatggacccgcactggaggacacgatgaggtgattattgccactgttgacacctcagcgcaagatggctacatatggatgatggacatgtacgattaatgcatgggcaggttactgcgtcgcactctctctttctaggaaacagggcttgggatacaccaagatgactattactagatccacgacgggcatgctgcacggcatatatatcgaatctgactaacgcatgccgctgcgttgtgcacgctgtgctctggtctgaggactttcacagcagcatggactgaggcgaccgcctgtggatcggacccaagagtactgccagacctgatgagtgctgttagagggtgtctctat

SEQ ID NO: 14171 - DNA, 1762 bp, Emericella nidulans
ggcggcggtcatagacaaactgcccgcccagcgtgtttcactaacgcaggaaatcttgcaaggcgtacggttcttcttattctttggctgggagagcagctttctggaccgcctcaaagagattcgccaccacgagatccgttcgattcagacgctgctcgcggtgcgaaatggaatactgtgcgtgtcaatggcgatccctgtctttgcgtccatgctgtcctttatcacctatgccttgtcaaaccacgttctggaccctgccccgatcttttcgtctttggccctcttcaactcgctccggatgccactcaacctgcttccgctggtccttggccagattaccgacgcctggactgctctgaaccggatccaggagttcatcgtggcggaagagcagaaagaggacattgagcgcgatgagcacatgccggaagctgtcagaatggaccggctttcgtttacctgggagcgcaaggctgcggacaaagaggccgagaaggttgaaaagaaagccaatccacggcgaacagagccaaagagtgaagcccccacggattccgcagagagtgacgaaccttttcagttacgagacatgaccctggatatccgccgggatgagctcgtagcggttattggcaccgttggctctggaaagagctctctactagctgcgctagccggggatatgcgcctgactgacggcagcgtccggttgagcacgtcacgagcgttctgtccccaatatacatggattcaaaacacgagtctccgcgacaacatcctatttggcaaagactatgacgagaaatggtacgatcaggttatcgatgcatgcgcattgaagcccgatctggagatcctgcccaacggcgacgcaactgagattggcgaacggggaatcaccatctctgggggacagaagcagcggttgaatatcgctcgagccatctacttcaatgccgagcttgttctcctcgatgatcccctgtctgccgtcgatgcccatgtcgggcggcatatcatggacaaagccatttgcggcttgctcaaagggcgctgccgcattcttgccacgcatcagctccatgtactcagccggtgcgaccgcatcgtggtcatggacgacggccgcatacacgcagtcggcacattcgatgaactctctcgagacaacgacctcttcaaacagctcatgtcaacggcttcgcaagactccaaagaagatgaggaggaagccaccgaagtcgtcgaggaagaagctgaaaagcaggctcaacaggaacccactaaaccggcagcagctctaatgcaacaagaggaaaaagcaaccgattccgtcggctggactgtatggaaagcctacatacgcgcctcgggcagctacttcaacgccctcgccatcctcttcctcctcgcctttgccaacgtcgtcaatgtctggacaaatctctggctctcctactggacatccaaccactacccctccctctcaactggtcagtacatcggcatctacgccggactcggtgcgggctccgccctaaccatgttcatcttctcgacctacatgtcgactgccggcacgaatgcgagcaggcagatgttgcaacttgccatgacccgagtccttcgcgcacccatgtccttcttcgacacaacgccccttggccgcatcaccaatcgcttttctaaagacatcggcgtaatggacaacgagctctgcgatgcgatgcgaatgtacgcaatcaccatcacaatg

SEQ ID NO: 14172 - DNA, 2092 bp, Emericella nidulans
ggaaaaagcccttcggtaattcagtaagtaagaaaaattgaaaccacgccttggtcttttttctaaaaggcttaaaaaacggctgtaacaattagggggcaatgtcagcaacagaaacaggttgggtctgaagaggtttgaatgcgcagcctattcccggttccaaggatggattctttgctgtggtcccttccccgacagcgttatatggttacatcccgatccacaaagctccaaccagtacttaaaatcccaaaaacctccaaacgctaacgggctacatggcactgccagttgtttgtcgcaaccgttatatttcattcccaggaaagaaagacgagcctggatgaaaagagggtgccggaaaccgctcagacatcaaaccaatcaacataaacagtcccgacttcaaagcagttcagcgagtacagccaaaagtgtcttgttatcgactcgacatccttccccgggcgaagccggcatcctgtatccgtatcgtagcttgctctccagctcaaacacatctctccctgtgcggttgcactggatgaccatatgaaaggcgatgctgcatagtgttgtcgtctcgttcaccgagcctgtcggaatcgggtttcctccacccaggctgtcgaggatctcggatagattatcacctacagcgtcgggtcctgatacatcctgattctggatcacgttttctgacgtctcaatgaatccgagagtatcaggctgccgagaaaagccgaacggcgctgataaggcatggctgaagtcaagtccagtaaagctagaagcatttatagtgtcgagctgatttgcctcttgccttgcgccatcagacggctagagcgcaattctgggattagttactttctgagcaagtagaaggttagaagtgcgtacaattggcattgtcgattccgttccgaaaaactgcgtaaccgacgatagaacggccgctgaatcaaaggcagagtaagagtccacggaattctgcagctccagcccacgaacaccggtagcaccctggagataccactcgacggacgccctgtcgaaccctacagactccaacaactctttcaaggcacgattttcggcctctaggctcggtgctgggactagagctgctgcctcctcgagctcacggaccctttgctcaagttcaattactcgttgctttcttcgctctcgtgatctgcgctggttattgcgggccctggcgagatcctcggcctgcgatatgggttattacaatggtcatctcaaagccctgtgcgggctagactggcttaccttagtttttcgtttgggacgcggcatggtgctatttgtcttcgaaaactaaaactgattagacgatgaagggcacatgaagaaggaggggtagaggaatagttaaggatagttaactacggtagttactgtatagaattagtcagcacccagatgtgaagacaggctgctttgcatgtctctcacccaagacattgatgtgctaagatccttcattttcactgcggcacctacgatgaccgagatatgcatggcatgctgatctatttgccagagttgttaataaactgatttacttaaaatctccctagcttccttcaacctcctctcctcacgctcgctgaaccgatccccgaagatgtccttgtgtggcctcattagtatcgtatacttgacaaattcctccatacaatccaccagtcgatctctgttactgcttgccttgagccgctggtcgcccggttctccctcttctgggaaatgtgtatacgcttgcggtatggacgactggtttggtatggtgaacatgcgcatccagcgtcccagaatccgcagcgagttgactgcgttgaatgattgtgacccaccacagacctgcccaatagcaagggttcggccttgagttggacgaatgctccccgtgcttagtgggatccagtcgatttggatcttgaatactccagtctggtttgcgagactaagcggaaactcgatggtgattctgtcaacaaggggtaacgtaccagattcccgtgctgctctggagagatccaaacatgtccgtcgctccacg

SEQ ID NO: 14173 - DNA, 586 bp, Emericella nidulans
  unsure (1)..(586): unsure at all n locations
gggacgtggatagtatgaactaacactttttcttgcggaggacccttttccacggttggcacatgaaacttttgctctggcacatcgtacactcaaatatggggtacaacatgatttgtgcggacggctgtcagatagactttgacactgtgacacacgagcgtgctccgagaaagcgagggtatatgcctcactgtaccctgctattacgctggagggaatccggatgctgatattggcatgccctgagagcgaatgacaggatctaactggccacctgcaccacatattttctgatattgacatgggtggtgtttgacttaccgcgccccaggaggtgacattattcaaaccatactgactcaacttactactggcacacacctcgctcacaggacgcctcatgactagcttggtcaccacagtcggctgaataatgactggagtgggacgactgcctaaggacgacggaaaaggagatgctggcctctaagcaatgctcctactagatattnggagggtaagatcgccatactcgatacggcatttgaaattgcttgttcatagtgctaacttacttaggatg

SEQ ID NO: 14174 - DNA, 1737 bp, Emericella nidulans
taagtttggccatggccgcagggctgacgaacaatgggatagagctgtcaactccaagaatctttgatttggtatccacactccgaacattccttaacactcgaggtcggaaccagatacggtcaaagcatgacttgtttgcatcacgcgtaatgagatccgttgctgcactagaatagaatgcccacgtcttcttactggcagttctcgaggccacatactcgaaatcatgggaatttatcagtgtttcgagcggcggcttgtcgttttcccatactcgttcaggattttcactcgctggttgtttatgccagctttcatctatcgtcgcctcgtcaagcttgcctttgtactgctccggtgccaattctgcctttagaagccccggggtgtgaacttcggagtacgccttagtggcatcgcgacccgcatacttcaatataactaatgagttgatcagtcaaagcactcagctaatctcgtcttttgatctcacttgtggggcctccaggatgtgtagccaggaagttggtaacatcccacacatgattgtcgaccacgatccaacaatcatctggtttgttgtgcccagatatctcctgcgtagatacgagcttcccttgcgccatattgcatgtaggcgtgagtacccacgctgcgagtatcgttcaattcgaagacgcaaattcctattatccaaccagaccgaacaagctgcgctacttgcgatgccccaatccctgcaggaatacgttgagggaagactgaagttatacgagttagtgttcgggctaggtgcgtccgaagaaccctttgacctccgcacttctcagcgatattgcggagaaatgttagcaggcccacaaagcagcgggaataactccgcaaaacgggatgatttcattcgctatgagacggagttcacaacagacatcacggacagtttccgattttgactgttcctatactctaaaaggtgaaaaattgtctctagagggcaatctccccctcagtagctgttcggcataatgtcgtaaatactttctaggctggttcaaaataccgcaggaaacacaaacggccaatcacagcgacataggtgtcaaagctccgcggcttgatgttaggtaggctcctccgtatattctctcaattctcggccgagtcgggtacgggaccctttggctgatagctgtaaaatggtgtcaactgccttgaagggagcaggaaagagaggatcggatacctaaccgccgataattgctttctgggtaggacagcaccagccacactgacagtggctggtgactgccaagacccagacacaactggcgacgttcagcctctgatgtttcttcagtctaagagcactgcatagacagtcatcgcataggctaccaaatgaatggaggcttctgtgtaggtggcacttttaagaagctaggtaatatcaataaaacttgtcttttcctccactctattaaaggaaatatattgcgccgtcgcacaccggttcttctttgccggagtcaaggtacgtgattactttaggagtgctaatcggcgtgccctattactctcgcttatctcccgttctgtactgtgaactataatactcacggctgcgcagttttcctcggaacctgtactgagtctcgaccttcgctgctcttttgcaaattgcccaagtgaaaaaggccgtgcgtattcatcggcatctgtcccattgtcggaatg

SEQ ID NO: 14175 - DNA, 849 bp, Emericella nidulans
caggtaacggtctcgcccgagaacaggcattttatcccaagatataggtatctcatccgttaagtttcggcgaacccatgtcaaggcacgaatcagaatgtcgtggtgcgcatctcccatagtgaaattgactacctttctcatttttgccctagcttggatatgttcgcggatgatagggtggcggaaagtgacgaagccgtctcgcactgtaaccagccgtctaagaggctcgaatacgtcccgctctatattcccgtgccatgtcgacagcttgtgggtctgtgtgtccacacagagcaattgctcgacttcatggggccgcagcggacgttctgcaaccgtaagccaagcaaggaggctatgagtgccgggtctctggagattggtgtggcgcagatgcaggtcaatgagccctcccagattgttggggatctcgctaactgctgactgcatatcactgtaagtgtgctgagcgcgtacctcttcaacagccagctgcgcccatataaagcagccctggcatcgagatgcaattgcaactatcaatggctgacgctgtgatgtactcagcccgacgaatgcgggatcataggtcaccatgtcgtggatagaagccgtcaaatcgttctcggtaatagatgcgtccatagcaacctggtgcgtcgtcgtagtttcgcgtataggaatctgttctttgttcattggacgggtaaaaattatcagtttagacggcgtatcagcgacagtagcttgtagaagctcaagaaaagctccaacgttactcgtggcgttttttatctgatccatgccgtcaaccacgatcatgaaatgtagattagattgtgc

SEQ ID NO: 14176 - DNA, 1284 bp, Emericella nidulans
gccgtcctcaggatctgaactctcaggattggagttctcttcaggatctgaaccctcctcaggagccgagctctcaggatccgaaccctcaggatccgaaccctcaggatccgaactcccctcgtgctccgagccatgatgggcatgcatggctccaatgacacccaaccctcccagcgcggcaccaccaagagcaccagctccgacctttccaagagtccctacccctgaaagtctcgtaggatcgccctgtgacccatgctgttgcacgtggggaacaggagctcctggaccgtgatgatgggtaggaccatggccatgaccatgaaagggtgcgtggaaaaggccttgactctggccatgaacaggatgctgcgtatttgcatgcccattcccaagcccgccaccaccaaaaagcatatgaggttgctgtggcctgtgcggctgttggggcagaaaagttctacctgtaggccggtatcctgtactacccgctagaggacgctgaggcacactcactgaggtctggctggggcccgggcgatacggcttatactgtccgcttacccctggtgaggtattatgcattgcacccgccgaggcaccagaagatcgatctgactggctagaactgaatagtttgcggaagagcccgggtttttcccgagggactgggcccacctgtcggtccagacttggagggtgcaagggacttggtcctgaggtgcgttttcctggggagatgatatgcattcgggcagacgcgaggagcttttgtgggttttgcggcttggaaggcttcgaaagctccttgggcttttgggatggcgactgcccccgaaccctttgttagcaaaagcctggactgtgtggctgattggaagatccagggcttcgcttgtgtgtgggcaagagccctggtggcttcgagtggaccggtgcccgaatttggacccttttaacttttgattatggggctgcggtattttttttttttttggaaaggcgcggttggattagggctgaacccggtgggaagggccggcttcaatataatgaagacaccggtttaggtcgaagtcgccttgtctcggtttttttggttacgggcggaaccttttttttctttggggggaaaaaaaaaaaagaaaaccctcctgtcccatagaaacccccttggtttttattttggaaaaaactcccccctcaaattggggggtaacgttttctctttttttttttgtaaaagtgatacctttatatatatattatttgaaacttatt

SEQ ID NO: 14177 - DNA, 612 bp, Emericella nidulans
cattgtagggtttgactgcaggcgcaggacagacgacattgcaggaggcataaggagatgagaagggctagcgttgtcagagcctcggatgccagaaccgaccggaggtggcatgtgcactagtgagactctaacacaggcggatcctgtaaccaatatcagaacgtggaggaaccatccacaaatgagcactgtccaacatgcatggtggtgaggactatcctaaacctaaaccgctagatgacgggctgctatcgcacgggcacacgaggggacacaagaggctgcacgcaggcgaccagagcgagcggctgcactatatggcaacggagggagggaacccgaccgcgagactgaggcacaggctaatacttagaatatacaacctgacagactcgcttagcctcctgaagacgcagaaacgtggataagagaggtctggagccggcagccatgacaaatgggagccgcatgatagtagggggaagacatgagcagacctgacgaccagcgcagaggacatgcaccacctgcagacaggatgacgcgacggggctatagaacagatacctcgcacccatgatggagagacacgatgacatcgtgtgtctc

SEQ ID NO: 14178 - DNA, 618 bp, Emericella nidulans
ggccggcgccccgcctgcgacgacatgcaacgaacctgggggctgggggggatatctttcctggatttgccaccggccaccaggacggggacaatctttaacaacggtgcacaagcccgggtaaagacctgcatctcgtgctcgggcggcactgacgcacaggctgggtgatagcgagtgcacagaaagcgagggatggaggatgagctccagatcgccaactcatgcaagcacagaggctgttctccaagcacagagcgcacaaggcactccaccaatgccagattctccggcacgcactgacaatgggacgaacatatggcgacgcacgctgtcagacattgggcctatgggaaccgatcgaccctagacgggtgataggaccatacctaccatagctgacactgggacacggaggagggtgggcaagcacggcatgaccgatagcgaagacaggtacatgaacactaatgttgaatgaccgacgtgctgaagcgctggtagcaagcttgtatcgattgactgcagactgcaggtatggatacataagcgaccgagcatctaggctctatgaagacggaagcatctctatcgcggctatttgtgccagtaatatga

SEQ ID NO: 14179 - DNA, 1862 bp, Emericella nidulans
ggccggaatattgacctcgctcaggccactgagcttatggggccaacaattgccactgttcccatccgcatcagcattgacacatcgatgtcaatagaggatttccttgccgctgtccagaaccaagcgacagcagccattccatatgagcatttggggctgcagaatattagcaagatcagccctgcgtgcaaagccgcatgcgactttcagaacctgtttgtcgttcagccagcggtgatcagtgattccacaatcctcggtatgaagcgcgtagaaattccaaccaagggattgcacacctacgctctaaacgtcgagtgtatcctcaccgaggaaggaacggcgacactgaactttgaatacgacggtaaggtcatgcaggattatcaaattcagaggcttgctggccagttccatcacgttgtctgtcagctgtgcgagaatgaagacggccggttgaaggtcggtgatgttgacgccttcagtctggacgatgagaagcaacttcgtcagtggaatgcgagattgaaatcattccccgaaatcaccaggtgcgcgcatgatcttgtttctgaacgagctcgccttcatccggatttattagctgttacgcagtcggatgggacgagtttgacatacgacgagcttgaggagttgtctaccttgtttgctcgtcacctgtctactctcaaaattggaccaggcaggattgtgcctatttgtctgaagaaggccgtctgggtcgtggtaagcatactaggagtcctcaagactggtgcagcgtttgtctgcttggacccttcctctccctcaagccgcatgcatagcataatcgaagaggtggagtcagagatcgtcattgtcgacccagaaactaagcctatatttaacaaccatcttcaaacgctggagataggagcgaagtctctcgactggattcgcagtgcgaatgccagcgacatgatcttcgaggtccacagaaacccgcgcgatctgatgtacgtgatctttacgtccggaagtaccggtaagcccaagggcgtcatgatcgagcatgcctctgcctgttcatcatttacctatcaaggccaagagtttggctacgaccatgaatcacgagtgcttcagttcagcgccttgacattcgacgcctcgctcatggagatcttcaccacgctctgcgcaggcggttgcgtgtgtttccctaccgaagaggaaaagcaaggagacattgtacgcgctatcaacaacttacgcgtgaactcggtcatgctcacacccactgtactccgcatgatccagccagaggatattcccatggtcaagcatgtggtgacggggggcgaagccgtgagccatgatatcgtgcaaacatggagtagcaaggttatcctcaagggcgtctacggccctacagaaacctctatgatttgtatcacggcagaccttgttcccggtagttctccagcaaatattggtgttcccctgggctgccgcagctggatcacactccctgacgaccacaaccatctggcacctatcgggtctgttggtgaactgctcatccaaggacctattgtcgggcgcgggtattacaagaaccaaaaacagacacaggatgtgtttattgagaatcctctctggctgcagaaacggtttggcgagactggcggcggccggctctacaagactggagatttggtctactacgcgcaaaacggtgacctcatgatcgtgggtagaaaggactcccaggtcaaactccacgggcaacgcattgaactgggagaaattgaccacaagatgtggtctcatcctgccgtcagacagtcgtcggtcgtgctgcccagtcaaggccc

SEQ ID NO: 14180 - DNA, 1830 bp, Emericella nidulans
aggaagttagttgcaaaaccgagcaccgggcattccgtttggacatgatgttttactatggtgccacttatgttctactgttgacagcattagcacagagaagcgataatttcccatatccctatattgtgaagcacccaagcactgagaaaatgtcataaataggcacaaagctgctgtaactaaccgcgttgggcagagagcgaagccggtgttttcagatacatggaactaccgtcggctctcctgtttagggtaaggcctcaacaaccgcagcctccatacaggagcaacaactcactcacaactagcttgcggagttatattcgctcaggggttgctacctattggctgtatcctggctctaggcctcgtgcgtagggttttttttccactcatacaggggaaaaggacttcaaccctggtggaacaccctaggagtctaccaacatagcacatccacttgcctgtctctccttatggcccagcagtcgaattcccaggaggagtgaggtgcaactcacccggtacagctactactcagtaaatcctcgagttgagaatcagacgcagacgtgtaattgctgcacggctcgaataagcagcagccccctcccgtcaaagaactgttgatttgccttggttacggaacaacactcacatctatcccatatttagtctacaaccctcgcaagcctcccgcggacgtatgcccgagcactcatccgatgcattcgcgctggtcgcatgcgagcagcttttccgtcaagatagcccaactgttccgagggagagctgtgtcgcaaattggcttttctgcggaggtaatctctgcagtaagttctgcggaacttgtccgtgaaagacgatttaagcgcatttagatctcattgtccagctgcggatgctgctgctcgatcatgaccgggataactcagagggaggttccgctgctcagacagaaggaggcgctgcacagagctggcaagactgattgggacgccatcaggctacctgttacaaggattcaagcacgcccaccagcagttatgaaagtagtaggatttagatgatacctgcgtgttcgagagtgcgtgccgtcgatgtggtcaacgtttgctcaactcatgacgcaagatatgatgctcaaggtagtgtgtgaaccgaaatgagagggcgaattcatcatccatgaaccggaggtggcagtgacctttacgctggacaccagcacgcccgcgaattatatgacctaccagacttgatgagtcccagtctacttccttggtaaaagggtcgaaatctgtggttgcggcgctgggaggggcagagttacaagactcctctgcggaccgcactaatcttggtccatatgttcccaacgacttttcgtaggatgctcccctccgcaacccttccagtgcaataaatatgatgcataataggtaaggactcgactcgacttacctcggccaggtgttatcattgactgaagacataagctggcgcatatcgagataggaagggagcccatatatttaaggaagtgatcgtgcaggataagctcttttcgtgtctttaagcagggtccgaaacgaagctctgacaagcctgggagacgtgagaaagcagaagcctgcacatgtacggactgcggccaggtccttccaggaacttgaaacggctttctcttcccacactaagtgtattttcccaaaagatactgacttctcaccgcatttgactactctttgtaagacgcaagcagtgattgcagaaatagggccgaaagcttgatgtctgactatgaacactcgctacagtggtagc

SEQ ID NO: 14181 - DNA, 1362 bp, Emericella nidulans
cttgaaagaaccggccgaaatcgtagaattctcgcccgttcctgttcaaaagttcacggcgaaggcgtcgcgtcgcagatgagaaatgtgcctactatcccagacgcaaggcgcagggtcacagcacagctttcctcggcggtatgttccgggttctggcgcatgcgctgcaggagtgtaccctccgcgtagaccctactgacgggcccaaacagaaactgcagcacgtcgatatcgtggataagattaatccccagcacgccgcccttcttcttatctgcgcgccaagaaccgagcggcggcgcgaagtaagaggccggcttcagaagtgtccagaggccgttcactgcaacgacggtgccgagtgagtctgtctctaacaaagactttgtggtttggatgtacggattgaagcggcggtggtggccgatctggatgttgatcttcgcatccttgcctctcttctcatctttacatttctgttccttgacggtagcgaggaggtgctcggccgactccagatcgtcactgatcggtttctcaaggaggatattgcggattccgttctccagcagctggagcgtgacgtccacgtgcgtgtgattgggcgtgctcacgatcgccgcgtctggtttcccggttgtcttaccgacaacgtctaacatagacgtaatagaatcatagcaaggaacgccaaatgattctgcgaccgggattgcagagggtgaagggtcaacaaaagcgatcagctgggttcgtgggtgtcgttgcacggattgtgcgtgacggggcccaataagtccggcaccgacgatgacaatgaggatattcttgtccttttccttgctgcagggcaccattgtgcatgtcggtggctggaaataaacagaacagggatatggtcaagtcggagaatcggtgcaggatagaccggctacttgatgtaggacgacagtcgcgatctaccgagagcgtgagattcactgtgggactgatttatgtaatttgaggcgcagcagacttagggacttgaaatgtggctgtctgtggatgcatttgcggggtatggagtacagagtgcatacagctgtgtatatggagttccttacggagagggtgacctggtatggggagaacgggcaaaatgctcacccggcaacctctcaaagcgtttacccggtatactcctctgatatcaatatttccaatcagcacctatatcatcacgacgctctcctgaggattccgtagctaaccgccctggatcctacattaataaataagccatttgctttttctgctgcgagtgtgattccaatacgattacgtacacatgcagattcctttactcagctgcatttg

SEQ ID NO: 14182 - DNA, 495 bp, Emericella nidulans
acccccaggcagaacccccctaccttaaggtgttaggtccccaagatttgctcctgaccaaccaggggaaccccgaggaagggttcaattgcgggggggcgccggggaccaacccaagaaagcaaagggacgagaaaacggcaaacgacatggcagacggaggcagcacgagccaatcaacacagccagaggacagggccaggatccgccaacccaagaacagggggctcaccaagaggacggacagaaacaggacagggacaggttaccgtgcaaacacagcagctagcaccaggagcagcgctaggggccgatcgacaaaggcccacacgaaaagcacttacacaagacaccaaaggagctgaccaagaggaccaccggtgaaaccccgacaccgaaggctagggaacaaagacgaccgccatcaaaaaacagaacaagaccggtgagggccggagagaggatgcacactccgtcactgaagcacaagggcag

SEQ ID NO: 14183 - DNA, 751 bp, Emericella nidulans
cacacaccagcgacacgcagcataaacaccgcggaaaatacacacaacacaactaaccacacaagaaaccacgaggcaagacaacacaactacacaaccacaaacaaaaaaggagggaggccgcggactacccaagtatgcagcacaacccggggggggctgaccgcacaagacgcgatcgcaatcgcccacaccgttatgacacgcgacaggacaaacacataaaggggggaacaagcgcaggcccgggcacgacggccgccctcataatgcacgctgcgggaaagaaaaaggggaaggggaagaagcaagcagggcgcaggacaaaccgggcagcaggcaaggacccaaacacggatgaggcaagcgcagaaccgcacgaactgagagaggcaccaactggcgaacaggcaagccacaacccggaagaggaacgaccgccaagataacgaacaaggccgcggcccagagaagggacgggggcacgccaggagccgaccaacgcaacaaacggcaaaagggaggaaacaaactgacaggaaccccgggaagacgacgcgactgcagggagagaccacgcacgatctcgcaatggcggggaaggacagaacccaaaaccacgaagaaaaccaaggaaagccactagcaaggggcaccaatagagacgaggctgacaggcggcgaagacgcaccggaaggagtccaaagaaaacaagccaggggaggagacaccgaacgccaagcgcgggcg

SEQ ID NO: 14184 - DNA, 1779 bp, Emericella nidulans
ggaagaggacccgatcatgctcggtcagcagatagctgcttggaactttctcccacccgcaatatgtgcatttcccaacccacccctcagcaggttggcacttgagtaacggatggtatatggtggcgacatctttgtcaacatcgtggaataagaggttgtctggatcgcgacattgtgcctcgccgttctatgtgcaccgttggtataatagagtgctcccaaaagtgaaatgcggcctacctcgacattcatatccagcatcgtcatctcaggatgcggcgcgccaacgggtaaaatcccgccagcaataaagacaaacctctcgacaccgccgccgctcttcatcgaaacttcctcacccacctccaggccctccgttgccatccctgacaagaagcgccggcgctgtgacctacaagcacgagtcgttttcctgcctcgacaagtggcctaatgacctcgcggattccaattgcgtcgtcgtacatggttgggttgccgggctgcgcattcctgtagatacaagcggagcgtagacaaagtctgttagaccaggcgcggccttttgcatttcgttgacaaggagttcgtaaggttgaaggccaagccagaagcccgggactatgacaactgtcggggccatttattcttttttcttatatattcttttatttttctaaagctggttgtttctggagggaagcagtggtagaacaagttataacaggttctgacaataaaagacttcagagatcctgaacgaatagattcctttcctactatgcggcagggctgagtgctgactttacctgcagctcgtggatgacagctcagctgaaactttcgcttcaaagcctaaaccaacaaagctaacttcaatcgtatgctcttataatcgagttagtgtgcttattctgccgttatactggtgcgctgttttttgatcggtggcttagagtattgcgcctgaggctgctgactcgagcgagctatacgggacgaagcagccctgagacatatcccacaatgagtacagatgcatccttcacgcttttgccaatgaaataaagactcaagcactggaaggccagactcatatcttcaataatctggtgaatagtccgtggattaatgttcaatgccactcaacatgttggatcagttactatctccacgcatgagcggagcctggagcttctcagtgatggcgtgttaggttccagcgtgacgaattgggtaagccctgagtgttgcaagctttcaattggtcttcaaccagcttcaattcaagttaatcagtgcttgattgttcccaaatcccgtgggagtccaaggtcaacattgcgcaactctttgccctattatatcttcagcgcatcctattatatcttcagcgcagcagaatgtgatttctcccctgtactactcttacaatcgttgacccgtttcgcaggttgactgaaagcagtaattacagaaagaaaactgcagtcattggtttatctctggtaggtatatcatgttcatagatgggaaaacgcaaaggaaactcatttaaccctaaaagctggcccatgcataactcagcatcgatcctggtctgttccacgaatccaaattagctgttctttgctgatcaaacgaagcttcaacaccaagttcagtctcagtccgacgagaccgacaagagacacgatcccctgacggccattattttatgtgagatgaccaaactcacagttttcgcactgctggatgcacaacagctttctcgct

SEQ ID NO: 14185 - DNA, 550 bp, Emericella nidulans
tccagtaactaaaaggaacggcagacagaaacccacagacctaagaagggatgtcaccaaactttggtccggaccagccaggaagagccacagggacgggagacacgcaggggggccaaggggaccgaccaaagacaacaaagagacgaaagaacgccaaaagacacgagaaacccaggcagcaacatccaaccaacacaggcacaggacagaggggggggcagacaaccgaagaactcgggactggcccaagggggatccggaaacagggccgggccatctgacccaccaaaccaagaataaggccaaagaacacgcgtcacagcacaacggggaacaggcgccaagactgagaacccgaaaagagaacaaacgcgaaggggcacaagacccaaggggaagcagggacaccgaaggcgcgagaaaaaaggccaccggcgacaagaaagggaacaacacaaaacatgccgcgcggaagctgaatcaacagaacagaccccgcacttagcgcgagcgaggaaggccgccactgaagacccaatgaacacac

SEQ ID NO: 14186 - DNA, 1768 bp, Emericella nidulans
atagggttctccatgtgtgaaagccagtgctgacacgatagctgggcaggcaaccactacaacgatctcgccgtattagtacgttgacatcgcccagtcaaaccacgagccgggatcgcttcaactatcgtcccagcatgggttctagcgcgtttctcatgcgaattaaccaatatcgaacgtgtctctacagtctcaaatgccgccgcagacagagtggtcatctgcagggtcctcgaccacaccacagaacaaacctatacgatacagacgaaatacctctttggcgcagatggagcgcggacgtacgtcgcacgcgcgctcgacttcaagttcattacgaagctcagcgggaaaagggcatgcaatgtgttcttccgcgcggatttggaccatatcgtccagcacaacaatagcaggagaggaagccgcgtcgcagggctgcactgcattctccagcctgaccggtccatatttccaggtgtcgtggcgcatctccgggtcgtccgcccctcgacagaatgggccctcgtctgcttcgggccagaggggagaaacccgctagatggaatgacggtgaacaacagtccggagcttgtcaagctcctgcacgcgctgattggcgacggctctgtcgatattgaaatcctcgcattccacccgtggacggtacgcgagagcgttgctgaagagtatcgctatcctcgcgagaacatcttactcggcgacgcagcgcaccgccacccaccggcctttggcctcggcctcaacaccgcattccaagacgcgtacactctcgcgtggaaagtcgcgtatgtctccgaaggcctcgcaggccctgaactgctcggttcatacagtgcggagcggtaacccgttggcgcggtcctcgtgcgcgagtcgaataatgggattcaagtacatgcgcgcatgtgggaggccctaggcatgtcagctagcactggagacgagggcgcgaggcagcttgcacggattgccgaggcgagtcctgagggtgcggcgagccgcctgaagatccatgaggcactaggagagactgaagtcgagttgcagagtctgggaattgcctacaatcaacggtatgatgcatcagaggaaattgctggcccaacaccaaagaatggcagtagcgatcatggtgatatgaggaccactgctagaccaccgctcgtagggaacccaataacaaccacccagatcagcacgttcccgggtagccggctgccacacgcccgactggacatcatgacggggcgcaaggtgatttccacgcattatctggcgagtaaagcgtcgttctgtgttttcttcggcgttggcggggagccgtggcgggaggctgtggtggacataggccattcgacgggcagccgaatcaacgcgtatggtatcggctatgcactggattatgcaaacatttatcgggaatggcaggtaggcgcggtgtcgaagaggatggctgcgttctgatccggccgaattggttcctggcttggaggactgcgagacccagcttcgggcggttcttgaccgcatcttgcgccgagaccactatgaatattttcctttctggtaagtgatacgtctctcatgcaatattgtgcctgggcctgaaccttcctagctgactcaggctggctgattcagcagcgctagggttctcctaatattggttgagctgagctagaaggtatgatctaaaagttagaggccgcacatgagacactgcgatgatacctaattttcc

SEQ ID NO: 14187 - DNA, 646 bp, Emericella nidulans
caactacacagaacgcccaggacacaagaaagccccaccgaccaagcaagaagaaaccccaaccttctttcaaacccaacaaccgagaccacaccaaaggaaaccctaccaggcccgacacgaccgcccacggagaaaaaaccccacagaaacacaccaggaaacacaacacacccgagccagacacgagccccacccgccggcaacaacggacaaaccggcaacggcccacacccaacacgcgaagccaagcgggccacagcccaacgggccaaagccagcgccagaccatgcaccccacagaccagaaccaggaccgggacgcggagacaaccactaccaagagccccacccacccgacggacacgcacagacacggcacgcaacagcacaagccaaacacgcacacaaccagccatcatgacacaagaatacagcagtcaacaacaaacgaatgcctgaaccgcaacaatcaaaaccaagcacgcgccatgacaaccatacccaagagaccgagcacgccaaaagacaagaatctgcccgacaaccaaaccccgcccaaaagaacggtaatgacactacagaaaccaaacgaacccaaaagacccaaaggggtacgggcccaagaaactggcacacagaaaaa

SEQ ID NO: 14188 - DNA, 3016 bp, Emericella nidulans
tgtcactgttggaattgcgattcgtttcggcgtggagtgtcaggagtgcaagcacgccgaatgcgtctgtccagaggtagcgccctttgtgaccgccggacttttgcggcggtacccaggttgacggatcggctagtgaggagggggagaggggcccgtagagggtcgagagggccgaggtgaaggtttggaagatctgtgactgcgactgtgactgcatgattgtgggcgtggtcgagatggagtgttgctgctgggagagtgctttacgactcggacgaatgctggatctgtggagctggagacccagaaacttacaggtggtgactaggcgaatctgatgcatcgcttactgttggatacccctgctgtcacagtatgagccagtgatgcttggccaaccagctgagtgagctggttgatgtggtgatgaagtcatgatgacagcccgctgtcattcttcccacctccaaccctaactttatacaacaatgcacaccaactatccgcctttacctggagaataaacgcatgagcgagtgcaccacaaagaatgaaatgaacaacctgcgcaatctttacaatactctcaagcatccatttccaaccgcactctcaacgaagccaaaatcgaaccccaatgctagcaccatgtccgacctaaccgccctcttccgcaccaccattcgccccctccccgcgatccacgatccatccttcgccctccccttcgactcatacgcccagaaccgtcttgtccttttaggtgacggctcccacgggacttccgagttctacgccgcccgcgcagagatcaccaagcggctgatcacgcaccataacttcaccatgctcgcgctggaagcagactggcccgacacggaggcgctggatcgctacgtccgccaacgaccaggtcacagaggtaagatcggggagacaaagggcgacgccgattatgaagacgagggcgaggcattcgagcgatttccaacgtggatgtggcggaacaaggagatgcaagatctcgtcgagtggatacgggatcataacgcctctttacctgctgagaagaaagtgggaatttacgggatggatctttactcgctcgggagctccatgaaagcaattatctcctatctggataaagttgatccggctatggcgaaggaagcccgaaggcgctacggctgtctgaatccgtacacggaggagccgcaggaatacggactcgacgccctacgcggcttcaaagactgcgagaagggtgtcgtggcgatgcttcgcgacttgcttgaaagacgcctcaagtacgcagcacatccgggcgacggggaggagttcacagcagcgagcaaaacgcgtacgttgttcgcgatgcggagaggtactacaaggccatgtactacagcagtgcgggaagctggacgctgcgcgatagccatatggttgacacgctaaaacggctgattaagcataagcctgatgggaaggtcgtggtgtgggcgcataactctcactgtggcgatgcgaggcacacggctatggggactcggcggagggaggtgaatatcggccagctatgccgagaggtctttggcgagcagaacgtggcgctaatcggctgtggaacgcatacggggactgtcgctgcggcgagcgagtggggtgaagacatgcagatcatggatgtgaagccgagtagtcgtgactcgtgggaacggattgcgcatgatacgggggttgaatcctttctcctggatctgcgagaggacagaatgtctagggaggtcagggaggcactggcgaaggaacatcgacggttgcagcggtttatcggcgtgatctatcggccggacacagaacggatctctcattattctgcggcagatctggtcaatcaattcgatgggtatgtctggtttgatacgacgagcgctgtgaggccgctggaggttgttcagccgaagacagcattgggggatgaggagacgtacccgtttggattgtgattcgtccctgttccgtattcgtgtgtatgtgtatataaaagtacccgtttattgggatattcaatgagcgaaccgaaagtcaagcctcttgctccctgtctcggggctgttcctgatatagtcttctcgttcctagtacagtgtatcagcattcgcagactagaattgaggaagactagggcagaatgggtaaaaggatacctcctcgctcatgcctttccagatagtgtccctctctttgtttcgtctgagatagtagagttttgtcgcgatgaagaggataatccccagtaggttcaaccccaggagcacagaatacccgcgtttatacagcggcgcatcgttttcgcggaagatattatttccaataatgctgcccatctggacgcacactgtactccatatcagcaagctcccaggtcataatagagcaaaagaaaagggtgggatagtactgttataaacagccgccgacaccgtcctcgtccccacattattcgagttcttgctcgtccagccgaccaggatcgcatggcagtatgggtatgagagcaggattgtcatggccgcatacgtgccccatgggtcgatcattgcatttgaccagaagagcaggatgagcaggcaggggaggacccaaagggattggaggcttgagactagggcgcgctcattgagccgttcagagagatgcgttaggaggtttaggaggaggatatgtgtgatattgtaagggataatgaggaggtttgtgctgaactgccatattttccatcagtagcctttcgaatgctgggagtgctgggggcagtacagtgtcaaaccctacactctttagcgtgagggttatataggtccgaattggaaccatgggtgtgtaaacgataagacccaggagatatattggccagagatcgtagtcgcgcagcgagtcccagagcgccgagagggttattgcttgtctgttatgcatatcgcctattcatgttagccctgcctgtttg

SEQ ID NO: 14189 - DNA, 1676 bp, Emericella nidulans
cgccccctgcgggtgcacaccctagcactctagtccacggtaccacagatgcttgcggttactattaagcaaacaaactctgtctctggcagaactatgtgcactctctggagtctgtaaaagacttgcgccctctttccaccgtctagacagtgcattatcgaccaccgcagctcttcatcatgcagcatcagtctcgcaacattgcggctatctcatacttgagaatcctgttgttgaactgcctctgtgtctttttatcaaggccactcggctgggatgatttctttttgtttttccccatctctcggcaagggacatttgcgtagcatattatcatggacactttcacattgtatacttatccaagaaatcttacaagtcttccgcagtcaagggcagttttctgtttatccttcgttggggtcgcggtctgtcacgccaaggcatgcatacggccgacatcgacatcagcaacctcgaatcaccgaatccaagcgcgagcaaaaatacagtcatcgttccagatccccaggttatctctgattttcttcaaaaatacgacaggaaagatctcagttatgatctttcaaatccggcaaacgggggcagtctgtcggtccgcaatctcagctgagcccccagctgggcccgactcgccaaggtagacctctctatcatggtggccttacaccgactggcggagtccccaaaacaaacggcaccagcgagaaacaaatttttggagtttcaggaagccagatctcttcgcgcaggttgacggacgctgacgatgactatgctggcaaaaccgcagcgttcaatgctcttgtcgatcgttggcaggctgtcttcctgatctgggtcttcgggatgtccagctggcctgtaagaagattgatactttcaccatagtttgaattcttatcccgacttggtatacgcatgtcaatccaacccgagatttctgattgttacagaaagctcaggatgctaatcccttttagagtcggaagtgagccagccacagccaactcatgtagacgaactcaaactccctaggcatgcgtttagaatcagctgtgtcaccattccagccttccgcaagcctacggctcccctctcaaaagccaaatcactgagacacctcgaactgccgctgtggcaaatgcgagtcaaagcagatacctatttgccttaagcaaatgccagacgtcgctgtttttagagaggtgccgccagagaacgtggcttgagcgaagagaatgactgggcgacaaaggaatgcgggttcagaagacgacggaggttagtgtcggtgagtggtagtaggggattcgtccaaggtagacaacaatcggtgacccgcccatttcttcttttatttattttcttttttaatttcttgaaactgggtccgtttcaagtcttgaggtctgaatgggcggcaacatgggggttccgtgcgaacaaaaggaagtcaaaccagtctgtctgccgaacacaagagctcccaatcagccgcagggccagcaccttttgaaaaagaaggtatctgtttatagtgggtaagcagaggcgtggtactaataacaaatcagctttgaaggctttgacaggtcatgttcatcctggaacagcgctcagatgctagcggatttgagaaatcaagcgcg

SEQ ID NO: 14190 - DNA, 656 bp, Emericella nidulans
attgtaatcgtcagccagatccagctggtcacacctgtacttgtgtgcacagctgtttctctgcctgtcaacacgacatcacataacgacgcgatatatgttgcacccattatagatccactctcacctgtatcggtcattgggacctgaatcgaggacagcatctattgcgtggagagcggatccacctcctaacctgcagacttccactatccccccctacaaacgggtctacatggattggagcctaccctgtccttagggtctcaagaatgcgtcgatcgggtcttgctgactggtacctctctttgtaccgtacaccaacgaagtcatgctcgctcacttaaaaaccatacaagcattccagatgcatcgcaagatggatggtataattcggccttgacatgacaagccatactcttggcgagacagcatcctaattcgaaggctttaggacgtgatgcacatcttgtcacgagacatgtactttattgcccagaccagtacacaatatgaaacacgactgatatctgacctggttttcgaccatcctgttcttgaggcaggagttgcatgcatacgtatcatccaacagtgcccagagacgactagcaggtttgaatcagggcaataacaaaagggggcttctggaaatt

SEQ ID NO: 14191 - DNA, 768 bp, Emericella nidulans
  unsure (1)..(768): unsure at all n locations
cacacaaagactacacacgggtcttcccctcacacactcactccaccctaaatgacgacaaaaaaaaccaaatcacaccaacccccaacacacccctngggaggaccgacgacgcacggaattgtcgacgaaaaccccgcggggggacagggagcgctcacgcacacttcataaccgaccaatttttttcgcccccagcagacgcaggagcgcgggggggttgacaaacaaattcggggcgagcacaacagccaagcgctgcccaacgaagccaggccacggtaccaccaacacaccccggttgacaaccccaacggacggcagaacaacagacccggagcatcaggtagacgccggcaagaagggcacgggagaggagacgaacgaacaaagacgggccgaggaacgcgccaaaaatgcaataacagaagacagccgccaagagaaaaaccccaacaaaaacaccagaaaccaggaaaaaagataccggaaagcgcggccccaccccacaccgaaaggaggaacaaagagggggcccatccaacccctcaaaaggcagagagaggaaaacgaacatgcgggccacgaaggacaggccccccagactaaaaacacagaaaaagagcccagcccccaccagcagctgcaaggggcgccgccgcaaagccccatcacgggaactacccaaccgaaggagacccgacttcccgccgaccccggcccccatagaaaaaagggaaccggcaccgcgccccaacacaagctgac

SEQ ID NO: 14192 - DNA, 595 bp, Emericella nidulans
  unsure (1)..(595): unsure at all n locations
ctgtccgggacgtgctgcttgctgggggagaggcagtgcgaggtgttaccaaggcggtatatgatgccgctgtagacgcggcgaggaagaactttgctgactctattggcgctccaaagattcctaatgtcagctgggaagacgttggcggattgacgaacgtcaaggatgctctagttgagaccattcagttacctttggagcggcccgaactgtttgcaaagggcatgaagaagaggagtggtatcttgttctacggtcctcctggcactggaaaaacccttctcgccaaggccatcgccacggaattctccttgaacttcttctctgtcaaggggccggaactgctcaacatgtacattggtgaatctgaggcgaatgtccgacgcgttttccagcgggcgcgcgatgcacgcccttgtgttgtcttcttcgatgaactcgactctgttgctcctaaacgagggaatcaaggcgacagtggcggtgtcatggatcgaatcgtcagtcagcttcttgcacagctcgacngtatgaacngcggataggagaacagctgcngcgtgtttgtcattggtgccaccaaccgacctga

SEQ ID NO: 14193 - DNA, 960 bp, Emericella nidulans
tccgcatgtcttctgcgcgttaaaggcgccattgggatcaaatgtcacctcaatttattcgaactctactcttaatagacaagtatttggaaaaagcaaaccttgcctctcgcttgcgcagggttggctgctgttcaggagaattgcctgtgattgcagacttgtagaggcgtctcattggtcagcaaatccccgagggcaagaatgccaagacctcatgattcgagatcgcaactgtttccgccccaattaggcaggtacgtcgctggcaaaatgtcatatcgggtcagatgtctccgggccagattgatactcgatagaaagtatcgagctgggcaaccgacgaggggaacaccagataaccgccagataacaccagataacactagataaacaccagctcgggacatataatttcatcctcggcccatgaacaggcattgaactccctcaatcgtcgagttccatgcatattctacggctgctctagctgccagcgcctcccaacgcatgagcactgcagtgatcctaacttgttttccaagtccctcgtgattacggagtattctaattctattagcagcatgtcgcgactatgaaagctaacagcacatgcgcctaacccctatccatgctagtctcaccgtctagcgtccccttcccgagccacgggccagattaatttcatgctaaccgctcccagcatagtggcttacggtcttgaaacctcgttcggttttctgtcatacacttttgataccgcctcgctctcccggcgataagggtgtaagggtgggcaaaaataaaatacgcagtaccgcgcgatgcacaaggccaacttaggatgcaagatggagtcgactcctccttcggccggattgacctcgtccagtcccaccctcgctacgccgtacggtgcggcttttccgaggtcttactcttggattgcgattctcatcg

SEQ ID NO: 14194 - DNA, 1869 bp, Emericella nidulans
  unsure (1)..(1869): unsure at all n locations
cctaccctgctagcaactgagacttgcatctgttttaactgatgggttaaggagtttggtaattgctgttggcgctgggtctcggtcaagtctcggtgtctgtgctgtgcagcatctggactagccagcgcaggatatggagaaggctgttgggtgtggcattgcttttccctctgttccttgtcctccacgaccctggctaatattggctattattgacgctcgtatgtgctcactctgagacactgcggcatggcatctttcgctcctgtccggttcttggtagaagctcggatccaaagtacggagtaccgacaaaaagtcgagtcatgctctctatcgtagatagcgatacagtttcaactcccacccccttatacgaatgaaggatcggatgatgggtcggatgacggacaaacggctggcaataatagccgacgtctgcagagtactaaagtaatgactctagtaagtgaggatctagcctatccgcgaatagtgaatcgcaacgagactgtattaccggagccattgccagcggctttctcctgaactgcctcacattctggaatcggaacggaatccagacggaggcccagatatccggtcctggcacgaaggaggatgacccctggagatgacggactgcaatgacgattaatgacgatctgctgaccaattatttatgtgaattatgaatcaggcggtgatcaggcggtgctactctgcatatgcccgctgtgttgtacaaagacagggacaaagaaaaacaaacaacgagagcgttcctatggtgccgaatagccgccttgggtagtattttaggtagacgggcactggacactgtcactggacactgtctggcagcccaatgcgaagtcatagtgatctcacagtagtgaacagagtcatcgaaagcgaggctgaaggtgattctccgccaaaagatcctgaacgctagatcagcgagtttatccagttcacccatccaaccaattgcgattcggatgaaccaggagacgaatcggagagacgggttatcccatgttggctcatcgaagctcgggtctgagcttttgttgctaaaattcttggccaattggagtcgggacggcaggacggcacgggttgattcgtctggaggttggggttgagattggagatgcggttggggtgcagtgagtctgagacatgctgcaggccaagactgcgggacaagggtctggcttcgatcgtacaatgtgattgatggatcaactcatagtatggtggcaacttgatgagaaaagatgggaaggaaaggaaacggaaagaggaaggaggataaatgaggaggaggaagagagagaggcctttccttactccctcatagtttcccaactactctacacactttctattccctcacattccctttatttatattatttacaacccattcattgatttataatccaccctcttttactcacttttccattctctcctttattcttacattcttgctaactccttctttttatcctctcaatcacctttctttcctctactctttatctactccaattatttcttcctcttctccttctccatatagctcctaatctcacaataaatactctactactctctttctccctttacctcaactttatttctctcaccctttttgtacaattcattttcctcttacttctcttctctcacactctcacccttctattctttattattttatctccttgcttnctacttcctacccttaacttactttaatccttattcctttattattctctatacaatacttcacatttctatcactattacccttccttattcatcttctctcttaatatctattcattt

SEQ ID NO: 14195 - DNA, 555 bp, Emericella nidulans
agatctgctttacggataccggccttctcgacacagatgaatgttatccctcctgttcagaaagccatttttttctgatccgtgtttgaggaggcttgaggacggccaatatggcacgagatgcgtagcaccacacgtcgaagcagggggcgagtaccattggtgatgctagagcgctactatgggattgacattgtatgtatacagacactcgcatttgactgggtcacagtgaaactgacgattcggtatgggcagggctacattggggatggctacacacatcgggcactggtacacctgaaccaaatcaaatatctgctgagggcgatcgattaccacctggtgggacggcaatttcagctttaaagagctcactgtgaacatgcactgagacacactgtggacgccagacaggaatactaccatgtttgtctggcccttggctgagatgacagggaaagactgcagttccttgcgggcgctattgcgtgcgctggccttgccacaggaggttcaaacagatcccaagctgtataacatgatcctagatga

SEQ ID NO: 14196 - DNA, 542 bp, Emericella nidulans
gacaaccccacggaagccttcggcccacctttcttgacccgttcttgtgcaagatttggtctctaccagacgtggccaagaaaccgagagcccttgctccaccagagcagccgaacccgactcaagcggaccccatacatccggggtggtctgcgcaacacacatgacatcgggcaattgcacagttgtgcccactgcgcaagaaggaatcaccccagtgcaagcgacccgaccaacaaagacaaggaggaagtggcaaatccatgaagacacgcaagctggggggctacggtgcccactcttaggaagcgcggatttacaccagacaccataacccgggtgaactgcgccgaaccacggaaagcaacacaacttgccaattgacattccgtaaacttcatacaggcaatatgcaagcccatctaccggcacagtgtctcacttgcttaatgctcatgctccgacatgaagggaccaaaacccgccctgataaagaagattacagggtccacttcctggatgaagtcgacttaaccgccgat

SEQ ID NO: 14197 - DNA, 635 bp, Emericella nidulans
gcaattacttcacgggcacccgcacgcgcaacaaccaaatcgtgtggtctgcacttacgcaccagttagttcgctgacaaaagcgggaaacggaaccgggggcctaggaccgtgcatgttgtggcacaccacctcggacgcccccttccaccatggagactgctcaggccgctggtgcccatggagcgcccggcctgaccggtgctgagcgccagcacgcatcggaatgcgaaccagtgaccgtaacattcactgcagggcaatggttctccgacaacccaccgaaagagcaagacacccgaccggaagagatcgccgcgcaacgctacatgagagagaagctcaatggggaactctattagagagcggaacatgtcctgactcaagagagagctcgtaataaatgaggcagagaacacgagcatggatccccgcaggccaggtgaccaagcggggacatccctcgaaccagatcacatatggccgtgtttgtactggtccaagcataccacaagctagcgtcttttactgatggcatccgaaatacaaagatgcacatgtcctcccacacggggggagcctgcagaaacctgtttcactgacagacactgcagacagggggtaaacctgagatg

SEQ ID NO: 14198 - DNA, 541 bp, Emericella nidulans
tgtgtgtgcactgaaacggcatgtgctggatgagggtgtacatgtcaggtccatgacggactgattttgctaccgcatgctgccgtgagcctttgggcacacgtggaattggctgcgcatggacatactgagcatgtgttgctgatcttgaacatcaggacaggtatattactcatgcgtccaactataggagagtactcacgctagtgtagacaaatgccatatagcggtaacagtgagggacgtacttaacaacatcgtactattagacactccgctcatacagtagggaaaattataaaagaaatgaacacgaaggatcatggtagggaagaactcttggaggtggatcacccactcgaggacacctcaccgcactggccacataactgaagttttaggcactcgcctatgcaagggacacatctcagatagccaccctagagaccaactgagctgatcagccatgtcttacatatcgctcaacgccaacatttaacatgcccacaggaatgtcgagacacaccatgcactgagtaca

SEQ ID NO: 14199 - DNA, 490 bp, Emericella nidulans
cactcgtaaggccctcgacctggtgcaccggagtcaccctcgctctggatacagtctctatgctatggcctccggcgctgactatcgaacagggcacctctcccgtgtggccttgtgaacgccgttaacagagtgtccaaagagatcgccctgagatgacagctggccacggtcgagcacgtataaaactggatccatctccggagtgtcagagccttaccaactcctggactccatgcgggatgcttccaatacctaacccacctcatgatgatatgagcctggctagcggctgtcaaggagaaagtacacaagatcatgcgtaacctgtgcaataccaaactgtatgccagccacattgagccttgtagatatcaatacaccgcaagctcgtcactgctccctcgagcactgccaacattgaacgcatgagtgatctcatgaagagtcgcggatatactacaagctacgataagctgtcattgcatta

SEQ ID NO: 14200 - DNA, 1153 bp, Emericella nidulans
aaagcgacacgttcagcaacggcgacaggttcctcagtcttgggctcttcggaagcgacttcctttgctgtttcagcgacttcggtttcagcaacttcgtcgacagtggtcgattcctctaccttggccttctccgttgcggcttccgcttcgacagcaggctcgacggttgtggtctccacagatttaacagcgtcagtagcggttgccacctcttcacctttgagatcccctgcagcttctcttacgggctcatcagcctcaggggcgacagcaggctcttccaccttgctctcctctgcagcctctttctgagcctcaatgggctcagcgggtgcagcggtttcttcagcctcgggatcctcagccactgcttccttaactggctcctctgcggcttcttctgccttgggctcctcagtagatgcttccgtaaccggctcctccgcagcttctttctgagcctcaatcggctcagtgggtgcagcggtttcttcagccttgggctcctcagtcactgcttccttaactggctcctctgcggcttcttctgccttgggctcctcagtagatgcttccgtaaccggctcctccgcagcttctttctgagcctcaatgggctcagtgggtgcagcggtttcttcagccttgggctcctcagtcactgcttccttaactggctcctctgcggcttctttctgggcctcagtggagtcggttggtgccgcggtttcttctgccttgggctcctcagtcactgcttccttagctggctcctcggcggcgacggcctctggaaaaggagtttcggaggccgatttctcgactgcggcttcctgggtcagctgctcagcagcgccctcagtagaaggttgttcttcggtggccttgggggctttttccacggcatcgaccggaggtgtctcggtcgagacttcttcggccctgctttttttaaagggtcctattagcagcttagcctcacgtggcttttggttttggctccccggccttccgtgaagaattccgagatcgcggttgttgtaatccaggttcttgcggtttgcctccgagttggttcgggttccggtgttctcccgggtttggccattttttcccttccggtgcttgtttctgaatgtcgggatctaac

SEQ ID NO: 14201 - DNA, 1465 bp, Emericella nidulans
aaatcagtgattgtagccattgcgagttggagaagatgcacggtaagcttgcagaccggcagcttccagccgagattagggtttgaaaatcttaagaggggcaaatctctatgtattaagtgaggatcatcatcaagctttggatgatgtatttgtgttttggttgttaaccctactgtaggtgtcatttcgggaggtggatggccagaaataaagcataaggtccagcggcaaaatatatcttcgagaaatatagggcatcgctgtagacttgtcaaagggcttgttaggatacgtcgtctagaatattgccaataggttttcaatagtttgtcatacgctgatagtcccagggaacaacagaaactatatatctgaatacatgaacaatactgactgtctaactacattgagtaggtctcaagagcgttagttaggttcatttcgcggctatgcgagatcctgaaaagaaaatatagaaggtgaacaatacgcgctgcaactcatgaggtatatacggatacgcaaggtattaaatcctctagtattagcgagcttataaacttttcgccgacagtctatccacatgcccgatctaatccgtccatctcgtcatcacgatgcgtggctgcagcttgatccagtacacagcatctcgtatgaaatgggttcatcaagaaacagataaaatgagtatcgttttactgccgtagcttcatggattggagaaaaaaggtataatagagtaacccgacaaaattgagtaattcatggcgattatcgtctcactgactgagaagggtggattattcgacgggccgcctactgcttgtcggcatccgcgttttcgggggcggcttcgccctggttaggagcgtccttcatttcagcgtcggggttctctgctttcttagcctcttcggcggccttcttggcctcctcctcggccttgcgcttagcctcttcctcagcacgcttcttcgcagcttcctcttcctgggccttcagaatagcctggcgctcggcctcgagcttctcgcggtggcgctggatgatgggaccggcaacgaagcggatctcatcaagcttagccacataaacggacttggtagcatcttcaccatcctcgtacaaccagtcctacgttggaaaagttagttacagttgcataaacgcctttcttcaagcaaacatacctctaaatcggtcagcttagatcgcagcttatccttctcctcctcgctagcgaactcgggcgtagacgccatcgatcttatcacgcagctcgtagatggtaccctcgagctcgttcttcttctcgtcagtctcggcgaccagcttgtcctccatgtacatggagttctcgcgctcttgccatgtgtccttgagagattgctcaagctgagcagtaccgctggagagggaaggagtccgccttgcggacctgcttcttgacctgcgggtc

SEQ ID NO: 14202 - DNA, 1054 bp, Emericella nidulans
gtgagttttgctatttatgagagtgttatgcagtgaacttgctcgttgcgttctcctggcgttcaggtgttctgaagcaggctttttgggaggcactaagtctttgcgcattatagccttcgggcccttcaagtgtacttggtagcgtccagacttgacagtaatcaataagtatacgccgaaggcacaaagggactaaacaagcaatgcgaatgaccaacggtcaagagataagagggtgtgttgttcatagttccaacgcttaacaccagtagcatctgttaaacagcgataagctagtagaagctgtacttcagccccaacagaaagcatcgacaaaccgagacagcggctctgggttcttttgcaagaaggcacactcggacagttgtaggttgttacgtgacattgctgctgtacaaatttgcggaggaattggataatcatgcgggtatttgtttgacgatattcaaagtacaggcgtgtctatgaaggcggaaaatgggtcccagccccaatctccatgaagatattctgcaagaaaggtctccatcattgaatctaccggtgttgttgcgatctcgtcaggataccgttggtcccaggggaatgagtgtgcgggcgaaatgggatctgctagttgtctagggtcatcggccctgcatagcgtgccattagagtcccatccaggctcgtcgttaaggagaggatctattgagttcactcccgtagtcctttgacttttcaaacgctgttgctgagattcggacgacgagctatcaccgcgtaagcgactcagtcgcttgatggtcaggtcaactatcctgtcaaaattgtctctcccattgcgcaccgaagtccaccactgccctccaatactaagaagattcgaacacactcgaaggtcgcgcagtgcgtccgcaaaagggatgatcagctgtaattcaggcgaagcccagaggcagtatataatggttgctccagacgagaaaatacggtgaatatttcgccagttgtagtaaacctttcttcgttaatcaggtgattggatatg

SEQ ID NO: 14203 - DNA, 619 bp, Emericella nidulans
ggattaattagaagatcatgctctgccacctcccgctctaagctactgtgcatttaccgcgatcctgtttttaacctgggccttgaacagtgcggagggatttgcctgaggtggatgcaagaggctccacgaaagaggggtgctctttctcaggattcgatcagccgaaagccagtggacctcttcggctgggagtcgactcactgaaataggttcataagacggagtgatacctatcactgaaccgctaacgcaagcttccatagcgttattgccaaccggctcatctagtgcctgcgcctgttccatgtctcaaccaggatagctcgtatatgctgaatcaacgtaccttagtgtaacccgcacgatattaccggctggaaccctccatgacgtcaatgacccatgtgcagaggaactggcccttcgcatttcacccaccatccagagagcgtgattgcaaaagctcccctaaactgatgtgatgatcaccggggaatccgataattttgtcacaatgccgaaccaagcctgagccggatgcacagtattgtgcctaggagaactgcacgtaaggacatcagttacatggcctaacatgctttacgagatgccggcc

SEQ ID NO: 14204 - DNA, 477 bp, Emericella nidulans
tccgcccgatctgaagcgggtcctcgcctcgtttccctttccagcggatatcgtcaagaacccttgcacttcgtctcgatcacatccagtacatccagtattacccccccgaggtaaggattgaagggctcctgatctggttccagctcagggcagggtactgagcttccacaagcgtcaggacccaccactgatatagttctgctctcctggttcttccacagagccgggcggaaagggcagattggaacatagtcgatctggcagacgcccctccttttcactcgccctcgtccgcggccgccgacctccctaacgcgttcatcccatccgacccgaacctctcccgttcaaacgccggttcgcccgtcgacagtattccgtccttaccacagcgagacacttcttagcaaggacccgccgttccgggtcttgccgagcgtttcaatagaggtttaccccgtttgcgttgttcac

SEQ ID NO: 14205 - DNA, 709 bp, Emericella nidulans
gatcccgatgtccaccatcgtccatgccaaccaggcagatgccaccgctgctatggctcaaggccagagtatcgcaaacagcatctcagtcggcacctctttcactgccacggttgagaaattcctacagatcggcacaactatcaactaccagtggactgagaccgccacgctaaccggcacggttacgatgacaattccgaagaataaatggggcgcgatcgttagcaacccgctgaccttccgcaagagcgggtatgtttttagcggacaacctggaagcgcgcactatgagtacttccacgccgattctttcactcaagatacctattcctacggccagaactcactgtcctgggtcaagggtgtggttacaacttgcctgggtgactcctacccgctgaagcgctgccttggcgaaggtgaattgaaatagatggctttcggtggatgtgagagccggtttcgttgtctgattatctggaatctgaagcttgattatggatgttaggtgacgagatacatgtgcattttctccagctgcctattgaagaagaatatgcggacttaagtactctttgaccatcacgttagcaaagacctgatgatatgaaattcttgggacttgacttgcttcatacaaaacgttataaactgtaatgggcccagcgctctcccacttatctctactgcaattgcgttgcaagat

SEQ ID NO: 14206 - DNA, 467 bp, Emericella nidulans
cactcaagctttgataagtaggggggtttccattgtaagcattagctgttgaattctaccaaaattgttagctacaccatcttaacgaaggcactagctgacttcattttaatgaatgcggataacatagctgagccgttcctgggtcccatgtactattcctcttggaacgctcagtccgtaaccccaggccgcggtagctccttagagaagctgctggactccatctggcgttgcatccttcgcttcacactcggaccatagggcgcgacagctctgtaagaaagtaattcaccttgtgctggttttgtgctcccaccttgaaggagattacgactctcggcggctcaacacggttggtgaagttgacatgaggattgcgagttggaaggaacggtctggacgtatcgggcgtgatcacggatgacagatgctaatcaagatggtctatcgtagttgtcataatc

SEQ ID NO: 14207 - DNA, 1629 bp, Emericella nidulans
aagttgtacacgcgaatcttcctctcaacgtccacagcaatcaggcgccggccgtcgggtgtgattgcacaatcgtaaactcggaagccgccgtgccacatatccaaactctcgccgcgcatgttccagtggcatagctgggagttcacgtcgaagaaggctgtgacgaacgattcgccgtcaggagcccaaacggctgcggtcactggctcttggtgtttgttgatagtgaggagacatcttccggtctgtcttggtcagcttcgataacgtgaatagatcaagcttggagcatacctctgtgctccaaacacgagctgttgaatcacgagagcaagtgatcaacttggtatcatctgggctccaaacagcatgggcgaccccgtttttgtgttctcctaggatataaagcacagagaaggtgcttgtgtcgtaaatgattacattactgtcccggcccgccgtgaccaatttcgtaccgtcgtgggaaaattgacaatgccagacctcatcggtatgtttattgagctccagtttcgtgccaagaggaaaatcatcccggtcgcacatgtgatccgagtagagagatggagactgcgcggtattatgatataagcactggtttatctggttttgcttgacgtgatccaataacgtggccagtcggttatctggaatcatcaccgacggcgatatcgattctggttcgattagtctggtattcgctaggtgtagtcaacacaacttacttgacaactcagatagcaatctttccctcgagaagctgacgggtccgtcccagctggcttggtcatgaagatgttccggaggacacataagtaaactggggtactgttagtgacggtagccaatgcaaaaccaatctgcttacctggaaagagcgtgcaaacgtccaacatcgtagttcaaaggcgtaagctcatggcggagcaccattaatgccgctccaagatctcgagcatcaaggagctctaggaacttctgctgccggagatagaacagcatttcactcttctcggcgttctcaaccagtgccaacttctccttgctcgcggtttcttcctggccctgttcctgaaatgattgtaccagtatgcgttcggcctcagcccagcgtccctcgagcactgcatttctgaaaattgcaaccgctggactctcaagttggtagccgctctccttgctcaataatgcggccgaattactgtaacctagctcgtagagactctgaataaggattctggtcacttcttcacgatcatggttgaaatatgaagaagttttcgaaggcttctggaacccatccaccttcatctcgccattcgaaccagaatacgaagcctggccgttcagagctcgagacagggccgccttctgagcgggcgaggcggccccgcccttcgagagctgcgagaagttattcgtactcgagattccatctggtcgcatatttgccaggcgcctgccgttggagaacggagggtggcctctactgaggggccgaactgggacggttggtcttgagagctgatttcgcttgccgccgtgtgacctccgcacgacctcctgtcccgtacgtataggaacaagcgtatcggatggactgtg

SEQ ID NO: 14208 - DNA, 504 bp, Emericella nidulans
tagagaaaaatgaattcaagggccgggtgttatcgttgtctgggaagccatgaccatgctgcgagaccaagatagtgcggctgtcatgcaaagactactgtttgatggctgtttatgcacgcccagaaactccctctcaggtttaagagtccaacccacctaccatttctgcaagggctaaacgctgaatactaaaggcttaccagtttaccaacagctctggatttgatcacagtgtcaataactggccagtgggaaccttgccatcttatttgcccctgaacaccatttgcactgcaagcaaacaggattattaaaggcttaggaagcacaaataggcggacacccgattttgtttaggggtaccgtccttttatgagccaccaggatcataggtcgtacatggttataccggttcacccctttggcttactatgtggattctggtcgagctgtcccgccagtgtcccaatgttatcctttaattgggatctcggcaattta

SEQ ID NO: 14209 - DNA, 606 bp, Emericella nidulans
gggtgactcgtgacaatcacccggggaccaatagagtgggagggtggttcacagtccttcctattcatttgggctgttcacggccatggccattacccaagacccgtacgctgttcaactaattacactgacacgagcacaacggtgcacatgacaagagacagaggcatcgacagactgaccgtatccaagaagcagcataggcctaccgctcatacgctaaatgagagaccaggaagcgagcaacgatagagtggaccgaaggtgtccaggtagatgcctgctgcgaggcaggctcagacgtctaaatatgcgacatgtgtgactatagcgctgagatgggctactaatcagtagaaagtgcccgtactagaactgtgctagaaaactcgccagggagccgtcgacatccttagctcaccgtctgcagtgaggatagaccatggattgaaatctggtcggttcagcctataggaggatggacggtatgcgctagtggaaagcggccagcgagtcacagcggatttacgctacatttgagtctacgtggacagtgacactataccgatagtctgttcatgtctgacgatgcgagttagctacaca

SEQ ID NO: 14210 - DNA, 345 bp, Emericella nidulans
gtgccccgcgatccagccagataatttccgtccatggtcgcacgcttttgttttctgcaattcggcggtggcaccgagacggtttgtattctgagcgggcgagttcaacccagcctgcggatccgatgactagacccacgcaggctacggctaacacaatgcgtcagcttttacattagatgagacagacgccaccgatctgtggtagaagagccgactcccaattcttcgatggttccgaatgctaaggctgaacatgaggtctcagccacttggcactggctctcaccagacacaccggaatcaaacctgatggcaactccggcttaaactgctctaaccact

SEQ ID NO: 14211 - DNA, 434 bp, Emericella nidulans
cctggccatcgtgcagcaagactacatgtgagggaggcggacgcgatttttttttttatgccacggctcgaccaggaggggacgggtccgttgggttaccttcgtggtagccgctattcacggaagatgtaggaaccagagctcgttaaacaagttgccatagacttacggccgaagctaggagaattcgatcagaacgcaactgaactcagagccgatatacaagctgcctaaatgtcggaaaaggctgggtagtaagccgttgcccaagataaacctgatcatgaggaagcagacggcctactacagtttgctcacacgaaagggcagcgtataaatacaagggtgcctcggagagaagcatgcactatctgagcacaacatcaagaccgtccggagattgcgacacctgctggacgtgatcgaagctcatt

SEQ ID NO: 14212 - DNA, 664 bp, Emericella nidulans
ctttgtcgtggatgatggtggtgttcgaaatttccgcatccttcccaagctgcttgagcttggtgttccgccaactcgcgacttaatgaatgtagttttgttaaatgcattcagatcgggcgacacacacgtatcacaaggtatactggactacatgaaagatcaggagctagagcctgatgcgtatacctacatggccttactcacagatgctgtccgtgtgggagaccacgaacgctttcaatcattgttgcaagagattcaggtcaaggaagaagtgcgccgcaatccgtggattatgaccaaaatcctccatgcgcattttctcaccgttgcaaaacgaagggactcggatgaggatccgagtgacattttctattccatgcttgatatgtatggtcgattacatgacatcactcctcttaaggagcttctcatccttcctccgcattatgtccaatacgaaaatgacgtttctgcaccttctgttgtggctttatacattatgatcgcgacatatctccgctgcgtgaagaacatgggcagagtggaacaaatttactctcgctttcgggaatttgtgctgagcggccatgaaagtatcgctccgcttgcagcaacggatcatacctacaacgaattcttggtagcatttcgaaacagc

SEQ ID NO: 14213 - DNA, 1137 bp, Emericella nidulans
atttatatcagttctgttcgcatagactgtaaaagagtatactacccaggtaacgagcagggccacgaaaaatagcatcgcatatttggtatatgcccaagccgcagtgtttacctccaacgctgtactcgaactgcgatattcacgggttggagggccgtcaaaaggttcttcgctgcgtatcgcgcccaattccagctgactagatccggcctggacattgacggagtacgggcgaggtattgactgtgcacatgaaaaaggaggatcctgctcagtagaaggaccggcctctggacggtaggaagcagcatcttccctttctattcgaatctcggtgactttggaaaagggcgggtcatcgggaattgacacgtcaagtgttgtatcaagaccaccaacttccttgagctgtcgccttcttcgccaaacgagttcgcctattcgcgcgtagatagccagcgtcacgaagatcacaaaccataccgggccgtagaagactgcaatgcggagaaagtcccatgacggggcgacccagcaccaaagctgctatccgtcagaacctcgttacacccagaatcagtatacatactatagccgaaccgtacaccttgcctcgagactcggttcttatgaagaagtatgtaaatgcggggataaacggcaggccgtagcatagcatgacgtacttccattccaggcggcgcagttgatcggaattgtattttcggaagaatgtgagatagacgttgaaggccatggcgaaggtccataaagcgtctgcaggcatgaacctgaagttatcatgtcaacggagcgcacgccttgtggtttcatactacacaccattgtatcaagaaagcctgaatttggcataaattgctatccgtgcccgcccagataccagactgcgagatgagggtagccacattggccatgatattgccaaacgaggcatagaacaccaagcgatttatgggcttgcggaacgactgagatgagacaaacgaaacgattataatgctggtcgcgaacagcgagaccgtggagcacgtccgttccgtagccgagatggcgaagagctggccggccgacaaagacatggcaacatgactgttcgtaataaggtgaatgttt

SEQ ID NO: 14214 - DNA, 3403 bp, Emericella nidulans
tatggtggggcgcaataaaccatttaggagaacttatatatatacttcgagtcctcgactatactattagtttcgtgctcagattatgcaatccctacctcacttgcatatttatccttcattaagcagtatggtagacaaccatgttatacaaagtagcactgatagaagcgtgtcaccatgtctcaaatatgtctcggagtttgtggcggtgtttattccgaggttccctgttattggtccgtgctccgctaggtaagccaccggccaggtgatgctgtggctttaggcgcggagagacaagtcgtgcgacttatccgactgacttgtttctcaggttcgcaagcctacgcagattggagaagtgtgcttcttcatctttggcatctgcgaaaactcgctcaacagacctgcaatgagggtaccgcatcctcgcgtttactcctgctagaaccgacagcccctcgtcactccgcaacatcaagatggcggaggaacatcccgaactccagtccgctctgcgggaactggatagggaatttgaggtatgcttaatctctggatgtatttttgccttttcatattcgtactgtcagaattaacacccgttattaggagggcgacattacagagaaggggtaagctaccttgcgctgagttgtgagagaatgcctgggaggaatggataacaccaaaatcctcttcgctctacgaggaagcatcatcttatctcgatccaaattgtgcatgggaacagtcgatattgtaggctaacccaccatagatatcagaaacgccgaacactccttctctcgcagtaccttggctcgaaagctttggacttcaatgcggcgagcgccgccgaacctgcccagtcgatgaccagttcggtcagatcaccaccagcacttctcagtatacggccgcctactgctgattcgggcggaccagctcattctttcaccggcggacatggatcgcctagtaacggaagcttcggttacgagcagcatactagcaatgatggattatcgccttataacggagacggcgcgatgatgtctcaccatggtcgaatgccttctgcgtcgtcttatgattctcttttccttccaaaacctgcgcctcccgtacagcaagactcgagggcagctaccctcctaagccagaattatgctttcaatcctcctgaccccaacgaccattttgatgaatcggccggagcctacgatatacctcctcctgaagtgtcacgacagtcaacaatgttggaatcacaacaagggtacttcgaggactttgccgggcagcagcaggaggaacttagagatagttacggtggtggttttcatcgatactctcagtccgatgcattttctccaaccgcaaatatggcaccgccattaatacctgcctcagaacttccgcaaggagctattgtcgatcatctattacccctcgagcctcgcgatattccgtttgctgtgcatgacccgcatgataaaagtacgccaatgtcgaactttgacaatattcccacagttctcaggcaccgtgcccggacttgcggtaaacagccagcatactgggtcctagatcagaaaggcaaggagattgcatctataacgtgggagaagctcgcaagccgtgcggaaaaggtcgcgcaggtcatccgtgataagagcaatctttaccgtggagaccgcgttgccctgatctaccgagattccgagatcatagagttcgctgtcgcgctattaggttgttttatcgccggagttgttgctgtgcctataaacagcctaaatgattatcagagtctaaaccttgtccttacatcgactcaagcacatcttgcattgacaacagaaaacaacctcaaaagcttccagagggacatcactacacaaaagctcaactggcccagaggcgttgaatggtggaaaacgaacgaattcggcagttggcatccaaagaagaaagacgacacgccaccgcttattgtcccagacctggcctatattgagttctcgcgcgccccaacaggagacctgcgcggtgtagtcatgagccaccgaacaatcatgcatcagatggcttgtctgagcgcgatattcgcaactgtaccgtcgtcttccaaacaaccatcgcgcggagaaaccattattagctatctagaccctagacagggaattggtatgattttgggtgtgctccttacagcatacggtggccatacaactgtttggctggaagatcgagcggttgaaacgccaggtctttacgcccaccttgtcaccaaatacagagccacaatcatggctgcagattaccctgggttgaagattaccgcctacaactatcagcaagatcccatggctacacggcacttcaagaagaattcggaacccaactttgctagcgtcaaactctgtctgattgatacactcaccgtggacgccgaatttcatgaggtacttgcagacaggtggcttcgacctatgagaaatccaagggcccgtgagattgtcgcgccaatgctatgcttgccagaacatggtgggatggtgatcagcgtaagggattggtttttattttttgtgctcattgtcttctctctctctttactactgctccccccagcagcacaccttgtcccccttgtgcggttaactcttgtttactcatcgggcacgtaaaaggagggctttatgcctatgatagataacgcagccccatatgtagtcccccggagaatttccacaacctatactttcctctttctccgaatatgttcttcctgtataatggtgtccgtccactttgatctcggacgcgtctcaacattacctccattatgtggcgtatgctatgctgttatccaatacatcattcctctttatcacaagttatcacctctgctattgagtaattgcatccattccttctctcaatgtcacgatcacgccagttgtacactgctgtaaataaaattaggttttattgccctatcccgtctcttatcattattactatctctcttctccacagaccctccgctttctattgtttgcacagatcctccctattttccttcctcttacatatatattgtattctaacatactcattttcttctttattctctcccgtccactatttttaaactttctccggggcgaaagtttatttctcgttgttgtgcttgcttaagatctaaagtttcatcttgttccgtgtcgttaatgacatactttttctctaatgttaacctccacctatgtctcttctacactcatttctacttagattgtgactgctcttgtcaattctgtcacaaactcctgtgagtattactgcacgtatccgagtgtcgcttttctcctcatccgttatcttaaca

SEQ ID NO: 14215 - DNA, 2043 bp, Emericella nidulans
ctttaatctcaaactagctaaaaaaaaaaaaaggaaaaaaataaggctctggaagaatagcgaagggcttaaaggagtcaccaggagccagcatgtatgtgccttctaattctgagttccaatgatagtatctgatccccaattggcgtggttctttggttccatcttctgccatagctgctttcttggactaaacttacagcgaccgaacagcgacccaacggaaacgtgccaggaagctggtgactatcgtggaatcatccccgattttgctcggttctttatagacacacaaacacccaatcaaacacccaatcaaacacccaatcaagagcatgaacttcaacacgtacataagacagtgagcaaatattcagaacaagcgccttctttcattgaagatgatgatgccttgcccgaatattgcggctggagagatataggaagttgtttacgccagacattgtagagacggaagcgttcggttctttgcaaagttcggcatagaggacttccgctatagtaggagattcagtcccgctattccagtgcttttccaggcatcaacgttctgctgctcaatagggctatgggagccaacgacggcgttgttcgacacccagctccagggggctttgttgtcaagccaggttttgcctgcaacagccgatcccaagacgcgttttcaagtgggtacggtagcgacaaaccgatctgattgccgctaacagctgacttagggcttaacttagagatatataaaaaggaaaggcaagcctgaatacgttattgtcatacccttagccgtgggtttaaaccatttttggcccgctagacgatcacgcttgcgtatgtacatgcaaactggacacaccacggatatctctatcctcttcaacaaggaccaatcattcaacgcgcaaacttcagaggtgaacccagtactacgattgcaaggaggcctcatctgcttggcagtgacatgccaatgctgactgtatggaaatggagttgacaaaaggtgagtgattgttggtcggaactagctgacctaatgatatcgcgccatcgcatctatggttgtcgcgatatgggattgggttgttgccgaagagcagatgcatcaattcaaagcgagtcagtagagtgtatgaaacttttgctggatgaagatactgtgacctccgtctttatgtcttttacctgagtatgaggaaggctgaacaccactaggtcttcctactacttgcgacgagcaagaacgagaccaagagaattgatacggctgcgcaattcctctctataccgacctaaatatgaacatttcaagaggctttcctcatttgatcatcttgacggtcggatttctccgcaagtctatcacgaagtgtcgttgagaaaatacgaagctgatactccaaatgcgataccacctgcactctgcactcactccatcactcatgtctgatgttttggttctaaaaaagaaatagcaccacaggtgcatagcctttggccaagaggaaccgaaaagagtgttgttctgttggtctcttcagactctgacttcagaccaggattcatttaatatcaacaaaccaagcctcggcagcgggtatttcgtattcaccaccaccaccattcgacataaaaatagaatgaccacgctacttttaggctgttgacggtcaacacatgtgttgataccataaaggaaagatcgtcaaattttcgagtatgtagtatgggctttgcgctgaatacgacccaagcgtttaggttgagcagcttatgcggtacatagacgtaggttttatagatggatttccgacatgatgagaatattgaaggtcgagacggccttcttgcgtcaagggaagccttttattcgggtaagggaagacaatgttggttgatggccaaaggctttatagggcctcacgggggtaggccacctttgggaagggttgtataggcccccctctcttctaggtaaaaaaaaaaaaaaaataaaagttgcctctttttcccccctgtgggttt

SEQ ID NO: 14216 - DNA, 1467 bp, Emericella nidulans
agaaagaagcatgtatttgcctaacatttcaggtgaatggaacccttaagagccgcgagctaggtatttcattctactctaaccccgaaattgcccattatcccattcatcctagctcgaagtgttcagaccacgaagagacatggatatcagcaagcattcccaacaaccaagaccgccgcatcgtgcgcgtcaagctcgacctcatacttctctttaatgcaaccaagatcctcgcctgtccacccatccatgacctcgaacgcatctccttggtcttgattctgtaactccgggacctcgctccaaacagccatgcgcgtgctcgtgacattctcggagttgagcatgacgaccaacgtgccttctagcgcaggcgagggtccagaccagtattctgctggatgggcggcgtcgaaagtgtagtctgcattgtaaccccatttgtaggggtaagccgggcggttgatgatggggtcttgatggaatgttaggagagtagggttcttaagaattttcaggtgctcttgtctgattgtatcaagctatatgcgattagcatctcctagcgcttattgaatcattcggtgcattgaactgggacgtccagacatgacgaagttagggcaagccatcccaagacggtcgtaacaagccacaagccgaacaaagccaagcctgaacagaaaagtagaaatagtaagaatatatagactcactttcgtcccaatcagaagggggctcctcatcgccgcccaaagcgcaaaatgcgctctgttctccgccaccgtcatccccccttcgccgttccccacctcaagcatatctgcatcaggccatccccaaaactccgcatactctctaacaagaaaactcatctcattcgtaatctccgcaattctctcccagactgcaatcctggttctgtcgggccctacttccccgcgccccggagagatatccccgctcatgcgccatgagttcccaatctcagcgccccaggtgttcactgctgcgttgccccagttgcagagggagtagagaattgttcggtcctgggtattgagggcatcaagcatgcggcgaaagcgttcggcgctgggggatgtgctccagttgtagtttgccggtgcgggattgggtaggctgggacaagtgccgttcggaaaaggcccggcgttgttggctgtgtcggggacgcagaaagtgtatgggtctttccagttatctgggaccccgcagtcgtcgtatttcaggtctacaagcttgtcagttgactacagggcagcaagtattcgaatgggatgggttctcgcacagtcaatctcccactcagcaaacgtctccgcatcgatatcctcataccccagactagctgggtacccggcgcacgttgtttcacaccgcgctgctgtatattccaactttcaggcctagctcatggatctgcgactgtacgctggcgat

SEQ ID NO: 14217 - DNA, 499 bp, Emericella nidulans
  unsure (1)..(499): unsure at all n locations
gaatgcaacccggaggacaggaggctgcccttgtagtggcgatgtgagcacagggtttttgtagacgggactggtagatgacgagggagggggtatgaagacggcaggantagtatgtggggatngtgtagcgagctagacgagctacagtgtggcagtggatatacagatctcgaacagggagtctgatagaggtcggacaacatcactcgggagtgatactgcaatgagcagagacagtatggccggaactcgaggtaggcggaacagagaacattgatgagacacgcgctggcgggagcgctgtctcctgttgtgcatggtctgcatgggaaatgacatgcgatactactggctcagcgttcactcacgaagctaatctgttgagggcacatgaaagtcgatagacgagaaaccaacaacacttagctgttcaagagactgtacagagcacttatccaagaggaccataatgccgtgagattacaagctaacagtc

SEQ ID NO: 14218 - DNA, 1157 bp, Emericella nidulans
gctattaggcacgctcgaagtctaggccaggcggggccttcaggcgaggtcgtgaacgacgtcgcgagagatcaatataccggctagggcacatagtactaggtaggcggcccagagttcgtctacatatccaagagggtatataatcaacgaaaccacagacaaacatgttgaaaacaagcagtaaatcgtatatttgtgtcacaagggtacgagacaaaagaagaatgaaataaagattgacaaatggtcatcgaagccaaatccggagcctgccggatcccaaatgggcgaactctcgtacaaagaaaaggcgctgctctagcttggtatgaaaagtgtggaccggaaggaaaagaatagaagaatagaaaaacagaaagagggaaatgggaaagcgaggaaatgaggaaatgaggaaatgaagaaacgtcctactacaatctcgcctggacaaccggcttcgaccacttcgaaacaacctgagtagatcccagatttgccttgaccctctccataaacgcctccatcttggcgggatcataatacttggaatcaaatcccatgctcaatgtaacccgcccccagagcgaaaacatgcccacccacgcactcgggttgatctggcgccccgtgtgcactaagtcgtgtgtcctgatgctcaccctggacgacgcaaaatccctctgaagagggagcgcgccctgcggcgagaaacccggcgcctggggcgatgggacgggctcgccctctccggcaagattggcaatcaccctgtctgccgtgaaggagagcgttgagatataatggggcgaagtcagatggggtcctaactgggtgcgaatctcgcgtgcgagaagcagtattgtctcctgggttgaggtgccgggcgcaaaccactccggtttgaatgggatccagaggaagacgacgtcagcggcattgggcacgcggtggcgcccttcggtgtcgacccaacgtctcgcgttgcgtgtcatgccgagcagagcacctgtttcgtggccgcgccgtagatctgcttgatggagagcactgtcgctgcggcgcggcgaaggtgatgctgatcttttgctcggagagagccgccagcagtgcctcagattcggccagtgtataccgcagtctttacagtgagt

SEQ ID NO: 14219 - DNA, 1511 bp, Emericella nidulans
taaccgtgtataggttcgtaagaagcctgggtgagtgtttactaagcaaatgtgtaagcgctcacactcatcctctgcctatacctctacatacagtaaggtaaaaaattctaaattttccctctgtagctttcaccagcagatgcaaagcgcacccggcgctgtcgccttcctttccaagcatatcggtatatttcacgatcgccagggctcaggaataaaaaatacgtgtcacctgctgctgagctctgacaagcccgagtcgattccagtatacactgtcacggacccgaacacgagctcacgattccacggccgaggtcgatagggcggccgaaagaccggtggctggccggctttctttgcttctgcggaaagttggatcgactagcgccgtactaagccttaaagcagtaaaaggccctggccaaggtcagaaaatccagaactaggtggatatcgcagcgagtcatcagcctggtggccatattggatagggagaattataatgtccattgtaacttccagtttgcagaccaactttttttcaccattgtaaaggtcttgacttttgaggacgcgacccctcaaacgtgacccgcaagtcgaaaccagggtcagggtctttctaactgccaagcaagtggacggaaaaggatcgaccgtttagcctggtttagtgccaaaagcctgaacccgcatgagggaactttccctttccaaattttgggtcaccctggttctggatcctccatacttcaacaccagccaccgacacgttttcagcctttttttttttttttgcttgtccgagggccaaaacgataaccgataactcaaaatcgcgagctgtgcttcaccttttgaagaaccccgtccaattttgcaatggattccttcgtgggctgtgtcgataggctccagcagcagcttactacctatacctgagtctccaacaaaagcgggtgggcaggatgagtggacgacaaatgagcttgaatgaatccgtatcatctgacaagcttgcggggcagatatgccaacacaaaatgccccggttggaccgcactggtcgatcatccattttggtgctggccaagtccagcttgtccagcaaagagacgtattaggacaaggatacagtctgacagactgcaggtaaatcgaacgggccatatccgagaaactgcactctttattcaaagagaagtgttatcgatagctgttatcaccggcaacgttcctctctagtcgaactcacagtagatctccctgattgcagcacgcgatctccctggaatggatctcaaacgacaagctggcggccccgtccggtgtcttgcatgcgaagttgatttgagcttatcccgtcaaaacgtcactggactgtggccgctgcctatagatggtgccgcgatttcggccatgtatccacgctacttggcactaaccggggatatacatttgtacagtcttcaggaagtattcctatccagcttggcctctagcct

SEQ ID NO: 14220 - DNA, 1615 bp, Emericella nidulans
gggctctaaccaataagatctattccatatacttctggtaaattgacctgcacacagggaaaagatgcacctagtgggctcggttttaatctttagccaataagatctattctacatactccttggtaaattccttctgacgccacgcagtgacaccaactgtaaattacaattcagggcctaccagatattaaatgatcgcccaatatcaacaaaccttggaagtttagagtagcacacacctgacaccaggagcccttgagaccatgaattgagtgtctgcctcctcctcgctttattccattccagaggaggaaatcactccccaggatcaccagattctctgccatgggggcacgtcttccaaccttgaacgtctcccttcccgtcttcgacaatgtaaggtaccaactacaaatgtcaaacaggagattgaagacctagcatatgaagtcagttacttgaaggcagagctctcctggaacactgaatccaaacaagccttacttcagtttcaggaggaaatgcgcattgttttttataaaattgacaatgcgttgtctcaactaagtgtccgtctccagggggcggagcagcgatacctgagcctgtggggtgtgaaggccaaccagggcgacaatgtaggaatgatctgaatgggaatagtatgtgacatgtatggttcagtcaaggtattattaaatagggaaaattattaagataacatataagtattgtagccccatcagcaaatggtacttgataagttctcaaccatggattcccaggataaatcgtgggatcacggcttgttccattgctttactccattcagtgtttgtaggtctagcatgccggactcaggcaagatatacttattactctttaggcctcagcgcaacatttaccccatgctgcctctttaaccggattgggactcgcttcaggggcgaggaagtgaagggctgcggccaagacgtaggcaactgacactgtttaatgcataatcactaatcatctcagtgctgtctcttcgcgggtgcgtgctgccttggtatcccatgtgtaccactgtgcttatgacgacgcgcattccgtaaccggttccagttggatggaagctgttgtggggataccatggcctccttgtgctgctcttgctgtgtcctgagccagcttgataatgaagtcaaagtgaatgcagaaactgtccagatcggataccaaccaccagctgccatgtcctacgggcactagaaaggggatgcgccattgacgtgaaatcctgccctgtacctaggaaatagattttctgtccttggaaaataataccgtattactatatcctttgacctctggtggtctagaccttacagtatctgcagtatataattatccagccccaggcctgccatctgaatccgccgcacaagttcagcactctcagaaagatgaatttacttcttggggtttgactggtgctcctggctcacaagccctcctcaatctacgcgagtttgtatggaatcaatggggtgcaaaactggacagagccagattgccaaggcataccagctcagacgatcttcaatgagtcaacataggccatgaacag

SEQ ID NO: 14221 - DNA, 548 bp, Emericella nidulans
ccctggggacgtaggcaatgaaggcctcggtggcgggatgctcgcttggccaagcctgtgcatggacacgattttttgtgcattggatcatgcctgcatttcgaacagtgttaaagtatattttaggcgcgcgcgacctagaacgaatgtgtcatgacatggaacaactccaggccacgatgggggctatcactatgcgggaccactggactaccggacaagcccatcggatcaacgtattgtctgtattgatgacagaggtacctagccgacgtggtctcattcatggaagacagtatactaccacgagggtctataccgatctatatggcgctcgaggtctagtacacaattatccgagcgtacgggctacgcgcacatggaggtgatcgtcatatggtgcaccggatactagagaactgtccttcgagtaggagtgatcactgctagcaaactactcgccgaccagcaacagcgaaaccgcatctgcactgcccgaggaggatctagtatcgatcgggcacatgatacagagcttaggctgctct

SEQ ID NO: 14222 - DNA, 961 bp, Emericella nidulans
aaggcgcggagacgaccggaggtacttgcgggaggcttggtagatttcgatgatgctcttttccgaattctcgtagggggaggacaaccgggtgggcatcaggtcctgcttgaattagccaatattgaccaccaggaatttgagatcatacctccagaaaccacaacgctaagattcttggtctcgtagacagcaaacgtcttcacatcgtgggtatggtacctccgatgcgtcacctccacccatcgactgctcttgtcacctttctcgccggccttctttctgtagacaacagtccgttggtccgcaccaccactaacgaccgtctcgccgtccgcgcttaccgcaacatccagggtatccgccaaatggccctgcagccgctggatgagtgagtagttcttcgcatcccagaaccgcacttcaccagcagaatcaccagaaacaatagtcccatctggcaggcacttcaccgaccatactagcaactccttcgaacctcccgtcggacccttacccaaactaatcgtccgcaaaagctgcccattccggatatcgaacacccgaatcgaactatccgcgtagcccgcaacaatcgtattccggttctgaaacgtaacactcaacacgcgcggcttcttcgtcgacggcctcaacgttcgcaaaaacttcaaatcatcgtctgcagtcgacaataacacaatcgacccatccgcgcacccagccgccaaatgctgccccgtgaactcaccctgggcagcgggcatcggtttgttgtcacgtcccttcgccggctgccaccgcggctgcgcagcaagacaccacatttctccatagttcccgctcgaatggcgcttggggcgaccctgctcgagatcccatccgtcacagtcgtcgagtacccaatgctgaaaaggcgcaaccggcccgcttgcttctgctgcccgtctggccctggctc

SEQ ID NO: 14223 - DNA, 1630 bp, Emericella nidulans
gatgccctagtcctcgctctctactgctattattgtggcgtttactgcgagtatattgtaacggcgcagaacctgcatactacataatgtattgtaatctatccctaccctctagatatcatggatacctattctccagaatggtgcttgaaagggtccgtttgatgagacataaacaaaaggcatcgacaaatccaggccacaagaagaggacaatgggggcactgctactcgaccacaagcattgaagaccttgattgtgtatgctgctcgttctaggcaccatggatagcaaatggaaccaccgacgcgtggcaacagtgggccgctgcgtttctagaaagcacggattgtggatgatgtaacgaaaaaaaaaaatactcggtatatgcaggtactgtcttctcgtactggagtcattccgttagacttgcaccaataaatgacatttgagggccgtaagcgttcaagaggaagaccagtggcttgataacaagtctcagactgtctgggatgtgggagaaaaggtaaaaaaagaaatatttccctgaattagggcaaagcctagcacctaaacaagccatgatcgtcctaccggaactcccgagtgcgtggccggaacaggttccgatgccggttccgaaccaaagcagtcctaagtatagggaaattgcaaggtgacagactgacacgctatcatagacacgagtcttgaaactcgacagtggggccaataccatatgcaagatcttgatctgcaggcgcgcatggcgaatatttaaacactgctgttgtacccagcgatgtgactgatatacaacccatctaccatggttgcgctcaacctcctcctcgccgccacgcctctggcggcagcacagtcgctatcagacctctaccttgacagtgccccttcgtcaccccgtccttatatcattccccactacgccaacagccatgccgtcacaatcggcgcccagctctaccggtttcccgttaccggccctgcctctgactatgccttcacgctgatgagcaccaacgcccctgccagtggcagccttggtgtcctcccgcacatccatcagaggcactatgagaactttttcaacttcaagggccgcttccagctgtgggcacaaaagggggatggcgagcaggaagcccggcttctgacccagggcgactacggctctgtcccgcggaacacgacgcatacgttccagatactcgatccagataccgagatggtcggggttatctcgcccggcggctttgaagacctgttctacgcgttgggaacaaattactcggacgcgacgaacacgccgtatgtcccggccgccagcaatgggacctcgtccccgggggcggacgtgatctccagcctgcagaagtacgatgtctacgcacagctggactttgagccgacgcgagacctggtcaatggatcgtcgtcacgacgtcgtcgtggcacgcgatcgattcctctgcgacaccgctcggcgagcctggccagccctacttcatcgccaacaactacggccccaagtatttgaactctcgacacgggaactaccagattgtccagccgctggtcacgaatgcacaatcgcaggacacaaacttc

SEQ ID NO: 14224 - DNA, 393 bp, Emericella nidulans
cgaaggcgggcgccaagcgagccctatttggctttttctgagccccgtcctgtttttgaccgggcagggcaggaggcgggaaaggttgacatttcaaacgggacctgggaacgaatgttgaacagacataatagttataacaaagccgaataactataggtgagatactagaaggaaatgtattatgctgttgtactagcgtgaggcggtctctctttcccagccgccatccgcaagctatgcatcccagaggcttcatctcttcagcggatatcagttacaagccgacatgcgcccgaagattactctgacgatgatgaacaggccgagtttttacatcggtttattctagacacgtgtacgacggaaagcatgaactacttacttagaacc

SEQ ID NO: 14225 - DNA, 595 bp, Emericella nidulans
tggcgttttccctgacacgaatgtgggttgcggctgactggtgcgagtgtgactgatgtcgccatcttgttttctcctgctgaggcagatccgtgtgcagggggtactcccttgtgactagtggcagccggtgcacttgaggtattctatgagggctttaaccagatctttctatttgacctaagtgcgacccgaccagaggtgctatcttgttcgcgccttcgccgacatattctaccatgttgagggatataggaacgggcatcatcgctgggagcagaggactatgccgtccaggctcggtctctaccaaactagggggtatggctaacctgtaaaggtggaggcctgctcatcaaggtgctgtattcggtgaaacggcacagtacgactgtggtgactcgaggtcatcacagacgcggactccgaagactgaaaggtgccagcgccggtacatattgagccgacacaggcttggatccaataacgcgcttcacacggtattcagtcaggaacagacgtcaactgtgcaggcatgatcatctagcacgaacatggtggatatggcaagacgcgaggctggctttgccatatg

SEQ ID NO: 14226 - DNA, 2069 bp, Emericella nidulans
acctaacatgctaatatcacttccggtacaccctcctcaaaccaagcccgaaacatccctccacaatttaaatcgaaaacaaccttcccacggcgcaagccgtatcccgctgccgcaacatcaaactcagcctcaattcctatgataccgccctgtccttcgccagtcttgccccaccgtctaccggccgagcgctgcaactcgccattaattcccgcaacggccgtaacagcgtccgcaagactaactgtctcgtgtgaaaaccgcatcatcgcgcatgctgtgcgagcggcagctgtgcagatgaaggagtctccattccccgtaccggatacggccaccgctcgtctttttttctggtactggaggcatctagactttatgtccaggtgcgaaggcttcacaagagtaaccgtcgtgtccagatatggatccgtctcgaacgaaggccggtccttgaagaaatggtaaaaatcaggccaacagtctgccagggttatgtcccacatggacttttgacgcgcgcgaagaagtggattttgttcagccctagattgtcgatattgcatcctttcaggctgacgcatcggtaaagaggaggaatgatccccgacttccacctcccaggtctccgcccagaatcctgctccgagagtgggcgtatcacccacccgaccaggcaacttgttcgtcaaccccctgtactcgttgcaacagcgaggtcaccccactgatcaaggcagacacatccaacagtgccctgactagggtagcagtatccaagcactggctccgattcaacctgcgactgtcttttttccaaccccctccggtgctcctcccatctctttttggtccagaaccattcatccggcttgaactccaaaccccactcacgagctagttcttcgatatacggccccgcgagctgcgaatgcatgctcgcatttcggcttccatctccacccttcggatccccattctcatcctgcccagtgcgggtaagaacttccctagctaattgtataggatgccgcacgtttctgataccgatgactcccgcaccgcgtttcatggtgtcactattatttggcacatcgtcctcgcctcgcaccgtcgtaaccataactgaagcttccatttcgattgttcccgcagttgtgaacacgctaccgcgaccgcagttgaacagctcgtcgtcttccatgagcgagaccgcatggatggcggcatcaagagcgcgggcaccattgtccaacaagtgccttgtggcgcggaggtaggtgaggagggacgcttcgtatttcgcccaaagctctggtgggagcgtcgagcggtggatggcgcctgcgcctccatgaaggataagggtcggcttgaaagttggtttgagcgtcatttatataccgtttattcgttcgtccggtagacacgaacgatttagcgcgtagaagagcaatcgaccgttctcgattatgagatggtcggaagatgtggggaagatgcgtcgaaatgctgtcatgtctagcggcaaatcagccttatcttggtaacagcagactagcccatagcgcacgataaccgtcaaaattcgcagaattcagaaacaagccgagcatcgcattaatcctggtattggcagtagtaatgtacaagaaattagaaaacatattgataacatgccccggtcgccaatcgaggatctgcgtcagagacaaaacagatttcttttcgccccctaaaaaagtatcaggtaaagagcaaggctgtgtatccaaaaaagatcgccggtgaaaaccagttcttgttggcaatagttaagagcggaataaccagcatgcttcgaaaataaaagagaaaacctctataccatgcacgcatcctgataatatgaccagttcctaacaccagagaagagatgagatgagatgtaatgtaatatagcagcaacgtttatgggcatacagctggacgcaagaatcataggcctcgggggaagttgggatagaaatacaatgtggcttaggcaacggccttgtcggagggtggagcaggagggagctgtggac

SEQ ID NO: 14227 - DNA, 543 bp, Emericella nidulans
gagccatctttgcactcatatacgggacatatgaggtatactgccttaactatgacagttcttccttttttctgtggattcctcaggctgactcagcaggcggggctacataagtagacgctggctgcctgcatggtctcctacacacgggattctggacccaatgctgtaacatcctcttattgcctaactagctgttcgcctaaccacagaacatgcagagtgtcttgctcaacgtgctggacacgatgtgaccctccagataatagataagcagtctataaagatctccattccaattatgacatcacctacgacttctagatgtgccccacgctagcaagtctataccatcaagtaaattttgcataccgatgaaggacgtatctaggtacactaataatacgtctgcatgaacctgatatggccttattggacgcatgtcagctctgctgcaaacagctcctattagaccataatgtcaggcgcttgattgacctgtgtaccacatcatagcaatgactgatagaactccgttgatag

SEQ ID NO: 14228 - DNA, 570 bp, Emericella nidulans
atgtagactctaccattgaactgtgcgccagtccctagagtcatacttgcatgccaagcctcacccttttgtcttatcctacatccaacttgacacattgtagggaggcttcctaccatcctacaggaccgccaacacttaccctccaatcatcgccactaacggttacacgatgagctagttcaccacgactcaccagtaaacttcagcgtactatgattaatctctataccgtattgcaactaactatgaggcttagtcgtatttattacctgcatatattatagatgagactatgatctattccctttaattaaatataacatacatctttgatcattcattatcgtattaatgaaccataatacttctggctccgtctcatcgcttattacttatacttgccaagggatgtatacagactccgattggatggcctcgatgccacatagatacctccacctgcataatgatactatttacgctattgcaaaaaatacgcatagcgcctcccatattgggtctcttaggacgtacaacgatatcctgattgtcccaaataccactctc

SEQ ID NO: 14229 - DNA, 574 bp, Emericella nidulans
ggccgaatgtgtcgcactgtctctggggggcgcacgagcatggtcgaaaaacgctcttggacatgggggtttttgccgctcgctagtgagtgcgcatagtacagttgaacatgctggatccggctacggcacagggtgtcaaacgtgtacgatggccttgctcccagatgctgaatacagagcactgaaccgggactgtaatagccatactacgccgtcacggagagatgggacaggacgcttcagagataacgagcccgatgggtcacatactgtggctgctatggcatgcactgggggaatggctatcggtgtggtgggtgtccacgaggtatgctccaacacggcgttgcagcccgctgggacgccaccatgtgacgacgcttgagacatcggatgtacattcaggaaatcgcactgcggtagtgtaccttgcgagactggagcgtccagacatcagcagctgtgcgcgacatagtgatgctgagtgcaggtggcaagagtggacgggagaccggaaagctcacgagtatagctgactaagacaagcaggggtggaaagtgacagtacagc

SEQ ID NO: 14230 - DNA, 583 bp, Emericella nidulans
gcaacatgcattcaatcaataacgcgggtaggcagtgcaacgccatttcatgtaacccgtcagccaactatattcttagacgcgcgtccagtggatagggctcatgggaacagcaggactcatataggtgtgctaacaagcacaacatccaatgctcacaaagccggactaggaaatcaccgatccaggctgaagagaggctacaatctcttgcaccacactgattgacaggaaaacatacgactgtgtcctgcctaacggggctgctatggacaacaggccgattaacatgatgaagacagatgatcttgagaacggcgagcgggaattcctgaaccccacggttgatgagctataactctatgcggtctgtgaggactggtatgactacgaacatgacatggatgaggggcatagtcaatgagcaagggcagacacagaactgggaagtggacagaatgagatgctagagtctgacagaggccgaactggccgagacaggcggtgatgagatggcagagaaccagatgccccagcagctggctagactgatatgatgacttatagataatgcggacacgag

SEQ ID NO: 14231 - DNA, 633 bp, Emericella nidulans
  unsure (1)..(633): unsure at all n locations
tggaacttctgctaattgcactctgcgacatagggggggactgcctcagcttatattgacacgtccttttttgttccaccggaggacatacggatagcgaaggagcactgtaggcgctgctgctgaaccagccacctattcagccgaataaacgagaagcccgactgttgtctagacaacatgctgccatggtccagaatgccggctctggcaatcttatcgcggctatctgtgttcaggccatgaatatcacaccagggtgtgaaccctacggtgagggcagttaggttgttaccgcttctgaatgtgttgacagcttcatgctccaggttagggtgagtacacatgtacatcgttcgatggttctaggaagtaggcattggagggcgctgctgtactgcaggcgctgagtgtcgtattccgattggccgggactctggcgacacattatggagtacccattagtgactactatcaaacgcgatccgtatgtgcattatgaacagcgaagacttgaccgacaccgttgtggctacatctaggagcatttcttaccaccagcactgtacacagtgattacatgcttacatgcttgttgtaggtgtgctctattttgangcacagcatgccccc

SEQ ID NO: 14232 - DNA, 7136 bp, Emericella nidulans
  unsure (1)..(7136): unsure at all n locations
ttttctcatggcatggcaaccagtgacaccaccagcaactggagctacaagaacaaggacaggagtaacaacaataacaatgcatcgaagcaaaagccaaaactccctttctatccggcattctgcttcagggcgtcgccgacgcactttgcctggataaagatgggtgctgcggatgtacatcggttgacaaggcggttggaatatggaggttcgtccttccgcgtttctcttgctttactgatatgtttgagcaatgatagtttggaggagtctgcactgcatttatgctaatatgacttaccaaaatgaatagagcgcggtctcttcttttaccagaaccaccctatccgcttcgtgaacttggtcggcataatcgtagcacgcgccgacgtcccacgccgaaccattttaacgctcgatgacagcaccggcgcgacagtggacatagtggtcttgaagagggatccctgccctatacctgtcgcagctacagtcgaatccaaacccaaaaacaacaccgatgttcatggcgaagacggcgctcaaaaggagatgcacctcacgtccacaacccagactccgatcgacataacgcccctgcagccgggcaagctctttcagataaaaggcacactgtcgaccttccgctccacgaaccaggttcagctggaacggttcttcccggtgccagacacaaagaccgagatgcggttcgtggaagcgcgcatgagatttctggcggaggtgctgactgtgccgtgggctctggatgaaggagatattgaaaatttgaggatgcaggcggatgaggaggggagtaggattgatgatgaacaggcaagacataggaggagggcgcggaaacgggcagagagggaagagagagagaggaggaggattttgaagctctgggagcaggaggaggttgttagggagagagaagggaagattgccagggaggcaggaagagattatatgttggagcttgagaggcgaaatagactattgtctagttgagtagactgggtatatacgaagacaggtatattgcgtccaaagagcaaaacgcgcagttatggtatacaacaaatcaaccagataacaagtaataaacagaatttaggcatcactcattcctcgtaaatcatcagagcaaaagcaacgctattacatccagactagacaagacataacgcacaagaagtgataatggaatagatgtacacatagcaagagtatcctgcgccaaattaccggtaacctttgtagtcataccccgatgctggcccgccaccttgtccaccgagtagaccacgatagtaatcatcgtcgtttgaccagctagaccgcgatgggaggctatcatggtacttgctcttctcgcgctctttctcgcgctcacggatttgttcgtaaagcctatggtcttccgcgctccggtcaagctcgcgatactggtctagcaaatcacttgggatggatgaggacgatggcaggtcatagtagtaatccccgctggatgttgctccaggtttacgagagccattcaggagatcgctttcagagtgtctgtactcatggcctgaacggaagcgcgaccgacttcgtgacctagttgatgctcctgttctcgtgcgcgaagtccctctagatcggtagggaggtgagtcagggacacgagtcgcagagggccgcgactctttgttacttgagttcgtggagaaagaatttgcgtgtcgatgtacaggagagcccggcccttcgtagacctttcctcctcctggttgcgctgtgtaaggtttccgtttccgctcaatagcggggggagattgttcttcgtcctcgtcgtcgacaactgctgatgttggcggttggtatggcttcttctcccgctgggtcgtcgacggattcgattcttcgacagcaacagtcgtgcttgtagacgatttggcacgcaatgcggcgaccttcttaacatcatcctcagtaattggcggcagctccacgccacagtgttttttgatgctttcgtcaagcttttcgcgcagaacaaggtctggtatctcggggaatagccgccttggtatttccttgggaaaccgctctttcttgttatctggattgctgattggcatgttcaacacggccttttgcatccgttcatattccttgtccggatgtgcttggatcatcaacgtaacgaaaagctcgaaacccttgggtgtgagcgcaggcacgtcaggtctttcgtccaacctgacctgtacaaggtggtgttcgatttggaaatcccgaaatagtctcgaaatcgaggatgtacggtcatcgaaaatatctgaaatcaagattaatagtgaaacaaacaagcgcaaaatctacttaccttcccaaggatacgggtcgcttgcaatactggtatcagcatagaatttctgcagtttctcaggaactacaacgagcgtgtctccggggggaaaatgctcgatctaggaagcttagcagaatagtcaattccgacttacgatcgtaactcaccaagtacattgcgattccccgcaagaactgcccaagcctttcggttggcttaccgtcgtcaaaaagctttccccatatcttctccagagtagtcggaaacgtatcagttctcataggtggtttcgggcgggaatcagctttctgaccgctgtcgctcatttggctagcgggtgattctcttctcgacttctcctgaggaggagtttcgctcaacctggattgctgagacggagcatcgggctgttcggactgtggaggtggaggcggaggcggcggctggaaagtagaggggggaggcgtgccgtgtgagattgtcggagtatgcggcgctgatggcgcttgatatgactgaggcgcctgatatgcttgagcgctgcccattgtggtggaggcgggtggttaactgggctgttgataccggctgccccaagttgttggatcacattcgccgttatctgcgcgatgagctctggcgatacataagatgaaggagcactgtttccgacggcagaagtcactgcatcgttgattcggcctgtctgaggaggtggtggaggtggccaggaattctgctcacgcggcggttcaggatagtagccctgggcagcggtctgcgggggaggggcttgctggggagggacttgtggttgaggcatactgagatagtccgagttctgctggtacggatatggaggctcgaaagaaggacggtgttccgatgtgttcataggattgggattgtctggctgaccataaggatgcaaaccaggctgaaagccatcgtacgccatcacgacgagtcggttcacgctttatttcagaaccatccgacgaggaccttaatggagaaatatgagatagcaaatacaatgagacaatgatgatagactaaacagagcaaagagttttgtgatggggagaattcgtaagtggtgggcaagtggcgcacaaagcagcaggtagtgaggggcagcgccgtcgacagaatatgagcgttgggtgtaaagctttctttcaacttgatgagagattttttattgaacaaaggaaagagagaaaagatgcaggatcagcccttccagtcaggcatcgaagaggagaaaattggagctgtctccagtttgttctttcagccgcgaccgttaaggccatcgtcatacgtcactgcgcccgactgaaaccactaagaccatatagtaagagtgagatttgtggcggtaggcggttatcattttcctgagttagtgatacatagacacctggaaacctcatttagattgctgggtatactctgtaagactaccaagctggagaccgtaaacaataagaaccatggtttattcgatagctagtctcctgagtacgtgataccaaccagcgtctttccctcaacgagccctaagcactgaagttgactggtgcaaatatagcttgatgggctggtacatgattcactcaaagaaagccctcaatatcttcttcttcttcttcttcttcttcttcttcttcttcatcatcatcatcatcttcgtagaagtagtccgcctttttggcaacttctcgagctctgatgggggtgttgtgcgaaacttcttcgggacgccaggcctgtcccagaaagtcagctatatgcagcagaacatatgcaaagacttactttaaccttcgccaatttcccccctctaccgtcagggagcacactagcggcggcttcagatctttgaaccccgaatgaggcccagccactgtgtactgaagtactgaattcgcgttgaaggcagcgagattgcgctggctgttgttgtaagaaccgagccctttctcgctgctgctgttttatttcatgtctttcaggctcaatccatacacctccccagaaggctcgttgtcagtaacgtcagcaaacgaagaacatggcaagggccataactagtaaggcgacctgtagacccagccaagatgctgccaacgttctcgtacagtcagtgcttaaactaagccgaggagtgaacctatgagcttaccgtgattgtacctgcgttgtcgatagcaagtcgccctccgccaaaagcttgttctcatcgatgacgggctcggcatccttatgtccctgaacgcaaaccagacaacgctatttgtaacaaggtgtgttagtgcagtagagacctagaagttagcggaagcgtacagcgaactcgtgttcttttcgctgatttatagcgaattcgtcgagtcccctgacttgatcacaaacgcagcaccgcaatttcataacctgcccactagtgcatccacggcaggttgcatggccggtagccaaagcccgcttgccctgcacgacgaacgcgttgcgaaagatgtcgagctgtctgttggagtacgtgttgatattccggaattttttgcaaatcttgcactttaatttggttgttttcaagcaacggtaacatcaggtcttcaagtgagcctggttgctcacttgtcagtaagagggaccgtcccgagcctgggtaaagtagacaccgtcggttctgtggtgtgtgaaggtatcagcgattcagaaacccactgtcttttaaccgactcgctgtatcgtttggcgtaggcactgggaacgtcaccgcgcaaacgataattcgccatgatatcaaacgagactcaaacgcgttcaaaatctagtgttgagtaggtctttgaggcgtactagagcgtctaaaaagacaaggcaatatgagaaagaagtgctctggttgaaatagtagacgcgggttcagatgaagctattattctcattcgcccgactttcgtgggcaactgggctcaataagtgtaaacgaatcctagctatctgaatgagaggactcgaatagttgatgaatgatagtttgactgtaaagcaggcgcaggctcagagcaagtagctcttcatgttcatccaaaccaacgcccaaaagagatctcaactctatatcagagtcagaatcctaatataaaaatgaatgcgggaggacggagaagccatccagcagtgggtgaatgaggatgaagaagagaagagaagaatagggaagggtaataaacagaagccgtccagtaggattgggggaagtaacacacccttctggaacgattagtaaccgtagaagggttggctcttgagatattgagcaatgagcttgttccacagttctcatgactgacttctgcctcgaccagtctgctccctccaggccctctcaccattatcatcctctctactgccaccacttgcccagtcgccgagatggcgctggccttttataaagtgccggtttatctctgggcttgtccaagtatacaaaagcccagtgttgtcactcaagagaatactcctgaaattccgcttcgtgtctagaagaactgcagaatctattagcctatgatacatttaaagcttccacattgattcctactatatcgtaaggtagctttgcctgaataaagttggaaacagatcactgcattgggcactcagtacgcatgcacctgtgcttggtgctaccacttcgtaattccacattagcctgggttgccctgaaactagccatgttgagcaactaagatgccccgtgagtttgacagtagtttgacgatatttgcttgtccatctatgagagaacatgccaattcctcagtactggtatttgtatgttgggaagaactacctcccaatgggactccaagtatgtgtaaaacctgcttggtcccttcacaacttgcagagttgatgccttcagataaatgatctgccctgaacgctttgcttcttctatgcttttctgatccgcggcaggtataacgaacttgagttggcagctcggtctgcacctgggaacctagatgttcttgcagcaaaatgtggaacggtatgtcgcgcaattatagacttgggtcgctactggcgcccacgatatcagagtaccaggtctccataccttgacgttgttggtagtggactggtcagggagcttcctatgctgaaatcacggatagactgacgcttggaggcgtgatgttatgacaggttcgagttaccggggagatagctatcatatcagtgacgtattatgaacaccaacgggtccggttacaaactgtttactcagagcctaggctcaaggtcaaatgatgaacagcagggaaacaggatattcccatatgtcaaagcagatgcaactctgacttgcactcccctgccaccataggcggacaatcaggatgggcgactggggcctccctcatccttgctcgtctaaaaaatggctcaataataagaacctcgtcgcagcgccaagcgatgtttacgacaggtacttcggactgttcgctaaacgagtcaacaggctagttgcatcttgcacccaatcgccgcaggaatgctgatcctcgtcggacggagattaaaagcgttgcgagctctcaacttgtaaccagctaacccccggagaagcaatatttaataggggcgattatcaatcagcggctcccacttcgncgttccaccagccatgccatgctgnncgtgtgccgctgcgagcttgtgatgtgcattgaaggga

SEQ ID NO: 14233 - DNA, 512 bp, Emericella nidulans
accctggggtttaggtcacgcatactgggtttcctgcccctggctgtgtgcctagttctcaagggcgttttcatgcgctggatatacggtgccatacatggggactggctactggccttcatcggctggggccgggtagagggctcagcctctatagggtgactcggcgggcgggactagatcgtcgattttgctgactgcgaacttcctgcagatcgacgcccatagctagctggtcccagtcacatatcaaagttggttgcaactctgcttgttgagataaggaagtgggcgccggaactactcctggtggctcggggattacgggagctacttgcttcctagtttacgcacagtttgtccgatcgtccaccgggggtggagtactagttaagccctgcacccctagtgcagcagtacctatttggaaccttatctatgaagtcacagcgggcagagtatctcgctgcagcttgagccacggacgcttgctgcacttgggctgaacatag

SEQ ID NO: 14234 - DNA, 1567 bp, Emericella nidulans
tgacttcgcggccgcataatacgactcactatagggatcgtatcagcaatctagcaccggaaatggtgaaatatcaggttaattgtgcggggctaacttcaacggtggctggaacgatattcccgcaagatgtgccaaccctgaagaagttggtcctactcggggaagccgtcaagcaagcggtcgtagatcaatggattggtcacgtagaggtctacaacgcgtatgggccgtcagaatgttcgatgcaagccagtatcaaccgattgacacctggttgcaatgcactaaacatcggctgggcgtttgcgggggctctttgggttgttgaccccaatgactacaatcgccttgtcccaatcggagcaccaggagaattactcattgaagggccattgcaagctcgtgggtatctcaactctcccgagaaaaccgcagcagcgttcgtcgtagacgcggcatggatgataaagaacgggtttggatccggccgacgcctctaccggactggagacctcgtacagcagaacccagatggttccatcacgtacattggccgccgtgatacacagattaaagtgaggggacaacgggttgaggttggtgagatcgagcaccacctcctacaacaagacgcagttctcgatgcagcgataatctaccctaaacaaggaccctgcaaagatcgattggtcggccttctcaccttgcgcgatttcttttgcggaaaacgtccaggacaagacataatacctataccaagtggaaaactttctcacacaaaaagtcaactggctgctgcatcggaagagctctcaaatcatgttcctgagcatatggtcccaaagatctggattcctttggaaagcatgatgccacaaaacgactcatcaaaattggaccgcaaaaaattgggggtgtggcttgaggctattgatacagcgttcctggaagctctcaccaagtcttctgacgctggctctgagagtcgagagcccgaaacgcttctagaacgccaagtccaacaagcatgggccgatgtgttgcgtttgccgcctactcaaattcctatagagcacaagtcattcctaagtgttgggggagactccatcactgccatgcatgtcgtgtcctggctgcgggtgcgggggattacggtagcggtgcgagatgtgcttgaaagcaagtccgtggctcagttggcgcaaaccgcagaagtaaaggatgagaagacggaaggccaccaatctcttctgtcgcctatgcagaagtggtatttcgagtccattgccgatcctgagttgcctctgaagtccagtggtgcccacagatacaattccaatatctgcttggtacctcgcaaactttttgaatattcagaactagctcaagccgtgggtgcgcttgtcgacagacatcctactttacgttccagatttcagcgtcataacgtcgctgggtggcaacagagtctacacagtgatggtgatcaaccgtttgcgttgaggcattacactgtatctaccagcgaggaggcggaggcccttattgtggaggctcagggcag

SEQ ID NO: 14235 - DNA, 515 bp, Emericella nidulans
gtctaacggaagggatatagtatgtaaacacatcttgccactgatatagcgcctgacccgatactgcactgaatctacttagctgctaaaatgcgccttaactgagcgggcacaagggaggatcgaggcccactttatcaggccgccatccgggtctccaagcgaggcgaacctatcgccaccactggggatcgctataaactagaagatacccgggctgacaaacatgggaactgccaacttatgtaccaatgggagaacggataccgaaccattgaccaagcaccgtatcatgacctttagagacgaaacacacttgatagatcgatatagccacggagcacaactaccaggcactgaccacgtgccgctacatccatacatgacctgtgacaaactcagtttgtagccagtactaatcacactgtgctgaacctgggctgtagttgacaacgtgctagcagagtcacctagctacgaccgctggagactgcttatataacgctgcatcgcat

SEQ ID NO: 14236 - DNA, 2630 bp, Emericella nidulans
ggcaggcccaaggatccggtgttgaatacgtattcggacccacatgtactgtgcgaactgtgcagagaaccgaaaggggaaagggcaccatattctgataaattcgatctgtggttgttgctgtgctgaatatgtacagcagagagcatatacgcaggtttggacagcactctgtacggaataggcacatatttgggactaaggagtaagggtgttgtgaggagtaagcggcaaggaccagccttgaatatgacctccgattccataggtttgactatctgtttttttgtagaaaagtgagctttagtcgtggtccatagtattgacgccccgccgcaaattcgcacttcacgggcagctggtatgacctaagaaagtagtaactcatgattacccagtacggctccgagaagtaaggaaatatggacgaggatgagtacgcatgtcatgaaacacacaagaggacgcctctatatcttatgagtattgtcaacagaaacgacgcgcttttatgaatatgaagaaaataaagcagaaatacgcgcgggttttttcggttctactactctattcagactccaaaaccgcagcctagaaggggtgatgttagcactggttattctttagttaaatgaggggggagctacatgccctggcactctcatatagcggcgagatcccagtccagtatttaaactacgttcagttagctcgcatgcaatgagtatgattgaagcaaggaaacaaacctgataccacccttgaccaactagcacctccaaaccaggaatagtcttccagcctgaatcagacgccagcctcatcagtgcggtcacctgaggcttgtacgccatctcaagcaggatacgcggcgcatgctcaatggccttcacagcttcagcgtctgcctcctgcgcgcgctcgaacatgtggcacagtgtctcacgcatagtcgggtcaattggttgatcggcggggattgtaccaatcgcgacgtgcggaacggactcgaagcttgaagggctctcaacgatgcggatgttgtagctgctggggaaagtagagaccatgttttccagcttagacggggtgcggccaacgatgtagatgggagagtagcccatgttgtgcagggcgtagatggctgcacgggccgtgccgccgccgccgacgacgagggcagactgctcttgatcctttctcttgggtccgtagacacccgctttgcggagggacagaatcattccctgccagtcggtgttgcggccgactaggcgtgatggagtgttcttgccagtcgacacgggaatgattgtgttaacagcaccgatgatctcggcttccgcggcaacttcgtcgagaaggggcatgatgtcgagcttgagcggaattgttacggaagcgccgccgaagtcaggagagcggatgaactcctgcacatcttgggcgttcgtagtctccaggcgggtgtagttatgggggaggccgacctgggcaaatagggtgttgtggagagctggggagcgggattgggatatgggactgccgaagatggcgaacttcttgggcttgatttcacccatgagagacaggcccttgcggatctcggttgcggagagttggccgggagctgccttgaatggcaagctagggtgagacacgggtgtcatgaagccgttgaggatgcggctcagctgcccctggtcacccatgtttatggcgatgagagggacatcgtgagcttcagcagcccagttcttgaacttccgcagggctgtgttgtcgtcgatgtttcgtgcaacacccacaagtttgataatgtcaccatattcaagcgctttattgtagaacttgatccaggacatgttggcccaagaaagctcgcccttggggtcgtggtgcgacgcaatgatcttagagaagcccttcatctctgtaacggcccgcagcatgtcttcagggaaagcgatctcgagatcgacaaattcacacccggacctgaatgcaagacggtacagctccaacgcagcgtcgtgggcgttatcggggaaacgaccgccctggctctgggtacggatggtgaagatgatagggagtgtgacacgacttcgcagaaaagagagctgctctacgacatagtcaacagacggaatgtcgttgttcgaggcgggatccttaagaagatcgacccgtagctccacagcgtcagatccgacacacacttcctcgaggatgtcgcctgcttcacgcagatccggtagagtcagcgacgcaaagaaagagtgctctttctccttgataatactgaggctgtcaatctgcccggtagctacctgcaggaaccggttaaagtcctcggacgcgcgagccagcccactgggagaagcatctcggctgtaatattgaatattactgcattcctggaaccatggcttccgtcgaagccacacgcccatcatatcctcgacgtaagcaggacgggtcttgtcgattgacaaaaagtccataatcttcttgatgtcacgcatgaggagcagaacgttgcccttggtacaaatggtagtcagtcagcaatttccgagctacggcatctcaacaacaccgacaccacaagcaaaaacgtatcctct

SEQ ID NO: 14237 - DNA, 2752 bp, Emericella nidulans
aagttccccgtgttttggtagcccgaatcggaaggggggggagcatacccgccatgactggtcacgccggttaaatactgcgcttcattgatagcgttgctgtccactgggttgcttctcactgctcggtctctggacttgagagcaagagggggaagtggcggctcccggggatccaagaacatgtggtcttcatcctgctcttcacgagccttctccttaaagtcagaagaggagacgatgaaggggtgctttggctttatatccttcacctcggggagtgatgactttgcggccttccagccaacctcttttgccgtatcgtagacggatggtgagtatgcagcagcgtcgctgcgaacagaaattgggggtggggtccgaggcgaagaaggcatcacggtctcgtttttaccagctttcaagctcataacgcgatcatgcaccctgattaattccggttgaccagtattcttgtattcgccggttcgtgcggggggagacgagccatcaagcagcatagtttccaggcgcgcgttcggtgtgccttggccaacgccagtattgtgcacaaggctatgcttgaacttcgcttcagtcttcccatcgtcgttgcccttggtgggcggaatctgcacagagcggcaagacaagatactctgcttatctgtgctggcagagtcacgaaattcggaggtatggggtggcgcagagttgggaaccatatcgccagttctggtcttaggaacgtacaactttgcctcactgaaggtatgtgtaaacttggactgctcctcactgtcagaagaagtatgctgggttccactgccggagctaccgcccaatttaggcatactgctcatgggaggaatgtctttccgatattctttggcgagatccttcaagctgaacttggaccgcagcgttgctaccttcgatttcttctttttatcggttgaacccgagctgcgatctgaaggcatagaaggctctgtggtagacctcttcttggtcacgttaggcttgctcgtcacgcccggcttgtcagctgtgggcatctccttaggactagcgggatgaggttcaggcttcagcagagccagctcagcgttgttgtctaagcctgagggcttggtgattgtggaaggctttcgagtcggcacttgaccggagttaacctttgtcttatgcaactgaagcttctcatagagcgcgtggaaaggaccagtgaatacttgcctctgtcagagtcagataggcgctgttctcgttctctagctttcatctgagcccaggcgttgtgctcgacgggagacatcgcgacaagtagtaggtcccactaggttccactaggtcagagtcttcacaggattaatcgtagatgctgaaaacaagtgagaatgtgggcttggttggttgacaagtgtagagagctgccttcctaccaccgtaggtggtgaacacaaacaccacagttggccgatctggtgagagggtcaatgtgttccacaaagaagtgagatgaaaacaagcaggcaggaaagaattttcaaagaatctgttgctgggatatgaagtttgttgatgcgcacattattaacgtgggttgaaaaagtgcgcatttctttgctgaaaatgcactgaataacagggcggcacaagggacaataaaactccaacagacatcctgtaatgacatcaggtagagtcatactgtagctaacctttaggaaggactttccgtgcacctggcatccaattgagtagatgatggcatgatggacggagaagttggccgtaaagcttgttgaaaaaggggggagcacatgaggcagcagcactgaggattggatctacgtatctgagcgagaagaggtcaaataatggtcttcgttatcatcaactattattaacactcaggcattaatggattccggccggccggccaccttgggtcagcctgataagtgatgcacggacacgccattttcaaagagtggatatggactgagtagagtaatcgagcatccaggacattcgtcctttggtatcaaatacagggaattcgtcaaatcaaatgagtggcacaaacacgcagtttgggggattaggcgtttcctggggtatatagagcctgccagtggaaggctaggaaaggagcagtaacaacgatcatcaagaacaggtccctgaatcacattagcccaagacaaagcataacaaattgcaaattatttctccatcacatctagtcggaaacattctctagttcgccctcccacggcggcggaagggtgcaaatatagaaccaatgaaattaacaaacacagcacgcaggatgttcttcaaccagctgtcattcttgtgattaagagaaacagcatgtgactgaccggttctggcttggggatcgggaatcatatcccttgctcgccgctgcgtcgtccgcagtctcttccgtggtctaaggtggatgaagtgtcgcggacgggccactctacgtggcagtctgtgtctcattttcttggttcgcattctcaggagccttaggagcattatctgtatgacagggaggttgctctgtggatggttgcttcaacttcttaacagcgtctaccattgccgccagcgcaaccgtgcaggctcagcctaagctgttcatcagtgacagatggtgacgttgtcacgtagggtgcagcactctataatctcggctggttgacgaacgtgtttcttacagactgtgaggctc

SEQ ID NO: 14238 - DNA, 528 bp, Emericella nidulans
aatagcgccaataatcaaggagttactaatccgcgtctgcatctcagacggataccgcgagctacctagcaggtgcttgaagatgacatttgtgggatttgcaaggccgttctggaagccgtcgctgaagttggcgatgtactgtaggggctaatgagcatgactgtgcgttgattgatactcctatggcgcatttagggaacacttacacaactcaaaatcgtcaggttactctgccatcgggcaggtcgatagggcttctgctgttcgatctcctggtccacaaccgtttcctgggcttcggtgcggctgtctttagaggcgtttgccataaccatgatgaagtacaattatcgtaaatactttgagccttcattgtggttgtgagcttttcaagcatttattgactgctgatctgatcaggtaattaaaattgataaaactggttatcacaattggttgtgtcaggtgtagtgtggatgcttcggacacagtccgctctattcaagcaaaaatctcagcttgatt

SEQ ID NO: 14239 - DNA, 2101 bp, Emericella nidulans
ccaggatcacgtcgctcgcatcgaggagtctctgcactcatactgcctggtaacggctttttgtgcctttgtatttgcgcagacggggtatgtgtcttggctgaacgccggtaatcagtcggcctcgcttgggagactgttgctggacgaggccatggctgcccgtcgccatcttgatcttttttcagcgtcgactcgtcaaggaatcacaatttcattcttgctctacggttgccagattggcatgggaaaccagcggcaggcgtattacttcttgcgggaagcaacgactctatatacggcgggcatgctggatccggctgatgccgacgacgaagacgccgggaacctcttttggctattattgatctcggagaggtataaatcatatgtagggcctccgtttacagcgtcaagtctgacagatcatatgcagagcgcacgccatccgaagacatcgtccgatcacgctacaggtcacccgcgacagtccaatcctttgtgatactcggtccgacgcattcagtctgggcttccgctgccttgcggagctctacagacccttcgatcagacattcctcagccgctggaacggaaccgactcctccgcgacaacagagcagctcatccaacttgaggaccacctcctgcaagccgttccggccgacgttgagcttcccgacatcgtcctcgccgaccttcgtgtctcgcaacagtggctccgcaccatgatctggcaacttgccacctcagctggctttctgtcgagcacgccgtcgcgtccgtgtctgggcttcgcctatccactccagatcgcgcgagacctgtcgctggcgacgtggaaactatcgaaagagagcttggaaacgcacggcattggattggtaagccgagcaccacttcaccacccgctgcgaactaatattagaaatgcactaggctgagaaaatcttcgagataacatgcaccctcacagacgtcatggcctgcatgacctccgctgggctccggtcgtccagctttgaccttggccctcaggactacctcaagcacctatgtacacttattcacagcctgccgggtggtgagaccaagttcctccccctgctcctggcgaagatcagccagacgctaccgtctatgctgacgcctgtcacccgccatctcagtttgccctcttgcatggccgagcaagtgtcggtgtcgccaaatgtcggcatcggctctccagtgagtcatcgggatgactggagtaaagcgctgaattgggctgaaatgagccgcatcggggatcggacacctgaagctaggcggggtgcttgagctggctagacggcaatgaacggattcaattctgttgttcagcgttaatacagacgacgtctaggtgggtagaagggttctgagagatggtagcagagcgttgcaaacgatgcgatgcctctggccttctaatatcaggacatcaggactacaatgtcgatcgacaggagttttcttcagcttgccgacgctctcgacacggcgcaaaccagcctcagagaaactcctttgcagtcgacaacgaggaaccttttcgttcactacttactgtcactctctggcataaccgaacagccgtgtttccataagttccaagaaacatgacagccacacgaagaccagaaacagaaatataagtcgtgacgtatactgagaacttctcatcctcaccggccagctaccatcccaagacactggaagactatccacaaactgggctgcctcccctaatttaacctgttcgccactaccagccttgaaaaagatagacagacaattgctatctcacagcgggcaaatcttgtccctgtcaggatctcatatccctagacttgggcagttatgcattgacaggagagagggtggtaattggtgtatggagacgagcgcgagaacgtgaagcatgagctcgatcctcgataatacgatgataacagggactggaatgagccgactggatctacgtacggtggcgatgagaatattttgagggggcgagatgagttctgccctagcgctgagcaattgatgccactatgtggctggataagaccgtccg

SEQ ID NO: 14240 - DNA, 5655 bp, Emericella nidulans
agaacgccataagcggccgtagcgtcctttgcgaccgttccttcgtcttcactgatcaagcctcaatgccgatgccagcatcctgcatcgtcgcaagggcgtgtcgggtcacacccttcttgcttatccggcaccgctgtcagcgtggcttgtcgacagatcttctcgtccgcacccacgaggtattggccattgacagaagaagtcgaagccttccgcggggcagcagcgttagctgtctgaagcgggccaactttgtgaccgggtgcgtacggagttgacttggcccctttgcgagccccattgttggatgcaggtttgtttgcacttttacccgagcgtatttgaggtgtcttgccggcgcgaggcttcgacgaggtggtactggtgtttcggcttttagctttcttgggtttagacatagattcatgggaagaatcatcgtcgacctcgttcttaaccataccaccctcatagtcttcctgatggtactcattatcgtggctgtcatagctggcatcggagctgtcgaaactgggcaggatgtcatccaggcgcttgtgcgtgtgcttagcagtaccgggtggaagcattgggctcgagtcaagtctctgcctgggacgagcgggcagatcgtcgtcatcctcactgtagccttcgccgtcgcttgttgcaccggtggaagacgcagcgtcagcagcgccactaaacgcatcatcgagggtggatgcggaagtacggccatgagagaaattggaggcatctccgagacgtatcaattgcagcgcaacgtcttcatcagatatgcagctggctatggtgggatcgggtgtgggaaggatacccggaccaccgtttcggccggtcgaatttggatattgcccagatgaatggacagtcgcacggtcgcgaagacggtggccgtgttcaggaaccatcggtgtagtgtatatgccatttcgtgaagtatttcctccatagatgtgatcattgtgtccataactttgaggggacggcaaaggctgctgataatagttatttgagcggtgcattggccgcgcaaatggcgagcctgccccttcctggccgatagagcgacgctgcggggagattgaggaggtcgaggttgtgagaggaacttgaggagggacgaataatgggagtcctttaagagagtaaagtattagcaaacttatcatgattatatcattgagccacaaaagaaagaaaaagcaattctcaactcacagaactctcgaacttaggtcgtttgcgacgaccgtcttgaaggatattttccatgctgatctccgagctggcaaagtgttcacttcgagattttttcgccccggagacggagccgtagccaccatcgctgtcgctgtagccagcatcgtcatagatgctaccatgagtgctagagcccctgctcttgagccccggacgagactgctgcttgtgctgggaggcgctacgacgactcttaccagacggtgacacactgcgcttgcgagcgacccgagacgcaggccgggacggtgattgcccgtgctctggatgttgtattggctgcatcgcggacgccatttggaatggttcacctaggctgggccgtttgcgattgtccatggacatggggccataatacctatctccataaccctcttcgtaaaccggaacgggcattacccgcacatatactgtcatattgttccttagattctcatatcttgcaatgagtgtaataccgttcacatcctcgaagctgacgccggcagcgccatcatagattccatagaagtttttcactgtagtgacgatggaatccgtggtgtcatgagggtagatctgaacccgcatgggaatgcgggctcgagctttggagttgtcatcgagtaataactcaaaggcgacgtttttgggggtcggacttttggtcggggacggctcttggaggggacggtggtcggtgtaggtcggagactccccaggagatacaagctgttcattctggacagcctgcatgatgaaaatagtccaacagggagtgtcaccgcacttctactacatggattataggatcaaccggctgttcgttggtcgagaggacaagtcgagggtggggaggttcaaggtagagggagacggcaggaatagggtatgggcagaatccatccaaacctaccacaacaggaaatttagagcggtctggttgatagatggatcacccgcgattattttgaagcaacgattgatggccgaaggtgggcggtggtgtgagggcgatctaagtcgcaagtgccgagagcgtgggagggaaaaataggacgaggacgagagaactagacagaaaggagccacaagcgtcagtatggagagtctcaggagattttactaagctcgatagcctgcaagaaagatatcagatgggatttgagatgtcgattcccatccgtcggatcctgacgagttgcagacgttgcaggttgagggggaagaggaagaaacgatccgaaacgctcggaagacgatggggagcacgaaagacacacctaattctgatccagagtcttcctccagagtcgcagatggtcagtaaatgcagacagtctctgatgaggcggtcgatgatggtaggcgaagcagttcgatggggaggggagaaggtgagtggattgtacgcagcgcttgttgggcgatgtcagtcagcggtggcatagacccgaagcgagccaggaataacgaggcaccagagcgtccaaacaaagaggtaggggattttccaggttcatgaagtgtagactaaccaagcagcgaagacggcgagtcgcaagagagcgcagagtcgaacgaatggtggtgaggatgttgggttgaagaggaagaatggagagcgaggatccggtttcacctccaagcgagcatcactcaagttatccgaattggcgaccccaattgccctcgccaacacccacttccttccttcttaagtttcttcaagccgaagtgtttctttaaatctatcttctatgctcatttgaacgatatgcgcagcattctcctacgtcgcaaactgctgatttgcgatacttccggctcgatatagcattgttacctgaaagcgaaaataggaaattaggcctactgaatgtgatataaactacagaggatagatcgccaatattccacctgctatattagaagtccatgctcctagtaacgaactcaaggaccgtaattgagggagtgcgaaatgcgacggccgctcggtccagcgcttggatatctccttccgacttacggttctgctgcacatttaataaggaataatgacccccgtctaattccttctctttctgcggagattttgctgagtccggacgagaagtcgccatgtaggcagggcgatagacggacaagtggaaaggtttctcaagcgcagccacgtcgaaagatggcaggtcgcatatcggccaacgactggtggagagtgctccaaatctattctactagcagcagctcgatcgctaatgattaaatattgggttgcgacctcgcgcgcgctgtgacaagcgcgatataaaagcacaggttgaccatcgtcagtcatggacgagtgtggcacgaggtactcggcagctatgtagacatgggacgattctggcgctccagccgacaacccgccaggcaagacccagtcagtgttattagaaatgactgtttatcagttcgcaagctctgattgtctatgctttctatactcgactaccgtagaccgactgacgaggttagtctccgtgatgggttgagagcccagcgtgaaccggccgtcaactgtagcagccaaacgggtgtgtacgtcttgacactgacagggcgaaatggaaagaaatgttagtctaacgagcggcgaacgcattatccgcgtgaggcctgatgaattggccagagagccaccaaccaagtgggtggccgcaccaattgctgcgtcttttcatgatctgcgcctgtccagactcgctcacgagtcactcacgttgcttacccctctcttgcccacgacgatggagttgccaggccggtctacgtagggattatccttcgagtttcaggcagaggaaatccagtaatttgatgcgcggggagttatcgcaggagctatgatcgaccgatttgcccttcgtctcttaccagccctgcagaacggtgtgacatcgcctcttcgcagagggtccccgccgagaggatgcctgtatattacaagatcaaatatcgttctattgaaagaggcgcaacagttctcgtttccaaagcgcccgaaaaagatccaaattagctggcgctgagagatggacggccgttagtcgggtgggggaaagttgaaggatgcgcatcttccagcgatcctggtcatcgcatctataatatatgtatcatatgtaatccgcttgatactatgtcgagagatattaatctacggtttacttatgctgctgagttgctagttggctggttcagacagaacaaatgagagaaaaagcaacgagaaacgacgcgaacgctcgacatctctctttctttcaagctcttttcggagtgaggcggggctttttgtctagtagccaacaatgaagtttcaacccagcgcatttcaagaaattactagttgaagtgtacaccgaaagttcgttgagaggtggacagttctgcatttgagtcgctgcataaaacgcagcgcacagtgacaataatggtgccgtacctttcgtttcacctgcccctggccgatgtgcaaatacatcggcatccagcagtcaacgatggctggtggtcattgtcggtcatctgtcggtcatctgaaaatgcgacaaaagcctccgaacccgcaggctgatgatgataggtaccgccggatccgcgtcccacattggggggactcttgtggcttttttggcggcgctggcaaatcatccgggtgcaaacggagtcacatcctcacaaaagtgttgcgacgaagggaatcggaattcatcccagccatctcctgctgaagacgacatctaacctgatgtctgtgccaaagaatgacaaagttccgcaagggcttttttgctgcgcagatacccttctttgccccccaagcttcattcattcggtgatcgttggcgaaactctgctgcttgaactctgattttgcagcctaacctccacactttagagctgtagtgcctggaattgatgcgttcctctgcaattgaccgagagttaggcggaacagaaattggcacgtgacttcgcgtttaatgggcggcagacccgtgtcggacttcgcgtgtcgagcgaccggaatactgactggaaataacgtaccccagaggtgagggagctcagatataaaacatatctcatagtcgcaaatactactcgaatgacctagaaatttatttcttaatttctgcgcggctggccgactctttgctgccgatgggcttatctaccctgcagctgggagacgcgtcgacaccaaccaaggaactgtcacgtgtttgatgatgtcatcgtagcttgggcttccgcatagtgagtgcttcgaacagtctctgctacgactattttcatatcgcgattcggaagacagagaaggatttgttatac

SEQ ID NO: 14241 - DNA, 2897 bp, Emericella nidulans
  unsure (1)..(2897): unsure at all n locations
catctccagaaatggttccagatagtggactgctatgaacagagagagagggtgaatcggctccttgaagtggcagacaacatgctgagctcagccaatgaaccccacgacaagatcgaccttgccgagctcaaggttgcagaagaggcccattataatgcgtataccggagaagaggatcaagaacgtctaccagagactcgaactgaactacttgaagatatcaaaagctgggccactgatccagataggcgacctgtgttctggctgcagggtatagcaggaacagggaagtcaactgtgtcgcgcacggtagctaggtcgttaaataatgagagcttactaggtggtagctttttcttcaagcagggtggaacaaaccgtgaggatgctaaacgactttttaccactctcactaaaccaataatgcagagattaccacctcttcggcagccaatcaagaggcaattaggacgtctcgcgataatggaagcaggaatccacaggaacagtttaacgaactgcttttcgagcccctcaagagccttaatcttggcttaaggactcctttaatcctggctgccgtcatcgatgccctggatgagtgccaggtaccaggtgatgtcacagcctttctctcaattctgccgacattgaacgacttggaagaagtgcacctacgagtgttaatcaccagaaggccagaaccgcctgttaccaggggcttccgatcaatctataaggatgagatcattctccaccagattaagaggtctaccattcaacatgatatctcagtctttctctagaaaaagcttgacgagataagatatcatcataatctacctcaggtctggcctggttaaaagatcttcagggctctagtcgatatggctgtttctctatttattaacgcggcaacaatataccggttcatcaattgtgacgatgatataccagacgccaggctccaggttatattatcctcccgctcaacacacgggttgaaggagattaacccagagtatgcgaatttgtttgacatttatttccagttctggagcatgttgtacagcagaaaaagccgaaagaactggagcactggatggccgacttccacagcatcgtgaatgcaattattctcctcttcagcctgctctcatccgtcgccctggccaagcttatttgtgttgagcaggagaaagtccggaccagactgaattctctccagtccgtggtatcagtgccaaaaagctgtgatgaccctcttcagcttcttcacctctcgtttcgcgagtatctgcttgataatccagcatccgataagttatgaattgataaatcagcaggtcatatgcagcttgctcatgattgtcttcagtgtatgggtcgggaactgcagagagatatatgccgtctttcagatccaggagtcagagggcatgatattggcaaggccgtactcgacagatatgtttcatctgagcttcgatacgcatgtcgatattagaaacgccatctagagaacagtgaagtgattgctatagactagacaataatagaagggttcccgaagtcacatttcatgcattggctggaagtcatgagcctttctgggtgggtttcagagacatttcacaacatcacagctttgcaggcactggggaaggtcagttacgttgaatataaatctgaagatttagtactaatgtgcagatgcagcccccttggttagctgacttctacatgatgcaaagcgattcatcctgaaaggtcgtcagatagcagatgaagcgccactacagattttactgtgtggggctggtatttacaccaagaacggcaataatccgtgaaatgttccagtcagagcttcctgactggatctgcctttacccacaggttcctgagaactggaatgcagaattgcaggcgctcaagggacatactgacccaattgtgtccgtggccttctcacctgatggccggctgttggcatctggctcgtttgaccacacagtacgcatttgggacccgccaccggcgctctgaaggaagtcgtcagctctgagggacctgctatcagactagggttttcgcaagattactcttatttgaccccgaccgagatcgtttgggattgaatctagctgtggtaacactaggccgagttcatctaatgtgcacccancgtgtttccctaagcagtaactggatagccgtaaacaggaaacaggtttttaagactcccctccgaggcgcggttgtcttgttctgcgattaaatccaacacacttgcttaggtcaccgttcaggttgggtcactattataggaatccggaaacaatcagtgtccactagttttgttttctgacttcatactcctcggatattgatataaaagaagggcttgggagactgacagaagatatctaggcgtatttctttcgagaatacgctactacttgattccagactccaatacactgactaatccatagggtctagccgccaaagttagatattagtcagtggtatttctcaatccgcactacgtcctaggcttttctacccatctatataatcataccagtcacaccattgtgcgatgatagtttagatattatgattcaatgaccctaatcaaccctcctatcacatatattgaaccccatgtttgattcaggggactttttttaaaagtatagttcatcttcattcacaaacaagccccaagcttgcgcaacgcataggattttgcatgcannananaaaaaaataaaaaggaaaaagggaacttacagctgccggcaggagacaattttggggctcagaatctataccacgaagtttaattgctctcgacgagagattagtctttagcaatgaataccgag

SEQ ID NO: 14242 - DNA, 452 bp, Emericella nidulans
cgggaaggacatgcgcatgacctaggggttgattattagggaaacagacggatgctgccaaatcgctcgtttttccgctgcacaggtgctgacggtctgtccagggggcaatgtaggctgcaggctgcacacagtactgggtggataaccgccatgcacgagcaacccaagaacaagcgcggcaacaggctctgacacaccaagaccaaccaactgatctggggtacagtgtgtcggtcgcgcgaaagcagtcttggaagaatcgcctgcaggtgtcaattcatgacccaagacaatgtcagtctgtggctacgcaccctggatctaaggaaacgtgtctgtagactgcgtgagcagggctgactgggctgtttgctgctcggatactacatcacagacggcacgtatattcagggctctcatcgatgccaggatcattacgggtgccaccg

SEQ ID NO: 14243 - DNA, 612 bp, Emericella nidulans
aagataggcccccttagataattactctcatatgaatgccctacactactgtctttgtgcccagtacaggcactggggcgaggccgggtgcttcataaagcgatcaagtgaaacgctatctttaccatacgttctcctctgggatacatgaatactcattgaacccacacgccaaccatgatgatcttacacgagacaccttcaactctgcgtctgtgggggagggtcctcataccgctcatgactagaactgcacgactgtcaccaggtgccaggattgtcccaccatactgcagcgatgacgtaccaatatcaccactattgtcgatcccagagactgcacgggctaatcgaaaagccgtacttatatgacaagtagacgaatctatatatgagccccattgagggtgactcgagcgcttcaatctatgctagggataccccagcctgttctatagcggatggagagtggaatgccgtcaaattggcggtacccacatcaagggacaatgatgcgtagcatctgttgccagacggctcgggtaatctggcttagatgcgcatggttcaccatacatgatgaagactgtgaaataacgctttgctcgagga

SEQ ID NO: 14244 - DNA, 2368 bp, Emericella nidulans
gcgtgccgtcgtggtttttttctgcttcagctgtgtcgagttgttcccatacgcctagatcgtcgtggctaggttcctggttgtgctcaatctgggtatcgatcataccgggaggttgatttgacgaagtgtcgtgtttggttatttcagtgaaatcattgtcttcgagcggtgtttgagaaggaatgtccgggtcagacggcgtctgggattgctcgatgttctgcgtttgctctggctctggttctctttccggcgcagactcaagtaccggtttgagatctggtactatctctgggacaacctgggtcgtaacctctgatttagcgagggggttaggctcctctcctgtcgtagaagcagttggcagctcaggcgcctcttcaggttgaggtgtgtctgctgctagttgttgctgctcaggcccagtagagggaacctcaggttgaggtgtgtctgctgctggttgttgctgctcaggctcggtagagggaacttcaggctgaggagctggagcatcctcctggctcttgccctttttaacgcctttcttattcttcttgcctgacttggccatagtgatacacgcccaaattcaatcagatagtagagacgtgtttccagtaggctggttatcaaagtatgttagttgaatggcgagtggaccaatgttgagtcaagtgaaaagtgaaagtcaccaggtgtatttccggattgatatacgtacagacgcaggctaaaggagggccatgcagcagtagtgacagcgataaaggcaaaggggagaaaaaaaaaggaggcaggggaaaatggggcacgaaagcttcgcgtacgcgcaaatagtcaaagaccacgaaggcagaaagtcggtggcagtagatgactagtatgcagattcaagagccaaagcaagttatgagcggatatgtttctgaaataatgaatttctggagtagaattagacagagtaaagacaaaggtgagaaagtatcaactgatggcctatgtcaagcgacggcctgacgacgcgctgcacacggacaatgtctgcgtctcgccttgggagggctaacaaggattcagagcggaccgaaccgtggggatgaactgtttccccgacccattcaatgagtcaaaaacgggcaggaaaggcatgagcatggcttcaggtgcgaaacggtgaagccaatgtggaccgagggcttgtatacgcagggcagcgatgacccaattatcgtgcatgggtgcagaaatttgggcatcaatgactgggcgttggttcattggaggactagcaacaaattcctgggaaaaagaaaggaaaatccttgaggatgaggtaacgctcgaacgccgaaagagaggttgggctgtggagtcagtaacgctaaagctgtataagcggtgacatgttgttcctcttatccagagacgatcaagcgcgcatgatttggcaaggaatgaatccaattgaatccctgcaccgaaatagatgtggagagagctgccatagtgaggcagatggtcgaattagccatgcaagagaaccagagcgagcccaattctcattgaacggccatcattaaggagcgccaacacagcagccaactgactacccacatagtcgggggcgattttgctcatcagggccggaggagctaaggacagcatagctgtcatagcaagtgtattcatcaacctgaccacgaccgaaagtacattttgggcgatgaagcgaacagaatgaagctagagaactgaaaagatgaagatgaagagcaggcgaagccctgacttggacgctcaggccatcagatgaccatcagacgccaagactatattgcacactatcccaaaaccagtaggtcatgtgacccgtgctatccggctccgcctcttcgacctcaactcccacttcggtgacggcattagaattataggtgccgccaattgtcgtcctccacaccatgattcttgcccggcgttcggtagcttcggcgcggcttctgctgcgaaaccagcaacctcgacgatttgactcacacgcagctcaccatgccgagcctgtgaacgaaagcttcggcgtaagttctttcctcggggtccctcggggtacccctgcgccgacaatggctgacaatctgtcttgatttgaatacagcgtagcttctacgtcgccgtcggtaccttcgcttcccgttcgcgctttaccagttcacgaagcctgggaaggtcgccgactcgcaatcagccctcacccgcttcatattgaagtggactccctcggagatggtccttgtcccgtgttacgcgcttcacacatgccgctgtgagggctgcccgggaccgccacctcttcctcagtcag

SEQ ID NO: 14245 - DNA, 590 bp, Emericella nidulans
tatagaagttggggggagcgacggtgcagaatgggcgggagagggcggtgctccttcataacattgggttttgatgcgggccagtgttggttaagacagggcggagtggatgtaatgctatggtgaaggtctggaagagggcaccacgatggaatcagcggaatgaattttggtggggagagcggtaggatagagcggacgcggagggaggaatcaatacagagagtgtggcgcatgggggggagatgcactgattgggagcaggctgtgaccgtgggggggctgtcttaggttgctcagatgcagccatgggatacaagggtgttgacacgagcttacaggagtgccatgtcagtggtgcgcgatcacagaagaatgttactggtggccacagcagtatgttccagcgcggtggtgtttataaggacgccgaatgcataggcttcgtctgcctccgtcgagtcttgcacagggactgggcatctggagtctgggagcgtatgactggcactggagagaccgctatccactgagtggcgtgagtgttttaaggaatcgtggcgatcgttctcaggccccgaacggaaatg

SEQ ID NO: 14246 - DNA, 785 bp, Emericella nidulans
aagatgcttctgaactggcataacctcatcgcccagtccaagaacgacatcgcaaagcttgtcgtgtatgaaacaggtaagcccatggctgaggccgttggtgaggttgactatgctcttggctttgcgtggtggttcgcgggcgaagcagagcgcgttcgcggatccattgcacagccgtctatctcagagcgacgcactttcgtgatcaaacagccgattggggtctgcatcgcgcttgtgccgtggaactttccagtggccatgatcatccgcaaagcagcagcggcattggcggcgggttgtaccgtcgtgatcaaaccgtccccggagacgccactcagtgtgctggcgttggcagatttggcgctgcaggccggctttggccccggagtgatcaatgttctgaccacagacaatttgaatactccggacgttagtgaggcactctgcaagcatccccttgtgcgcaaggtgacgttcactggaagcacggctgtgggacagctgattgcaaggcattgcagcgaggggctgaagaaggtgacgctagagctcggcggaaactgtccgtttattatctttgacgacggggatctggagcaggcattagctgctttgatgattcttaaatggcgcactgccgggcaggcttgcacccatgcaaatcgcgtgtatgtgcagagtggtgtctacgacacgttcttgcgcatgattgtcaatgctacaaaacagcaaaaaaacggccatggggcaagccccgggactaccatgggacccctgac

SEQ ID NO: 14247 - DNA, 1762 bp, Emericella nidulans
  unsure (1)..(1762): unsure at all n locations
aagaagaagaagacgaggagaccaagacactacggacgaagagagccaaggttctggaagagaagttgaagcgtgacgtcgttcgcaaccgtgctctaatgggtgtgaccgcagccttcgctctcgcgtaagttttccggtcctttcgttgctgtggaagcgcagtcactgatatacatgtctagagcatctatcccttatttcttctagaaaacctgctctcgtgctgctagaagcctgagctacaactcatcaagattatggtcataaccccctctgattccctcgattttgatcattgcccatcctcgcttggatctgaattatctcctctttattccttataactccttcgctgtcacatgcctaagttgaaaccttggctggagctctccaaggcccttcgaaacgcggcaagaatgatgtactgtgtccatgtttatttatcacgttataatacctccccccctttggttgtcaggttcgcatctccattccgaagagcagcgattatctcgtcgtctcagcgatcgacgctcgtttttaacgtgcgcgttctcctacctcctacctcctggatactcgatactcggttcttaatcctttccttcgcaaggttcctgtttctttttcttctctgttacaacatttcgcagcaagagctagtgcctttccaggaagatgacggatcatcgctagggtatttaagaacaatacaaacgaataaacccgagctgcttgtatcctagtagatcaattgtacatgaattgtagttcagaagctgcattgaaacgagggtgtcggaccggttcggactggagcaaatgcaaacatgcaaacatgatcatgatgttccgccaagcactctttgtagcgccaatctcggtcgcaaccactacatatctgtaccttctatctagtgtttagattattataccgctgctccctgcttactgccagcaatgaaatgtctctccctggtttagagctcacgcagccctccgcggagagccagtccgcttccgcaccgccaactcagattaatctctccgcaggttcagagtggaggttcgaggtagccttcgggaccaccgttcgagttaaggtgagcctctttcaataagatacattattggcttttacttttcccatcaagcccacctgcttatgttcgctgaatgagactgatcaaaagggaggaacggtttccagctcctaaccggcaccgcagagctcttcggcaccgaactcgccccctcacaaacctacacgttctccggtacaaaggccgcaatttacacgtggcacggctgcaccctcgaagtgagcgccggtgacgcagtctccggactcgatgggactacatctgcctccggccgaggcgggctcggagcaggaggctgccagagcgaatatatcgcagaggaaacgccgatggtagaatatgcaaatgttcactttgcactggagggcctccgtgctgaagcgaaggcgagtgggagggacggaccccgcgtactgatccttggccccgaggatgcggggaagacgagcttgtcaaagatcctgacggcctatgcggtaaaggttggacgcgagccgattgtggtcaatttggacccgantgaggggatgttgagcgtgcctggtacataannnnnnacggcgtttcggccatatgccccgacgttgaggaagggtgggggagaaaccctataaatgggccgagtgcggtgccggtgaagtcgccgttggtgtttt

SEQ ID NO: 14248 - DNA, 901 bp, Emericella nidulans
ttgaaaaaatgggatctgaagactagcaaagtgaactgtagcttttatctaagtagcacaagactaggaagggttctgtgacaagtaaagaattgggtcgagggaccttacaccttccccttccccgtccccttccccttccccttccctttcgtttgccgtccgagaagacatgctaattggataacgtacagtcatgggtaataagatcacctaccactcgcccagtcgtgggtgctcgatggaactaggcgccgccattacagtccttgttttcagtcagtacaagctgcccgtgtcgacatccatgtgcattacaggcgcgactgttggagtcggtctgtgcaacggcaccctcaaggccgtcaactggcagcgggtgggactgttgggactgggatggatcatgacgatccccattgcaggaacgctggccggatgtctgatggggttgattctgaatgcgccgcattttggctcatagatggagtttagcttgtttctctctttctttttctgtatatgcacatgaactaggctaggctttaatagactgagcggagcctgtccagctctcactttcactctctacttaatgcaggtcaacgatatagagtgaggattaacgtctccccttttttcatcttcttcacccggtatgtcttctcgtcgccttctccactcccatcactggcggtgggaacttcgacctcacaatcggacccaacagtcaaaagaacccttccctccttgtcccattcgacccttacttccctcttgtccccatttccaccgattccaacagtaatgaccccctcccctcccccctcccagagctgcagtctcggttcaaacctcaccctcctgcacccaggcgcagcagacctgagccccgtaagcc

SEQ ID NO: 14249 - DNA, 654 bp, Emericella nidulans
actcgcggtgtctctggcgagtcgctctgcgctggcgcagatggctgggaccgaggcgatcttgtccaatttgtttgcgcggtggatggcgaatccagcaatgccaccgaacttcaatatgagcatgaacctaagtttcggcctgttcaaccttagcccttacccgtcgcacacgcgcgacctcgacaacaacatcaacacgctacaactgacattcaacaaggaagatgagattcggcgggagatctcggcgggtcccatgtacgcggtccctagcaccggctcaaatgctagcctcaacgggcttgtaaaaatcaggatcccaaccgtgcatatctacggtgagcgcgacccgtgctatatcgtgggggtccagctcagcgaggtgtgcgagaagaggagcagaaaggagtataaccatggggggtggacatgagattccgtggtttgaggctgtttacggaacgtatgccgatttagtaaggtgggcagtagggctgtggaccggctggtgatggtggctatctattttcaatttatctctttcttcccatatcatcttcttcacttcgcctttcacttctacatatttcttctcctatttcttctctatcccatctctaataaatctcacattttacccctatctccttc

SEQ ID NO: 14250 - DNA, 1161 bp, Emericella nidulans
acggtgctaagtacagcgtaagctcggcttcaaccttgctcgaatcttccgtatgcctaagaatcagactcgtccgcgtagatcacacagggtctttctctcgaagggttcagactgctccattccaaagacggccagagcagcagcggatcatgggccatggcagggttcagcggaaagaaaatcagtatctcctggagggctgagaccgtatgttctatggatgcttgtggactcggacattcttcatccaagatcggcacgaaaacagttagcaaccatgctagaaagttagaagtaaatggatatatcagacagaagctgttgcactacttccagtagtctaatcgtttgttgctttctctcagattatcagcgtaatcatctgcaagacagaagggttgattgatcctgataccctgtccactttcaagaataccgtcacgtaatttgcagatcggtggcagttggtttagttggctcttactaggtacccgccccgtggttccaattcccgcttcccactttgggatcgcctttctctgcctcctcatcgtccttccacttctctcgcttcttcgttcccttcccctctcccttttctattctctcgataatctcccgactctcgaggcttctacacacccagtccgcttcttctcctagcttgaccttcttgaaacgccctgggcgcacgtccagttgtgctcctgatctaccgcttcccctggatttttttcttgcttcgtctcgcgcggtcttgttgacttcacaggaataacttcttgtgactgcaacagaactcgacgccgccagtccttcgttgacaattttgtcccgaaattcgttcgccatattcactcttttgggtcctcgaatcttcggagacatactcctttttcctggtttcgataaggatcccgtctcttccattcagtccatgttcctttgagactacggattaaccttcgactacttaatattttgagccttttccatgttaaaaaacacatataatcctccgagaaaaatgccgaccatccgcctcaaaaccgttttcccactccttgctctgctctcaatagggcttttcttttggtgcattgatcgctatgatcgtgaagcacttatgcggttcaaacatccagtcgacagggtgac

SEQ ID NO: 14251 - DNA, 2417 bp, Emericella nidulans
acgaataccatgatttaggtatttctctgtgccttgaccctcaaagtcggggcatgccgtgtcggggaatgcataaggatgataccagacaaaagtgtttggaagcgaactccatgttgacccgcgcctgggtcacattcacgtccgcatgagcgggccctagtgttctccacctgagaattcatcacaatacaattcaaatcaagttctttatatctcatatgattcgcacggtggaccatactatggtggtatccatatgcaggtttcgcaaagtgatctccaacctaaatgagcacattcttgtcgccagtcattcctgcaagctgaatattctgcattatgcaatcattggacgccctctcactgccactagttacatagacgcaccaataatagaactcttcgaccagttggcacttttaacgtgattctaggtaactatacagaatacatgtcgaaattcttctctacgatcccactgcgtagcatatttatacattcttttggaaaagattcaacatctatagcaagaatggcccagcccttgcaaatataacgtaatcgtgcccatgcagagtgtagccgttataagatgacgaaagtgagctctaagcggaggagatagaaagattccattgtagtcatccgtagtcgcaaaatacaacataatacattgggaaaaccagcgcgatgaaaccatgaaagtaattaaacgaatatgtaaatgggtataattgtgggtatataaagatgggtgatgaataagtaacagagaaacccaagccttgcttgctactgattctcatcctcaatttcaacaagaaccttcagctcgccatcaagccagtccaccttctccgcggcaaggagcgccagcgtccaatcgccatcattctcaatgagaacaagcccctccggtagccaaactttaaatttccagcttatggatgcgttccaggtgttggagtccgaattcaggtctgaagggataccaggaagttcaccggcgaatttgcgcgctacgagctggcgcacggttgtgacgtctggaccctgagtagcgggaaggtcataggaagggaggatgcgcttcccgttttgcagaatgttgatgcggaggcggagaggcgattgggcgggagggggattggggtttgaaaggtcggatgaatgagaaaagggaaggggcggtgggataggctgggtttggggcagtgatgtgtggttttgagcgccttgcctagctgctagattgtcgcggataacccgtgagacgtcgcgggtgatgctacttgcgctgcaggagggaaaagtttagtggttttcttcgcatgcagatgatatgtcgcagacttacaactcattcctggcagggtcgccgccaatacgccatcgtagatctgcggtgctagtcgaattgagaatgcgtcctatgttgccgtcttcacaacaaccgctgcaattatagtctccctcgtgaagaatctgatagtggctatcaactgcagccacaagaccgcgccaatcgcctaaatgtaggcccgagagagaccataggttatcaagttcatagttatggttgtacgaatcatacgactttgaaatagaatccaagtctgtactataaccatccaggataagatcagtaaggcccagttctgtgacctgcacagatggttcactgtgaggtggtggcggggcagacgctgatagagggtgttgagttgagctatatccatcgggaagctgatgatccgcctgcatctgaaggtggtcctcggatgagaacttgggtggactcgcactgcggaagtcttggatactatcttctgtttttcgccttcttcgtgcctccacgccacctttcctggtttcgacagcgtattgtcgttgtcgttcgtttgtgaccatgcgcctcaacaacggaataacgagtgagatgattttctgttggtcccttggccagacgtatgtccgaggaggcataccctcgttgaccacatgttcaccgaagaatcgcgggccattgccctcgacctcgaggaagagacggacacagttccataaccgtaatttgaccatctctgtatctcctttcccgcgctggcctacgcagtcacggcgctccggatgcctatcatctagcatgtatgctttagccgcagcttgtaaatgtagaaaattttacggcgatagctccagagaagtgaacatcttcgacatgggaggcctagtatacttcttgttggttgaggcttgacggaatagtgctgcagcggagtgcagcccatcgggcgggcatccgcaagcgtctgcggcggagtattgagaatttccagttcttacgctgggtacgggcttgcatggttgacgtggtggtgacttcgattgtgagttgcgtgtgaccgggatgc

SEQ ID NO: 14252 - DNA, 1597 bp, Emericella nidulans
  unsure (1)..(1597): unsure at all n locations
gctgtgttcatgtgcaaggtcgattaattctctcagcggcttttctgggaagagagagaaagagccaccggcaaatttgagtccatctacatgtgtgcccatcctgtatcatcattaggcggctaggccccacgagaattcgagactcaacacttacgtctcgagaatatcggcaagatatctcttacccataacctagaaccacgagtcagccttgttgcttgcctcagctgttggccagcattcagctagcacgtactgtgtaataaggacctctaatctcagttactccctgtgatcgcggcttctttggtcgaggatttgaccgtgcaaatccaaacccgttagacttgtcttgaagcaggatagctgctttcttggaaccaggggcagtggttgaaaagcccttggaccacatcatcggtgcagcagccctctggaaagtcgacccctgggcctttcccgacgaaagagcagtggctcgagttatgggggacagcatcgtggctctttttaagtttatgtcacgatgattttacggtaaaggttcggttacttgaagtcaattgataggtgcgctgcaactaaagtaagctgtagtagagagtctcagctttgacattgatgattctgctagagagataagaagggaatatagaaaaggagtcgtaacagctgcataaattaggtgagtgacctgtttcatcatacgtacatcatccaccccccaaatagctatttccgagggtggcatgaaggtgaaataatagcattgacttgataatagcaataaatgcgatgatgtcatgatgtgcttgagaaacagatgcacggtgtgcagaagcttcaggggccgtcatggatgctaaagtataaatcatttcaggaaccaaaaccaatttggctctcctgaagtatacagccgtgagtgagtctggtatgccgtgccgagcttggccagactaattgttcctgcaaaagagaacatatgttcataactttatgcagatgatcttcggcgttcggaacttcggaaaaagtgtcggaagatcgcacactgttaaggccggggtagtgaatggtaaactggtaacgctcggtatctgatacaccacatgacttcgatatccagagaactaatgactgagnatgtaagatggatcagattaagctcccatgatttgtccacgagcgcttattcaagggtgcagacaaagcaaagggtgagttattgaaaccttgtaatgcactttaatggttgataatggtaatgggcgtaccagccttatgagggaatacggccgtgtccgtgattaccagctgatcggttccactcacacacgacctcttgccgcactagttcaacgtggatcgtctgtacctttaggtaatttataggcctgaaccaaaaaacagagatacctagatatctgaagatacgaagtctattgccgcagagaggctcgagccgggtatcttcggttccagcagtcaaaagtgctcgagctactcgaatcaactcgagtcaacaaacgagcttgaagagtgttggaacctaacctggagggggaaaagcaagctgcagactgtagacagc

SEQ ID NO: 14253 - DNA, 396 bp, Emericella nidulans
  unsure (1)..(396): unsure at all n locations
ggcgacaaggccccacgcgaggcgaaggagcattaaaacaccgncacggcccgcacccnggcaggggcggcacaacagnaaaaccacaacgcaggcgaccaaaggggggcacanggagaacagaaacccccagcggaacaaaagggcaaaagccccccngacnncgaccngcagagagaagacaaaccacgaaagcgaggccgatcgacccccaagncccncgaaacaagaggcgagaggagccagaaaagnnaccacagggacaacnggctngnggcagccaaacgaacaaagcgacgaaagcnccacgaacccgcgacgncggcacggccgaccacaccgaagcagaaaaccggcaagcccgggaaccgcccacccacaaaaagggaaccggag

SEQ ID NO: 14254 - DNA, 1454 bp, Emericella nidulans
agatcactccggtgtggaaggacgatgccttgtcaccacatatcatcatcgtcatcgtctagctgcacatcgtcaccaaatgacatgtgcccatactgattgtgcccagggccatatgcattcccattgtcatagccctggtgcttgcctccatgagaatattgctgatattgatggggatcatcgccgtaatcgtacatgtggggatcatcatacgaactatcatcataatgctgatcctgggactgtaatcgttagcatttttaagaacgtatacttgtgcggttgaatgcttacctcttgatacctctgatattgcaagtactcatcagattggtccctgctcttttgctgacgttgtgacgccgatgattgcaccatcatgtgcggatgcatttgctgaactttggcgagatacgaatacataaagttgctcagaagcacctgagagtacagagcacgccgaggatttgccagcttgatatgagccattctgtagatggctcgttcttctagtattgagaatctggtccagggatagtcgacatccggctgtagtatgcggaccgggggctccggtgatagtgttctggacagactttttttatggtgatgttcgttattctttttcctgctgccaccgaatatagaagagaataaaccagactctttctcttttttggtttccgctgacgatctccgagcattgtccttcttgcgctcctcttcgagtctcgcgtcatgtcggtcaaaaaccgtgctctcacgccgttgagcggattcgttggaagcggggagaatattcgcagcatcatgaactttgtccgcaatctttgctttggtctttttcgattcgctatctttcttcttctccttttctttatcctcagagcccagaaaccaatgccaactcgatttgcgcccaccatctgaatcttttttatcctggcttttcttcgattcggacttgcggtcttctgggaaagttggaatgaacgacagattgtccgttctagtggtattgcctggtaacacctgaggattactggcaaattcactcaaggtcgacgcgggctctgtcggatgggtagagtgcgtccgagacgcgaccggccgtttgtcaggcttagactggagtggagtatcatggctggatacacggactgaagtgctctgcgctgtgagttttgtggcggtgtatgaatctcaggcgcaggggtttcaacaatctcagggatcttttggtctagcattacggcgctcggccgcccattcgaatcgatacgtgagtcccattgccgaggttgctgagacagattcaccctattaccggagtctgtcaacggctgccctgtcaatccttcttttgtttgttgcgtgtcttctagcagcgagtcaaatgccgcacctgtgtccgagtcctgcgacttggccaaggcttgtgagcgcgtgac

SEQ ID NO: 14255 - DNA, 569 bp, Emericella nidulans
gtctaacggcaccatcatcgaatataggcttgatgcgtacagctcatggaacgctacatgcataggacatcacttagatcgcttgccttgtacctgtgtgacatgaaacgggtgagccttgacaggaggccttctgctgaaacggcgcatgcaccctcatgagctactgcctattagagatctgcttaagacacagacgatattacctgggatgcatatgccaaaggtcagggaagacacatggtgaaggcatataaaaagtttctgaattttggaacgccggtctcatgcccatatgtcactcaagtgcctttctagatgccataatctaaccttactttacacttgcttatctaagacagctatcttgctacagtgctctcagggcatcaactgataccaatgtatacatcaagctgataggcgctaccatattaaactttacttacatgaatgagcacaatctgagaatgatgcaactggcatactcggtacacttgtgaatcaggtccataattacaacacaacacatggtctgcatattatgacagtgactacgtacatctatg

SEQ ID NO: 14256 - DNA, 146 bp, Emericella nidulans
aaccaggcaaagctgatgaacgattttagcttgctgagtgctactgcagacgctgttgtgctcagcatactgatgtcctgtgatatagcatggtctgtgctataggcatctacatgggcctggacagaggtatactagcgtacggc

SEQ ID NO: 14257 - DNA, 2582 bp, Emericella nidulans
atttatgccgccaaattcgatgttatggggacaattttagcaaagccgtgcgtgagaccaagatcaattggccagaatatgaccaaaatgacaggaaatatctccagagttgattagacgagaattatgctgcctagcgacggtccacagccatgaagctcgagtccacagtgggctccaagacgaactaaagtgcacacactaactcgtatggtcagagcttctcagagaccctggcccggtttcaagatggatgcttttcctatattattcttaatctatctatctgttcctactttattatctccttcactccttctacatccctcctctctactcgcgctctcaccactctcgcacctccccactctcatcgtcgattctctcgcctctctgtattctctggaagactgctgcaaatcagttttggcaccacatttctttttcccgcctgaaaccttcctgggtagataccactactacctgctggtcaaattcacaatctccgtctaccacacctccaatttcctatctcagcttggaccagggcctgctaagagacaatacattgctgcattgatccggctcgtcgacccgcgggtttcgcactcacgcagcctcccgtgagtacaacggaacaaagctgactgagatccgattatccatcgagtcttgtggagacgactacaccctctaagcaaggcagccggtctcgaataatcgatcggtttgctgtcagatctgcgccgtctggtgtctacagatcgtgaagggcgtgttacacgggcgaaaccacaaacatctacggattctgctggtgtgtgtcctcttacccatttcttttctttgcttttcttttctttttttcctgctcatgctttttttctccttttttgtttccctattctctgcttatagagtttcataccaccaccacttcttcttatcccaccgttcgtatctgactgggggaagcccgagctgactgtctgcttaaaggttgtcactcttcttgtctttcttttcttatcagcctattagtttcagggagatgtccagctgcaggtcaagctttgtgtctattttgaacaatgatgataacccggcatttgccgttcgatcaacatatgggattccgacacattatcccacatcatcacagtatcaattagaaccgccttcagcaaaaagcacgtcagagtatcattatggtcgcacatactctgactcaccatcaccgcgggtaatgcgacaagcattcgacccagtcaccgaggctaccagggcagcctcaccgggttcatcagattgttcttcatacgactatacagctagctcaggcacgggctcctactaccacccctacgctaggcacgatccgtatgcttatcacccgcgtcccgacaaacggctcagtggtaactccatggccgaacccccatcacctcaaacgtcgatcgctagcacgtcaaaggagtctgttggcgctaaaccagcccgcaagaacaagtatccctgtccgttcgctgccagccacgcctgcactgcgacctttacgacatcagggcatgcagcacgacacggcaagaaacacacgggggagaagagcgtacattgcccgatttgcaacaaggcgttcacccggaaggacaacatgaaacagcatatccggacgcatcggacacattccgaagaaatgtctgctaattcgacgtcgcggagtagcgatgctagccgggagtgggcggccaggagaacgaaccgattgtacgatcattagcaatttgacgcatggtttcggagatatgattgcctacgataatatgaggacgatgatttcggtgtgatgcggtcaccgcgacgtctcctgccatcacaaaaggcccacaaataaggccctgagaggacttctcttcctcaaaagaccatcgcggtccaggcattgatggaactcatacggccgacgcgctcacctggttccttctatacaatgaaggctgagcgaaacgacagccgttaaaggcaggtggctgctgagacatgaccttctgcatccttctactgccttactattcttttctcttcttctcgccgtctgaaaaacgacggatagaactggatagacttatgcttcccagcagcgtgaattttttttttctctcttcgttcatcttccattgcattgtttatttgtttttgccgtattctttttcgcataagacctgcatatatcagctatcagcgtttacttttctttgtttgtcttcttatgtcatgaagggcctgaagatcatggcccagggccagaggcatgtactataccaaagcgacgtcagttaggctcagttgagccccaatcatatgatacccagagggtttgattgtcctgaataatgttcactctttgccttccaatagtcgcgtggaaccatggaacatgtgccaagcatagagtgaggtagagagcagttggatcaggaacccgcggtcccagcgggagggactgaaaagctatctgatgcctacctagagagtaaaccagacttattgctttttgtctcgaacatagtgagtccccgtta

SEQ ID NO: 14258 - DNA, 1868 bp, Emericella nidulans
gcgggcaagtgatctttccatcgtcgtcgtcgtccgggatagtagtgttcttgccggtgccgttaacaccatttgtgaccggagttgcgcgtcccggaacactcggaaggataccgcgtcgcccctgagaaccaacaacctgggttcggggggagtccttcccgggatacggcgcagcaccattcgcagcaacggggtcccaaccttgaggctttccgtccgaataactgaatgctcctgaaggaagtccattgttgaagtcagcacgacggtcccggggaggcgccggcgcaattggctgcgggtacgactgagcgctggaagcgggcgggagcacgctatgaggaggaggatagtgcggcgattgctgcgcctgtgcctgcgcctgcggattgggatgagaaaggaaagatgtcggaggcaagctgcccacggtagtgtggggcattatcggcgcagcagaagacgcgtaaacatcgtgacttgatgcggggtacctgttcagatcaggccggtacggcggctgccccatgtacgagtgaggagcgggcgactggctatgatggggttgcagaggaggcagggtgtgcggctgagagactgggtactgaggctgcatcgtgtactgaggcattggcatgctcgagatgggagcagaaggaagaggcgccgatccttgaggcagactggtagacggaggccgagagggatggtttctaggatccatcacgacgcggagtgtgtttgacaaggactgtagatggaggggtgggagatgacagggactgaggactggcgaggggcaaatttcacggtatcccgatcattgatcgcaaaacgtgaaaactcttttttcaggtgtctcttcgacgcaaaagcactcgattcgagtgcgaaaagcaactggccactcgatgactttaacttatcgcgtcctcgaagaatttttttcccccgagggttatctcagatctttcgtcctcaattcttcgccgcgattgatgccttccgacgcgactttgctcgatctaaccgagagggcgaacaaaaaaaaaaaaaagacaggtagggagaccgtgagcgagcgcaatcttcacaaagagtgctgtctcgacgtgctcggtcaagggcgacgatgttgttgtacaggaacaaggcgactccactgaagggaagaaagtcaggacaggttgagatgcttaatctgaggtctccacggccacccaccaggaaaatcacagcgtgtgggaacttctttttatccgcacgttgtcaaaaacagaagatggttatgatccaccacgaaaagccggcgtgtaggtgggtcttgaccagcagcagacaaggaggattgctagccgatttctgcttcgcgtcaacaacaatgcgcgatatcgactaggatattttgtttgatcgtgcaatctagccagggacaggcgcgtataggtgcggagatcaagaagaaaagaaactgaagaggtggaagaaaaagaaactgtggaaaaaaaaagtataatttcacttcttttttggaaaagacaggaaacgaaaaaaaaaaaaatttaaagacgtgattcggtaggcagaggacccaaggaaagctagcgagacctcccacgggaatggagggaggaggggaggcgagcacggagggcggcggacagcagcaagttaggggaattgaaaagtacagaggaaaagaaagagaggaactgaggaagagaggggggaaaagtgagcgtgaacgattgagcggtgacgatcaggctcggggaggcgaaaatggatttctgattattatttttattatttccagaattattccaaaattatttccagatgatgatgatatgctcatgttatta

SEQ ID NO: 14259 - DNA, 1821 bp, Emericella nidulans
caaactacgggtgtcggtccaaagacttacaggacaacctgatcaatgatattgtgagcgaacttgccaacgctcgtgcccccaaatttctgtacgacccaattgccgttatgggaggctgacggtatgtcttttagggtagacaatatatctgggttggactgcagttgcccgttcattttgggaatgctatatcaaagcagtatgccgatttggagcaagtatgattatatgactgtccggcaacggtatctttttatgtagcccagcggggttgcgaaagcggagggcataatttttcgtcttgctttttccgccttgcatgtggggaatggtaatcttcgattttcatacgtgaattgcgtattattattaataaggaacttgagtaaagtgtctggttctggagccccacggcaacgatgtcggaggctttactgcttttaattggccgaaattcttataagcgtactcaggcttggatttcgaacagcaagtctggagccttccaggtgtgtgagtttcgcttgaaaagccaaagtcattcgatagcgataagacttcgccttagcatggcagatagagagatatggcggaggtttcaacgacagctgcagatcagcacaatatcagtaacagtaaacattagtgtccatggccagtgttcattctttcagcccggtccgtggtgaggctcgaattaaaatgcaaatagcggaggcacacccgattttcccattgcgtcctgcattaatcgtatcacggctccatactactccttcaacttctgcacatagtgtattgctcagggggcaacaactgccaaggacacactccttaagcaacacctattcctttattttaccctaacctttgccgggcttgacataccgtcaccataatagtacaagctttggatgagctctggtgcttgcacgctgctgaaatatgaatgtgcaaagtgcagataatccaacatgtcccttttgtcccttctttgacccagacagcaattttgtcacacagcacgtacagtattgccaccccgaaattgaactgcagacggcctcaaaacagtcatctcggactaagtcaaatgctaatctagaggttcggctaccggcttgctctggattcggaagtagccatggatccataagctgtctgggcaacgttagcggcctcttgaatccaaaagagtttactgcttctggaaactcatcctcatctctatctcagtcacggaaggagaacgcgagaaacaactcagaggggcttctctcctctcaaaatgatgaccaagtcgaacaacggatgaaggcaaagaattcgcccaaaaaatacataaaaaaactcggcgtgcgtggcaattttctcttccactagtcatggcatgtgctgatactaatagtatgacagcgcgcaaagctggggccattcgctcatgagaagaaaaagccttcgtggcttttccggatgctagataagggcaacgcaacaagtataataatcaggattgcacctgctggcagactcacaaggcatgtggctctcgaaaataagacacctaacgttattccggtacttgctcagctatgcggacaagacaagtctattcagcgtgcatttctttgcagtgcccatgtgcaccatatttccgacatgccaaatgggggggggttttgtggatatagaaacattcaaatgctggtgtcatatatccaagggtctcgtggtccaaagtacccccatccccctggcgcgttgcccacgttccaacaaaaacaggattaaataaagcgtggggggggcatgggatca

SEQ ID NO: 14260 - DNA, 844 bp, Emericella nidulans
tatcaatatacactactatagggagacccagcttaggatcccctcggtctttacaggcagctcaacctggcccctccttgatctgacaatcaccatctccccattcgtgacgccgagctcatctgcatctgcctgacagatgacaaggcaggcatccttgtcagcattctgcagcctcttgctgcgacctgtcttcgtccgggtgtggaaatggaatacgttccggcctgtcgagaggtaaaatggaaattcctcgtctggcgattcccacggcttccgataatgcgctgcctttaatatcgcgcgtccggcgggattcatcgcctcgtattgccccttcgtcagcggcgtcccggtctccaggtcgtggccgtagctctcacagtagtcggtgtccgtgaagaacttgccatcgtcgaagagccgctccttaccaaacgggtactcctttgtacatggccactggatcccagacccgccggacaacttctcatacgtgaggtcgctgcagtcaagggggcgcccgtaggacatcttcttccattcttcaaacacctcctcgggattcgtgaacgggatcaacggacccccgtccctattcctaaagtccatcctttgcgcaaaatcgaggaatatgtcgagatcagctttagcttctcctggcgggtcgacggccttgcggctcaggtgcatcgtgcgatcgacgttggtgaagcagccggtcttctcggcccattgggagcctgggaggacgacgtctgcgattgctgccgtctctgtgaggaagagatcctgcacaacaacaaacaggtcgggttttgtgagcagctggcgcacgcggtag

SEQ ID NO: 14261 - DNA, 2188 bp, Emericella nidulans
taattttttcagcaccgccctctgacgtcgcggtctagactagggagggagactaagagcagtttcgtcttatccagctacggtatttctaatccgattatagagacaagttttttttaatgttttttgactcatattctgtattaactacgtacaagggctgagtacatgtataatcccaattccagcctattccaattcagatgcgacttgtttccttctctcttccagcggagctgggttaagttattgtacacgaaaagatgctgatggtgccgaagtctagatctatcccaaatgagagtcgtttctcagtgcctcgagatttgcccttctccttcacaactgaacatatggaatgaaatcaatggatatcgacatcggagcaagtcagaaatagtggcaagttagagagacagcagtctcttgatgaaaaattcagccagcctaactcaaacaagatgttatttcaggccaacgacgaggttagcctagcgacgcgtcgaactcaagctagaggcgagtaagtgaaacaaccaacggtctgcaaaaacttccaaatctgctgatggtcttccgcgcccttaatagtgagctcataagctacagcatcccaatcggcggcatactgcatgatacgttgctgctgctcttggtcaaggataccgttagccccgacggcgtcagcgatgatgcgctgccagatctcagtaggaaggttatagcgccaggagctcttacgtgctttctgcgcgacactaaagcgggagttacccttgcccgaacgagtggggtgggaagagccagagccaccgtttgccttggtgccgttctcagaggaagctgggtaaccagggctagagctgggacctgtaatcacactgggcgcggcagcctcctctacctcaggctcggtagttgcaggcttcgtcaagagccggggtggttcgtggaggataggctggagggctggaaactcctcgtcgaataatttggctccgggatgaaatggcccggtagcaaaagactgaggaaaggtgtactgcggctcgggaaggtattcaacaggggaaagaggttgttcaacgcttggctccacttccaagacgtactcctgtccctgcaacccttcctgtccttcctcaaaggtagggccttcagtgtttaagggcgcctcagcccgttcgattttggatgcctcaaccacacggtctcgatcttccaggagaagagcgcgcgaaacaaccatcatctgaagcgcagtaatggcaatactcgctagcgcaagtaccctcctgcttaagagcttcaagacgtacacgctttgtaagtcgagtgaattcaagcgccagcttactttgtaccttgcgcttagtatcttcatctgtttccgaaccctcagctctctcataagtattttcatcaccatcggacacttcttgagcttgagtcttagttttttgagcgaggattgattcggtaacttcgaggagtcgcttagcggtagctcccaacccgtcatttggctgccagatgatgctcttgccttcctcggcagactccggaattgctgatgccttagctggaggcaggaaggtgaggagttgctctgcggcgcgctgggtagcgagcatacgagaaaggtgtacagcgctgctggtcctgagttcaaggtttgataatataaagtagggcacggagcggagtccacgggtacaagcgtatttcttgagatcggcgaagctaatgttcttgcttgaaatcacggtagtaggcgtccctggaatatcatccacccattaccatcgtgtcacaaatgattagatggacaagaaaaggaagcacataccattctgtttacctgtttttccgcccttattaggagacttcttcgagcggcccatgcccgagcgaggatcggtattctccttcgagctgttctcaccgatcttcagcgcaccagtctctcctgcgagcactgagtcagaagcgagaccaaggttctcacgaacgatagcatctgcatcggcttcaaggtactcaaggtcacttttgatgtagacgctcgctagaatttctaggccagcaacaccgagcgggtttcccgatccatctagcttcatgaggacatagcagttctaaaaacaacataagaaagacttccagattgctttctcttctgcagtac

SEQ ID NO: 14262 - DNA, 1713 bp, Emericella nidulans
  unsure (1)..(1713): unsure at all n locations
caagcttcctcgcggaatttctcgatttcgtctgccgagtagcgcnccgttccttggccatgtaaagtctgcacggttgagcggtatatgagcagaccaacgaatactctaatcaggtaggggatagcgctgagaacgtggtcgcgcatggtgtagtagttttctgtccatctttcgcgggtctattgggaaatcattaaccagtcacctgcatcccgtagcatatggttggtgagggccaggcatacattatagaaatacagcttatcctccagtaaagcacgagtggctagatcgtgtgctcgatctgaacgccataagccagcgtttaaatcttggagaatccctcgctcgatcagatgcttgatgatgagggttgaatcgccaatgctagcaggagtgctgccatcatcgccatcggtgatttcgatataggggattttgcctttcggtgctgttttgacagaccctgaggctgttttatatgggaccccggcgaaacgtagcctggcttcgagtttgactacgaagggggaccagacgtagcggtttggatcgagccagccgcggtagagagtgaggttcaacatatttgggactgaggattacaccagagatctatgatacgggaatttactatagttaaaggtatttataggcaaatgggaatggttgtcggaaaaccgccggacgcgccatttttggcccccagtaagccacaattcaaattgaaacaagacaaataacttactttggagaagaatttagttagcttggtttctagatagtttttcagtaaagttctgagtgagctcattgaggtaaaagataagaggttctaatagcttcgatatgcgctcgacacaaagcgatttgactgaaggtgggcgtcgagtatttataagaaagtggcgctaaatgctgagtcatctgactgagggagacgcggatttcgcccggcaacgacgacctcgccttaccaacacctcgccctattatcgtccctttcctttgcttcctgccaccggattaccctttaggtattatatatctagtgagagtcaccttgctctgccggggttgtcactatctacgaaagagagctagtcctgggagataagatatagtgatcgtatgggagtcggccgccgcaatctcgcaagcccgtatcgtcgaccgctgcgacgaggagctattttggcaataaatcgagcaacaaccatctcataagtttctaagcttgcatttggccttcttttaccctttcgttagagagtgagcgaagaaaacaatttacagaccttcctgctgtcccttgacccgacaataagcagccataactcccccttggaggagtcatcatgtcgaaccaactggtggtgagtgccatcttaacacggcctgaccttacctcagcacgagggatcgaacgcattttgttgagatctctccgttcatgctgttgcaaagatgtgtgctaaaccagggcatctcgcagggcacggtattcgagcgtgtcatccaagaggtgtgcgatgcatcgcaggtggatttcgaggaaagcggcgtcgaccagcagaccctttcagatttgaggaaggtaaataactctcttttcttttttctttcctgttcaaatcgatgaatacccctgatggggccagatctgggcgaaacgggggagaggccgagaggtgcgggaggcggtgttgg

SEQ ID NO: 14263 - DNA, 1648 bp, Emericella nidulans
caaaaacccgcttgaatacaaattctctgactcccgcaatgtagacccagcacatcgtctaaaaggacaagggtgtgatttccacccgctaatatccgagagacattatcgctaattttcttcatcggtggcccagaatccaagctttgacaggagaagtcatctttaaaaatgcatctctccggcgtggagacgtcctccacgtgcccaatgcccagttggcctgaaccgttggagccgaatgcgaagagtactggggacatccttttctggtcaaataaggtagaatcgacttcaggctgtgttggaagggagaatattctaaacaggcctgaaatgtctgttcatactaatatcaccaaagtaagaatgtggtgttgactgttgaaatggttgtagaccgcctaggctttgccacgcgcgagagtagcgtagcgcataaaaaaaacggcagaataaattacccatataggtctagttagtggggcaacagagccaggattcactggtcggggtccaccttccagcgcttccagaagccagacggaagcctcggctacgtgagatttgttgagaattgagatctagattcatgttgagtcctaaacaaccctcgacgattcgcaagaatgaaaccatggagtcgcaagatgagatgctgggtcagggaaaatagaagacatgaagccacctgtggtgaaaggtccgatggaccgcatgcattgtatgatcgtgaggctcgataatctatgtactagggtatgtatgtatgtaaagcaattccgcctgcccatgaatgctgaatgcatgcaagtctgagaacataaacaacgaagaagaaaaaaaaaccaatagattgccatgtctgattttgactgcctgaaactccaacgaagggtattaaagattttaactatttcgtgactatttttcttgaacggagttctgtgtggaatcatctgaccgcgcagcgggaggaagagcaaagtcgtcacccttgccgggttttgcttccattccacggaacattgggcttgtgcgatagaaatagttgttgacgtggccggacaagagctcttcgtcggcgtcttcctcaccgtccttgtccttctcggagatcctggcagacatggcggcttcccattcagcgcggtactcttcgaccttctgcttgtagtcgagctccgcatcatagtacttgccggtaccacggacgcgttcccagagagacaggtgcttggggtggacggccgggccgtgatagtcctgttcgcgaccttcccggatgtacttccagcggcgctcttgttccttcaagtcaagcccggtggtgtcagggaggaagaaaaaggtgagaacgagacctgccaacccgaaccaggggacaacgtaaaactttgtctgtgtgtcgatgtagttgtagagaacggatgcaaggagagcaccgagttttcccgcagcggcgatcattccatgcgcggtggcacggatgggcgtcgggaatacttctgcggcaaccaggaaagtgaccgagttagggccgaattggttgaagaaggaactcaggaagtacatggcctggaattccttgatatgttcaggggaggtgtaatagtcgaagtggaaggcgggacaatgaagagataaa

SEQ ID NO: 14264 - DNA, 455 bp, Emericella nidulans
  unsure (1)..(455): unsure at all n locations
cttgtacaaaggctctgtctataggattgaatattgctgggtcatgatcatggggagattggatgcttcttgaccgatagagcactgcgtcgtgattggcatnggcggagctccgtaggacacgctgccatgtcggtaaaggtggacccgcttgagctaatgcggataccgggggcgaacagggtatctgtgcgaaacctgcgtcacctcgtccatgtgagggaggacttcctgatgtgggggtcgatacacaatgaccaacattatggccagcttgacgtctattaaaattacgcgtatttgctgaggtacacatacgctgctcgatactggaaactatattacctgccaataagtgtgctgaaagacctgtgatgccaatgatcaaagatactgtgtatacatcatgcaaacatgtatggacccgggaataggatttgacagctaacgtcgct

SEQ ID NO: 14265 - DNA, 2025 bp, Emericella nidulans
tagcttttcttttacctgttcgacaggtttgaccggtaagatagaactgtcgggcgtgtagggctcttcagggatagccggaggtaacccggaattgggtagaggggagactggagtggctgcctgtgcctccctcatatcgcgcgtcacgtcaattggtgccggccgagggctgctattgtccctgccggtaagcgacagattctgactcgaggcagcatcatcagaattcacagggcttcgcgttcggtccctttctgatgactctcgcacgccgtctcgaacttgcgcaaccttggccttaaacttcccaaagaggcttcgtttctccggctctgcgggcggcgcctccttgacaataccattattgtgaacttcggcatccaagctcagtggctgataagacgggtcgtttgcgaactgttgaaggtcagagggagagcttttgctcgactgatgccagctactaatcgagctcgtactgcggtccgctccagggctagaagcggtgagaggaggcgaccccaaaccgagaccgatttgctcgttgcttcgcttggtcgtccggtggaaccgccaacttcggcggtgctctttacgagtcgcctcgtcagtgtggtcaacgtcagaatagtcagtgaacgacgagcgcgaattcatagagggcgtccgtgagccgtgcgggcgtagggcatccccaattggctgcccggtttctgcctggctaatcctcttttcaggcctccccacccgctgagaatctgcatcatcgggggtagcagtgttagatggtttgggagtggcacctccgtcatcttgtgaggaatctgaccgcggcggcacctgcgacgcgagtaaagcagactcggatgttgcggcttgaagtgagatagcagagctttgcgcgctttcgtttgcacttccaggtatccgcttcttcttcaatctgttgggttgccgtgcatcttttgattccccgcctggcggtggagatttcgtgaagaaacttgagagtttacgctcttttgttggtgtaacgacagcaggagacagcgacgctgtaggtggtggcaaattcagatgctccggtttctcgtgcacctgttcagtttctggctgtggttttggcattggcccatgggtggctgagtgtacatatgcggttccaggtgtggtctgaacatttgcaggggctggcggaggttgcaagccggtccccgtagatgggggtgtgcgacttgacgatcgagacggatgggcgggtgttccgggggagttcgtagactcgacgactcggctgtgtcgcatcgcaggcgacattttggatggtaatgtgttgctcctgtgcaccccaaccgcgcctagggaagtaggggttgcgggattggaaacattgttggacgcgcgtgaggttctcgaggatacggaaacgtttcttcgcaacgattcgtactttttaaagctatcagctcccccacttgcactggatacagagcgacggatgtttgattgggacgtcggcgggcgggcgttgccagactcgacttctttgactgtttgctcatcggcggctgtcccattcataccgacaaggaaatggtcctggttttcgatgaggaagatcaacacgtcttggctcagcttatattcgtctggcgacatatcgtgctgtggatgagagagtaatcccggctgaaagatggcagacagattcgcagagttcatccggttttgatcagatttagaggcaaagacagccaggagatcgagaatgtaaagcagtagctgcttgttaagtggcggaagctccctgatcagctgctggtaagccgcaacggctttggcatgctcggcggcctccgattcaggtgaaggtcctttttcctgtgcctgcaattgaaatttgcgcacaggctctctgaatcgctcgtagaactttacgggacgattgtttgggcactggttaaggattgtcaaaaaacatggcagatctgcacagtatatccatccatccagcctttgcta

SEQ ID NO: 14266 - DNA, 551 bp, Emericella nidulans
gcatacgcgatatgctatggggcatgaacagaggggtactacatgctggtatgaatcgttgcacccaagttcatgtctttgccgcgcacagctcaggccacgccaggcatatcattatatgctggacccgatggtagctacccacttaaggagcagatgctacgattgaccatatcagggggttggaccatgcctagtatattacacgcgcatgtcgggcttctgagatatatgggagcgctctgcaatggcacaaaccaaggggcaggctttcttggacttgactcatgaccaggggtttcctactcttaattttccgatcttcaagtttattttccggatatttacggggatcggcttcgaatgctactaagggattagggggcaattaaagacacttacccattgccacaggataccgactttgactttattggcgggttgagattctatctctgagcgtctccttgcaccaaagccatgtacccagagatcgtttgtaatcacttgggtcagggtggatcccatattgtgaagttttacatttaacg

SEQ ID NO: 14267 - DNA, 1955 bp, Emericella nidulans
aagaataggaaaaccaccctgaagacacgagagatagagtaacaaaagatgaggaaccaccggggtcaaagagtaatggaaccaagggccggaaaaaagagaatcaaggccaaaatacaagaaaatagaggagccaggatagcctaccaaccggaggccaaaataataaaataaggcccccccctagaccgaagacctagggtcccccgtgaaccccaccccaatatccaaccccactacgaagaaaactttcttcaatccagtggcagaaattgagatgggcaatcgtggaaggggtatgacggattccccatttgccatggtcacggaaatgtctgcagcggagggctctgccgccgctgagtctcagtctaggcccaagggaagtaactccagcttccactttcatcaggtccccgataagtggctgtcgcgcatcgctaactggggcgtcgaactgcgcggcgttactcctgtccctattgaggagcgaactgacacgcgcttcatcaatgttttcttcgtctggttcacgctgagcacaaacctgctaccgtacgtttgccatcgtgctttctcagacaatcgctaacaggagggcaggatcatcaccggcatggtagggacattcgtcatgggcctgtccctccgggacgcatctctgatcatcctcttcttcaacatgctgtgcacaatcccaccggcgtatttcagcacattcgggtcccgaacgggcctgcgtcagatgttgcatgcccgtttcacgtttgggtattatctagtctccatcatcgttgcactcaacttgtgcacaatcgctgggtttggcgtcgtatcctctgttctgggtggatccactctcgccgccgtatcgggtgggagcatcgacgatactgcgggtatcgtggtcattgggatctgcggtatggtggtgagttttggcgggtacaagttcttgcaccaatatgagcgatactgctggctatttgcgcttgttgcaatcgtcattgccacaggtgtgggcgggagtaaattgtcgatgcaggcgcctaccgagccgccgagtgcggcgacggtgctgagcttcggaggcgtcattgcggggtttcttatcccctgggctgtaagtgtcatatactctttccggtatatcttctactaacataaccagggcatggccgctgacttcagcgtctactgcacaccttcagtctcgtccacccgcatcttcgcctacaactacctcggcctcttcctcccgacagttccgctcatggctctgggcgccgcaatcgggtcgtcgacaaactctatatcatcctggtcaacggggtacactctatatggtgttggaggagtcctcgacgccatgctctcgccagctggcggtttcggcaaattcgtctccgtcttgctctcattttcactgctaggcaatctcgccgcgtcgatgtactcgatatcccttaactttcagctactactgccatggaagctctggagaagggtcccgagattcgtatggtcgattatctatactggtgttcttatcccggtttccgttgttgctgcgaagtcattctttactaacctggagaacttcctctacgttattgcgtattggtcggcggggttcttctctgttgtgacggtggagcatttcgttttccggcagggtgcgtttgacacgtacaccgcggaccccagtggcgacgggaaaaccacctgggacaaccagtcgaagctgccaactggcctcgcggcgattggcgcgatggcgctttcgtttggcctggtcatcccgtgtatggggcaggtgtggttcactggcccacttgcaaagacaacgggggatattgggttcgagattgcgcttgtgcttgccggagcactgtacgtgccgttgaggtggatggagaagtggagtacactggcggccgttactagatactaga

SEQ ID NO: 14268 - DNA, 1900 bp, Emericella nidulans
ttttttaaaagggttaaggattggggacaaccccccacttcataagggttggaagctccgtaaggcccctcacgaatagatgttgctggtggatggtgaaagaaaaaggcataaacctgcgcaacctaaaaaagcaaaacggggtggccccgcaaaaaagaaatgtttaaacttcggctagtaggggtgccaatggttgggttcccatatataacaaggggctggccgaaggatggaatggagccggtaatccacagttgaccgtggtgtcccaccggggcaaatgccttctattgttgtcgccgtgtgttaaccataacaaaaaccgggtcacaccgaatgcagcagtgtaagcagcgttgatggcgctgtcgaaaacatagagccaggcgagcgcaagacattgcaacggaaattgctttcggatatggggaaagagtagtactgtgctggcaagcgcgatgagggagtagaggtacatcgaccagctgaacgggcaaaaggtggtatccggtcagcagggcgagcaagccgtagaggccgctgattttattaagaaggagtgataatgtgatcagcgaagcgcctgtttgcaggctcataacgtaaaggaaggtctattgttgcgagcatccccgtcgccggggaaataatccgttagcgaccgatcccactcatggtgatagacgaagaaacaccagcttacctgcggccgcggaatgcggagaaagcgagaagaaaaccccatcttgatatcgccagttgggatatcgaaagatcgggttcagagtagctggaataaaaggacagcgaggcgaagagcagcagcaggacaatgaaagaagagagctgggggaagaaaaataggctgaagtcctcagcccaatgcccagcgcttagtctgacccaggggcggcgttccgaagcctccgtcccggcagatcgttgcccttttatttcgtcatcacgttctgcactctgcatgaatcaaggactattggtaatttcctaagcagctccctgtaaatgctgatgtataaggggctggaagtatttgtgacaaatgccttacgtctcatctcgtccaggactcgatttcttgggagccgaagcatttccgtcgtattcgtttccgcaatgggtagttgagctcaacgcatcgcctcaccatagtgggtcggtagtcgcaccaagccacctgactttgtttacatggagtgatctaaggagatgtaggaagctttattttattatcactccggaatcgaccttgcaggctgtgaggacgaccaggatgtctattgacaaccaacctgcgtaactggatacgatatatggatattaaacgtgcccagtagctgactggaaacatctaagctagaccagctcttttgagagggacaggagattctactgccgtatagaatgatgctgcctgctgtcctggtagcggggcatataaataaatgtggacataatacaaaaggtggctgggcaggaattggtacaagaaggtccagcaaataaagcagccaagccaccaacaaagaccacttgtgaagtaagagatgccgagtacaagcagaacgccctccaacaagccttaacaacgacggtaagagtaaaagatcattcggaaaacagcattgatctaggctcgctagacaaactcatgagcaaggaaaatgtacatcttaagaatggcagatattatgaacagcctcaatcattatcattgagatctgggttggtcgtgctaccacgctggcaaagccaggaatatcagcaagcgcatccgtcgttactagtcgtttctttgggttggatattaacgtcaatcactgtacagcagtcagtagacaggtcaaagatgattattaagaagatagaacgctgtgtc

SEQ ID NO: 14269 - DNA, 224 bp, Emericella nidulans
agcgtgaggtgtagttaggcataacgttattttttgtgacatgtcagtgacgtatacactacaggaaattgggagatactataccaaattggaataggacgtagcacagggaaaggtcagagaaccactgtggagaggtcgcgtataggcatacaaccatagcagagtaagctaaaccgagatagagctaaccctccgagatacgtggacacgtaaccccttta

SEQ ID NO: 14270 - DNA, 1400 bp, Emericella nidulans
tatatccatacgatttaggtgacactatagaatactaggatccaccgggctagctgatataataacgtagcccatggtctattacgcctccaggccgtgtataatgcctgctagtcttgtttatatgacatatttaaatgtattcaccgcgttctgcccaagaagtttttggtcttttcgagatgagtcaggtgatatacgcagccctatactatgtacagcatgttcggccgatcccaaggtcagctctttagtcctcatcactatggtaccagagcttcatatctcgctatgtcaccaggcacatgcgcttaaaccatagccaaacctatcctctgcctagggtctgctcctttcattccgcatcccagttctccaggcgttgcggcttcccacctagactctccattacggcactattactagttgtcaggctatccagaatccgcagttcgccgaagctgaaccatctcggcaatatccagacacgaaaggggatcattgcgatgatcaggatgggaaaacctgttaggtaaaattagcgccaacattaatcgctttagttgagtgaacacaccgatagcggaaattgtctgcgagatggccacgcaagccgcaactggtacgatctcacaaataagatataggatgatcttccttctcttgacctgtagcagattttcatgttttggaataaatctcctctcccgtagtaggaagacaatttttttcacgatcccattcgactcaatcgagccccaacctacaatgaagaatacacccgcagtgacagcagcgggtattaagtgcaggacaataagcaaggggccagtcatggttcctattaaagcaatgcccatgagaaaatgtgaaacgcgctgctccgtcacagacgtcgcttttgtgattgggtaacggatttcgggctctttggtgatatcgttggaggggcaggcggagttggtgtaggtgagaacagcaaggtcggtttcgtagactgttagggagtcggtatgaacaggggcctggacagttgtgtcaacagatatccctatccaggaaaggaggttgtcaagtttagagtggaagtacctgtggcacaagcccattcggcatcggcaaccctgttattcctgcgataaacgccgtgcatcccagtaggaagaaatcccaatgaaagccggccggcttcttcagcggaaaatggcgagcttgcgctgtgaggctgctgatattctgcgcggcttgttagcctctttcgctctctttctggcagcgatacatgtgcctaattcggaagaaggacaaagggaagggcgaggacagcatacatgatcgtaatataacagcagcatgatcagaaacccaaaaggcaggccgcgagacccattcatcctcac

SEQ ID NO: 14271 - DNA, 1013 bp, Emericella nidulans
ccatgggtgtcctctccgagcagatggcaaagaccgaaacatctcccgcgccgcacaagacgcctttgccgcgtcatcataccaaaaggccgtaaaggcccaaaaagcaggcctcttcagcgaagaaatccttccccttgatgtcaagtggacagaccccaagacgaacgaggagaagaccattaccgtcaaggctgatgacggcatccgcgacggcatcaccgcggagtcgctcggtaaaatccgcccggcctttgccaaggacggatccatccacgctggtaacgcgtcgcaaatctctgatggcgctgccgctgtcctgcttatgaagcgctcgaccgctgaacgtcttggccagaagatcatcggcaagttcgtctgcgctagcgttgtcggcgtcaagccgctgcttatgggcattggtccctggaaggctatccctgttgcacttcagaaggcgggcatcacgaaggacgatgtcgacatctttgagatcaacgaggccttcgcgtcgcagtgtgtgtggtgcatcaatgaacttgggctacctgaggagaagatcaaccctaagggtggtgctattgcctttggtcacccgcttggatgcacgggagcacgtcagatcagcacgttgctcacggagctgaagcgcacagacaagaaggttggcgttactagtatgtgtgttggaactggtatgggtatggctgccgtctgggttagggagtaaatgagctggtatcattagattggcttcctttgcagcggtagtatacttatattgattgaatgtattgtacgttaagttatgtatcaaatcaaaacatatcgtcaacttaacctctaaacttcttgaaagcctcaaaaacactcatcccgccctcaaccgcctctttgactttatcatctgcctccacaatcctcggcataacctccaaaacctgatccaacagatcctttggaatgacaacaacaccttccaaaggatccctatagtgagtcgtactatgggc

SEQ ID NO: 14272 - DNA, 805 bp, Emericella nidulans
ttatttgggaatagatttactatgctgtgggtcgatcacatggtacatctatacatcactaagaactgtcctcacactggtcccagcataagagtccaccaggaaccgctaggtagagggcaaatactctttaatcaattattccagtcaccttgcgtaccactcattctgcaaaacgttgctcaggaaggatgtggtaaatgatgactaccaagatagccaactgtctgcaccatacacccagccgcattcatatttggaacagtgacaacttgctcattgatcagcgatcacaagagccttcattggagcatcatagacccaggcaggactgcgcttctggaaatgctgcaatcctccaaaacgtcaaagccatcggcaagctattgggttcccgcagttcgagtatgcttgcatgggggaaagaccacgttccgccgaaaagaatgctgtctgaagagcaatgcgagctatcatatgttaacgatagtcccccccttaatgttcccgagtcgtcgaacgcaacgagcagacaactaccggaaagcctcatgtgcgggaacaaaatggaacatccttcgaaccggatacatttctcacgcagcaatgatcgcttgaaggcctgtacctgtccatctccagagaaaggtcctctttgtgtagctccgtcagttgtcacaacgatcactagcggtgacgtcgactttgcggctcagaagacaagcctacctagcaaaattatggaatgggcaagtgggctagagaagcaggctacaaatatactacaaggaccttacactctata

SEQ ID NO: 14273 - DNA, 136 bp, Emericella nidulans
caaaacgtattaacaaacgccaacgcaccgttttgtgcatgctacttgatgcaacgtcactaccgctttttatacacacagggtacattgaatctcttccggtggatgataacagaaccaagacacactgtattca

SEQ ID NO: 14274 - DNA, 237 bp, Emericella nidulans
atgccacttgtccaccaaagggccgtcattaaagcatatgaggctcattatacacattctgcgagcctttttcttgatcatggactacacgcacggcaggcgatgtaagctattgtcacgcaccacattatcagaggcacacttgggtgtaggaatgggtaaaggacgccacaatatagtgtatcgcaccacagcgaatgccctcataatcttgaaataatcagccgacttgagttt

SEQ ID NO: 14275 - DNA, 1033 bp, Emericella nidulans
tgcactccgtgctttggatccggggcgagttccgaggtccaccgccaaccgcaaatccgccagcggcggatttagtttacatggcacgatctctgaacgaagattcgatctgtccggctgcttggcgtagaagagcgttctcacgggaaagttgctgaatagtgcgggcttgatcagcattgatattgctgtagctgccgtccgatccaccagggctttcaacaccatcgtcctcatcttcacgaacccgaccaagcgtagcaggatcatggcctaactctccaagcaagctaggtctagaggagcgatgctgcaaagcggagaattgtgcaccattccgagaacgaccaccactaaaagcagtggtggttttgttgcccgtattcaaagccgaatattcaggatccagctggcccacagagtatgactgcgagcggtaggtcttcggggtcgggtggagcgggatggagaatgggatggaagagtcaccagaggttgtccgagtagtgggactcaggagttcttcagccaagtagttacttgcggtcgatgggatggacatcgtgggcgacggaacaagctctgacagccgaggagggggttctttacgtgaatcagtgttccagattccagtaccccacgggaatgaactattgccgacattgttccaagttatagagctgttcaatccagggcttgtgttggtctgccatccagattgttcggtagcaggactagttggattggaagctccagtcgatagaggaccagccactggtgccttgcgagttattgaaaccgggatctcattgagccacgaggtccggcgtacgggcttctgcgcaggcatactagtagaaggtgcaggcaagggatgctctccatcatcatcggaagacgcgagggcttccgaatcaggggtcgaacgacgaatgccaggatggcttttttccaacctggctgttgcgttgttcggcggagtctgggagaccgacgagggtttgctgttggatggcgcggcatggtgtttttc

SEQ ID NO: 14276 - DNA, 1215 bp, Emericella nidulans
ttgttgtaaaacccggagtccttggagatatccttgcaacgttcttcgataattatgcggtgctcttcaaatacacattcggaaccggtgatgaacagtggccagaggaggtatacatccgacttgactgctaagatgtgtgccattgagcgctgcacgatctgctggatgcgcggatgggaagatggtaggtcaggataagcgagtcgctcgctgtaaaggagcgccgagtgtcggaacgattcggagatatggaagacgtcctcgatgttctgcggagcgactccggattcgtatactggcgaggatggtggtgatatgtatgcgtgcatcgaccgagcggattccgcaggcccctggttaagccgctcttgcggaaatcgccacgcttccagttgctgtttgatggaataccactctgcccagaacgatggagatgagggctgcttggtttggtcgccgtgccgcggtggagtaggtagagggaagagataggggtcaatttgcgttggaaggccagagaatagcaggtctggcgtatggtaggtcatggaaggtggaggaatagaggttggcacaaacacatgcggcgaaggtcctgtgtgttcctggctctggctcaggaggttcagccgtccgaggtgtgagatgatcttgaagagccgggcgtcgcatccagcaagattttcaaggccccattcactgtccgatgatgcagtcaggtctacatacctgctatgcagctgggattcgcgatcgttagttgtggccgtcatggtgtcataccacgtaaacattcggatgaaccacttgagctcatccgatacataaggagaagcccgcagtcgaattgcaagcaatttggtaactcctgcaaactgggtcttgaactgtccgactccagtgtcacagacatggaacaagcacaagatcaacaaggtggcaagtaccgaatccgacaatcttcgctgcggatccgccaattctttattcagttccttgacagccacgcctcgatgatacgtttcttcaagagcaaatccctctggtattgaggggtcgaaggattctagaaccgacctatccgttaaagcttggtgtgctaatgaagacatgcgcgctgactccgttcggcaagtcgaaaagattccccggtcacgtctctgccgcaaattactggtagataacgtcgcgatagcttcctgaagagatata

SEQ ID NO: 14277 - DNA, 1336 bp, Emericella nidulans
tggggggggggggttctaggcgctttgtgaagcagcctgtactgttgctgggctcggaatgttcttgaccaaggtctgacaactgaatagcatttcttgagggaaatcatatctgatatgccgacactcaaaatggcttcattccctattcctcgacggctatcgacctatgcctggaatttgatttcacaattaattggagactgagtctgctcaaatcgctatgcttggtgcaattcaataaaatcttcggtcgggacacgatccttgatgcaaggaatggctttccatcccaagccttacgcaggtccccgcaaggcatgaaacatacaatttcagttggcctttgcgaagcccaatgtcgactaagatacggggcccagttagtcgcgactggatatcaactgcttggccacttagcgccgcgtttcactattgaactgccgttaagcatgcattacatgataggtcctgatatagcctccagccgcgtgaagataaaaatatgctggggcatggggctaatttgggagcaagtgttgagcgttgattgttgtaggccgtaggccggagtcacgtaacgttatagagtgaatctacatcatccttcttaatatggaaagcttcaattggccgggataacagaacttagacagccggaagaacctggtatagatgcttagaatcaagcttcatggtagcagccactgcgtacggtcctccaggaccccggcctagttaattgcctgttactaaacagagcggcaaattcaagtatggcacgtgaccggatcgcgacccatgacacaagcagcccgaccgttgctagggtatcccgagtcggcgcgttaagtggtttttcgcgtgctccgagctgactgaatgaacagagaattgcagagcaggctcgacaagtcctggccaacacacagaacgcatccgatgctggagatatgaggactcgcctgcgaaatcatccatccatcctcttccctcacttcgaccgctgtggcctgcggcagcagtactgtaacccccagaacacaccccatccatgacccccgcctccagatgccacctgcaccccgtcgaccaatttctcctttagctctcgagacatgcgcgccgctcgacaccgataccgatacctgttcgctggcgggctcggatgatgagcttgacccgggccagctcctagcgcagcgccggaggattgaaaggctcggagaggcgtatctgaagggcacgcctctcttcattctttccgcgtctcttcgaggtccgctggacaaaaactgggtgaatcatggaaaaagtataggaggacgacaacggt

SEQ ID NO: 14278 - DNA, 558 bp, Emericella nidulans
gatgcactgacaggcccccgaagctactgcgatgtttgctaatgacggagaggggtgttgcattgtcgaagcatctgatgctagcgctgcaacggaccaactccgttagagctgaccctactatccccgagtgaaacatgcattggggcacgccatgaccttgaatatacatatagcagctcagcgtgtgacacctacacgacattgaacctgtgtcgcgcgatgcgtcgacacttcttctacctgaaccttattggattagagcacacacaatcacctgataagcctgctgacatatgacctgaatacagcggtcacactcctgtctgcaatgatcactgccattgtattgcactatgctgctaggcatgagagtgctagtactcataattgatatgtcctgagtcatataacatgacaggttaaccgatgctagataacacgctggataccaaactcccagagcattctcgggttacaggcatgcgacagagctacgacgtgcatatactgacagaactacctacgtcatgaaccgatcagatctagaaccattgc

SEQ ID NO: 14279 - DNA, 1587 bp, Emericella nidulans
gcccgcaattaaccctactaaagggatcgacacgcttgctgaccaagtcaagaggatcttcacttcgattatttattaggtgcgtctcatatgaaacggactttggcgaaggaagccctggaggctcttcactatcgcatcctttattgcgtccggacaaaaccacgccctaagaatgttctgtttggcaagtacgaaccggaacagcaaagacatcctagcattctgaaatattacaagaaggaaaagaaggtgcctattctcatcgataagcccgatacctagacagtcaaggcagtgaactggtgttctcacatttatcgcttcgcgagatgctcgtcaatacttccctgcaaccacgggtcattaaacatgggaccctaactagacatgccaggcgcattaacccaatgcgcagccctcgataagggctctccctctccgttgtggggaacaaccaaattgatgcatggggcagggcttcccaatcaacgaagtcagcccagacactctacatatttgacctgtctttgtggtgtgacgttgaccttaatttcgaggcaaatacaactaatcggagcaggctgtctggagcaagctacccgatcatatcgattcaatgttacaacaatattacaacactcgcctccgcaagcctctgactttactcaaatgttaacccgagcgtatatcatacattgattatacccggaccagaacccggaccggaagtcaactaggttcctataacctatataatatacactggtcctcagagcatgatgcgccacttttcagtgattcttttttttcagattcctccaagcccgacattgtaggccatgtccgacttctaggaagtgaacaagctgagttaatcccgtcttacggtaggaatcgatagaaagatgtaaatgtgcatgtattcatcatagcatcccatagtaaagccatggaaaggctccataggaggttttacgaacaagcaccgccataataagtacgctaatttcccagggaataattgaggaagccacgagaaacggacgaaaatttacatagacacacaatcgaaactgaataggtacgctggtttataattcaagaggacggcattgacatggttctagtcgtggaaacgccggttggcgttctttccaaaaagtgtctccctcacaacagggagagcatcgatctcgagaagccgcagtcgttcctcaaaggtgttgttgatttcaatcttgccacctccaccggtgatgacaataccgccagcactgggaaaagtaagattagtacgtatagctatctgttgtggggcgagacgtacttgtcatcgggcagtggctcctcctcgtccaggttgatcttgacttctttgccaaccgcaaccttgaaatctttctccgcctccccaatagccttctttacagcatccttgtccttctttctcgcacggacatccacggtcggctcgttcagagcataagcaccctccaaaatcaatgctataagcacctcctggtacttcttggcatctttggcggcaatgccggaaatctgaccacgggcttcctgaagaggtgt

SEQ ID NO: 14280 - DNA, 148 bp, Emericella nidulans
atacggccgttcggatcgctgatgcgagatgacgaccttctttacaacaactggtttcttacgtgcgatacatgacggtttccagcgctcacatccccgtagagagctgccaactgacattgggggttgacgttctgctacaccagtt

SEQ ID NO: 14281 - DNA, 167 bp, Emericella nidulans
cgacccggccattgacccggctacgctgaggactaccgcacgctagtgtgtgggcccgaggaggcccatttttaccctaccgtggacaatggccggccagcactcatcatgcggccgcacgcatgaacattgccaagcgtgatggggccaacgtgacggcacacaca

SEQ ID NO: 14282 - DNA, 276 bp, Emericella nidulans
acgcctataacggcttgcttaagcttgccagtatatcctttttaaggcgcacacacaccaaatacttgcggtcacctctatacttctgttcgatgaaggtcccaaccctgtgtgtaaaacccgtacgtcatgggccatacttgtcatacaggcctaatggtgtgatctcatagatcacgccttgcttgtccgagctagactgattttacagattccatattggagaaggacatcaccgcttgccttaaaccgccggaatcaccaaacattttttaa

SEQ ID NO: 14283 - DNA, 868 bp, Emericella nidulans
cccattttaggcgaacgatgacttcggttccgaccctagagagttgagttagatgcggttgaccagtagcctgacgggcgggttgcggataggaataaatcggcgtacctagcttggaggaaagggcgggggtttacgggttgaagctttgaaatgagcgtcagcacatagtcaagataaagagtaatggaaatgtatcgagcagcagggagacaaacactcatcgtggaaggctctgagccgcttgcggagtccggaatcaggggtgtttggtggaggttatggccagccgttcaaaagagcaatactcagcagtcaagttttctccgcggatgtgatctgctgagaaatgcgtcttgtaataataaaacaggagtttgctcaattactgaggtccttgtctagccggaaaatgtgctgaagctcgacacggttccccatcgcccaataagggcaagcgcggaatcaccgccttgatcttgattctgcctcattccccaggcatcctacatggctttgagaaagcacaaagcttcaggcttatgatattatcttatcgtttcatacattacctactaagcaagttcgaatgctacacactccatgccattaatctcattttatcatctgagactatactcacgcccttccaagctcccacttgatctccttgatcgcaacctcatccccagccttctcatcatagtcataccactcgccctccgaaagatcaattcctttgaacggcgtagaagactctacacccacagcttcccattctccctgcagcgcattagcttcgcatcgtcatataagcaatgtcgagaggtaaaacaaacatcaggcttaaactctgtaaactccagcc

SEQ ID NO: 14284 - DNA, 2347 bp, Emericella nidulans
aggtcgttgttctttatacggtcgctgaaaaaaagtcctgccagcccttttctctctacgggtttctatttttcgaccttggattgaaaccaactcttttacatctgcgtgcggctcaacggttctctgctgcatattaactctttagcgcttcccaaacgggccttgtttcagtaccatttaccacttccaccgtgatgcactctatccttggatactttctgaccgcaagaacagaggcaaaaaggttctcgaaaaccgttcgtcgacaggaaactgctacaatctgatagtattgagaattgtatgcggttgcaacctccagcctcaaaactcatatgggggggaggggggactcggctactgggcggctaatccgtcctgaaccatgggcagggtaggagagaaacaaagggaatcacgacctcaggtttaatactattaatattcatcaatcgcaatacctaaatgccgtcactggcttggagctgacaggcacagcctccgacggagcgatcgtccgcctactaaactaccactgcaacggtaatgtgcccagacatcaaagaggctggggattctataataacactcgttccctaggctttgctcgtgctcattttccgggttccatttttccttcaagcttcagtattcacctcgttcaacccctcatttgcagctcgacttccgagcatccgtcataacggacaaccccacgcgatcgacctcgggggcacaatgccgctgcgcgacatcctccataagaaagaccgggtgaataataccagcgaccaatatgcgactgacacactagatgctgcgaattcggtgcctgagataaggttcattcgctctgacaccactactcaagaaatcatcattccacccaaccacgacgtcgaccatgaagatcgtctagcctcgccgcgggcttcctcttcctcctcccaccgaagaacgttgaacccattccatcgctctagaacgccgcccgatccgcaagacccagggtcgccaagggagcgccggttttctggtttcctgcggcgaggctcctcttcgtcttccgtcaatttgccgccggaccttccgcagatagcagccgatgctggtgatgagcaagagcgcgaagcacaatgggaaaaaagagcgactgtccttgcgcagcagagcccacggtacgggtctccgagccattcgccagctccttccatggggcttggttcggagaatgtacgacctcggtctagaagttccagtcacagccgaattaatgaccctcaaggagacgtaagcaaagcacgagctcacgatatcgagctacccttctaacgggaatctaggtcaatatcctagaggcgatccgacttcatgaagctgggggtaggccaccatcaaccgccattgaaatttggcaatttgtaaatcctcgcttacaattatcttcttgcagagttggagcagtcaacaagcatgtttgcacagttagcggacacaaccggtgcgaacaatgccctaagtcaggtgctctatggtcttgctctaaggtaagctggtgtttttgagactacagaccctataggtagattgctctctaattgtatgccgcgtagacatggctggggttgcagaccagacccagaaaaagcggtcgtgtacctctcagccgcggcgtccaattcggcttccattgaagcccaagccctcgaggcagggctcaagaaaggcggcgccgctaaaggcgagcttgtcctagcgatctttgaattaggaaactgctttcgcaacggctggggtgtgaagaaagatccggcagccgcgcgacagtacttcgagacggctgctaacctgggcgacacggatgccatgaacgaagttgcttggtgctacctggaaggattcggaggtaaaaaggacaaagtaagtggctggctgagtggtcttcttgacccattgtcgcaattctctagtgctcttgggcatcgatgtctggctctcgcttcactattctggcaccgctgaacgtgcacattgacttactgacgtagctaaccctatatcttcctagtttatggctgcgaaatactaccgactggctgagagtaaaggaaacaagatcgtgggaaattcttggtacgtcgagacacgtctccggtttgtcatcttcacatatcctgcgaagccccaaacatatgcaacggctcggagatctgcgttttctgtgacatggtgaccagtgtgctgcatcatagatgactgcttcagcaatgtctggggatggcggttgcagttcagttgataggccctcgtggcatcttcggcagctgcgccatgcattccggcg

SEQ ID NO: 14285 - DNA, 1341 bp, Emericella nidulans
cggatcaaagtcactggtcgtgacgttgaggaagacccagcggttgagatatggttgcagtgatactgcctcgaagagggctttctgtgtctgtttctgtgcgcgaagcggtcgtctcgtccagacccctgagctgatcagttacctcgatggagaaatgaggataaatacggattcgaagtagggatgtctcaccctcacgcccaaagctcagtccgcgctggatggcatcttctctaaacgtgagccggagaccacgcacgcactggaggttcagcgactcgcagcggtggcagcgtgggtactcctcggtacattggatgtgtttctctagacgcggattagtcgttttccgccgtgacgacatgtcctagacctacccttgcacctgaagcatccagtccgccgccgggtattcttcctgtctgctcgaggcatggtacgaacccaagtgttaagtgagaatgcggggggagatctgcgcttataagctaacagcttggtgtgatttgacagtttctgacggtatctcatactaagaattagtctaagccagaatagtatgtagtgcagttaccccaacgctatcagcagtggccactagcgagtaatatcaagcatgctatccctatctacgtagtatatttgaaccccttttgctgaaaatccgtcatatcagcaaacgcctcttgcaagtctccatccctctctggagtctcaacagcattcacccgtctgcggttcaatactacggcaatggaccagtaaccggccatcaaggccacgcatacgcagtaacagacaagcatagacacaaatcccccggtatatgctggtgcttggttcgcacgaaacgtctgggggccgatgagatttccaaccgcgtatccgatatacagaacggagtactgcacggtcttcttcgtgctgcccgcggtgtttgcctgtgccatcgagattccgacgacataggggccgaagtaggtgtataacttgagaggttagcaggaataatgtcttagaaagagggtcggacgaatagtaccaggtatatgccaaccatctgaccgccaatgttgcttcgaggcagggtatagacgatgatagcaccgatggcgggaacacaggatgctatcatagtgacaagacaccggcgattagaccacttggctgctatccaagagaaagcaaatgcagacaaggtcgacatcaccccggtgggcatattcagcagggaggtgttgacagccgagaagcctagattgttaattatgatcccgctaaacgtagttaggcccccgttcgggatgttaatggaaatattgaaaaagaaaaggataa

SEQ ID NO: 14286 - DNA, 136 bp, Emericella nidulans
cgccgcgatcgttctacaaaacagcgccgggagaggtctattgactgccctcactagagactgactcctttttttttgcacacttggagcgtaacccaatgttagaatatgacaccaccatgggtgactggctaca

SEQ ID NO: 14287 - DNA, 157 bp, Emericella nidulans
ttttggtcgaacaccagactctatggggcatgtgtgaactgttatataatgggaacgatgttgttaccagaggaccatagcattgacccacgtgacgaaggaaacggaaccacagtcactaacacacaccagatgactggtcaaggcacacaaaatg

SEQ ID NO: 14288 - DNA, 2281 bp, Emericella nidulans
ctggctctcgtcctcgcaataattgataacaccttttgtacatccgcgttccagcgagctaaattcttcaagaaggctgcagcaccgcttgctgctcttgcaatgacgccacttggttgctacgtcgctgcgtcttgggctgccagtttccaaaatacaatggacgccgagcacggccaccgcaatgcgtttcgccgctacccttgcctacgttggcggcacgtcctccgttggactaatggctattttgaccgcgaatgaccatatggaacgagtcgtgtggattccgggagttccgttacgggaacgttggttgcgggaagaagaacgggcggctctggatagggttgcgcttgcttggggtttcaaggacatctacatgcgaggggaagaagaaggagaggagtgggagagtctacgggagttcattgggatgagggggatgattttggataagacggatctgatgcagggtatgcaataaagtgcgcccctatgtaacaaaatctacctttccttctagtttagcaaatcactgtatattaagcgtcttcacttctacaaaaccacaagaaccaaatgatagaacaaccggtgcattatattcagctacctaaagcgtaccataatcccacaccggaggcccagagatttaggatgttttattttcttatttcttttactccagttaagaagaaaagacgataagtcccttagtagacacggcggggaggagacatggtcgccttgatgacaagggacccaacgttctgccagcccttcttgagcagagagacgaggtagttgatggccagcatgatgttggcgacaagctcctcctgggtcatgccgacgttgccaacggcaacaccaaggcaaagaaccttcttgagctggaacttaatggtggacttgacgtcgttgaccttgttggccatgtcctcgttgtgggagacgggggtagggaatttaccagctgtggattgtcagtgcatacttttcacttgagatgggaaaggcgacaaaagtgtagacgaacccttggagagaccgggacccaagagacgggggatctgcttgatgagaccgtcggaagcaaggaaggcatcgtacttgcgagcaagcttcttgatgagcttcttgttcttgttcagcttcttgaggtcatcggcggacatggcatcaatgccgtggtgcttggcacggtcgagatcgtgctggtcaccaagaacactgcaattaaactcgtcagcctcagtccgaactattttccattctccttatccgttctcgttcttcctccccgtttctattgcagagtcgacgtaccagatggtcatgccagggcgaggcacggtagggagcttgatggtaccagagaaacgcttgtcacgctgggggtcgtagttcttcagaccgatctggagctcgacggtctcgaggaagttacgcttcttctcattttgagagtagttgagcagctgctcgacattctggcgcactccggctgtagaaaacactgtcagcgatggtgctcaggctcagggcaatcgagaaaagctaacataccgactgtgatcttagacatcttgctgacagtcttccaaaagaacctctttcaaagttttttggtgtggctctgcgctgaatgttgctgaagaaatgagtcgagaatggcgggttcgatggtggctctgaaaatctggtctccgcttgtgggtgcaatatacgctagccgaattgggaatagcgatgccctaatctagccttgatgactcatctatcggatttgcatctactgttgccgtctttaggctgatacatgagctgagaatcgagaaatggaatatgtccttgaatatagtctacgacgctaattgtctgctatatatacgagggtgttttgatatgcattgtttcagcagccacccaagtcttcagtcacgtaaactatcaacttgattggcactcgccggtaaatcgcaggttgtgagacctcgcatcaacaatcataacgctagtaaatccaaacacagcgacgctaactatatggtacattggtcatattaatctcgaggtaactcgaggtttcccatattccaaatgtcacccagctcgcccaaatctacttggtatggatttgttagcgcagtatacgcgtccgtcgaatcagaagacaggaattctagtggagtgagatcaagaccttggctattagcttcctttgtcaacatcgtggatgtagcatgttccaaaggctgtgagctcggcatgtctgaca

SEQ ID NO: 14289 - DNA, 430 bp, Emericella nidulans
caactgttgttacttttctcgctcttggtaccccacctactaccgccctaggagcccggcaatcccttggttattcggccgtggcgatgcccctctggacgaggctctctcgtgggcatgtcatatgatactcatcttagcccggctcattgggtcagttcattcatacatttgtgcttttcaaaacgtcggataataggattcgtgtctggacccctttaagtctacctggtagttattgaattttaacccgtcaatccgtgtattaccttgaccaaagaaagaccttttttttggccggtcctaaagtgggccccgtgggaccttttggggggtttgggtttattaaaacccccccccctttttttctaaacccaattttttttggtgggtccctttttggtccaaaacccccccttttaaaccccgc

SEQ ID NO: 14290 - DNA, 500 bp, Emericella nidulans
accagaattttaagccaccaactcgcgcgacttggccgcacgaacacccacgtgccattctttgcgctttctttgcgacatgagcgccctatcattcaataatacgttaggcactggacataagtttgtcaaataaaagttaaaacgctacacaggtgtcaataaaaggcacctttggaagttaattcttgaaaacccggaaatacaattagggcaattttaatgtcgcttgcccttccaaatcgaattaagttcgggggtaattacgttcgaaaagttttaaggcgggttccccccctaaagctaagggtcctttttccccccccgaaaaaaagggttttttttcccccccttttggcccccttttcccggaatatatttaacccggggttttcccaaaaaaggggttttttctcccccaaaagggggggaggggttttggaaggaatttttccccccccaaaaacccatttttcgggtaaaaagtccccccttgcaat

SEQ ID NO: 14291 - DNA, 542 bp, Emericella nidulans
acgagagcccgatgtccatgaaagcggaagacgaacaccgatgatataccaggctacggatctagaccgacgaaacgtttgaacggccgaggacgacccgataggaacgcctaaaaaaaaatttcagtgtcatagcccactccggcaactgagagcacatcacgacacgtgaaacgcaccctggtacccctgtcacaccaccctgaggcgaacggctacacagtacccagctgcgcccagttacagacggaagcctgtcccaggttacgctacgtgagccgctccgcaagcccgggcaaacaacccctggagatgctaccctgagcaacaagcaaactgggcctattctggaaaaaccgaaaatccggctgccgagagaggcccccgccattgactgtggcagcccgatgatgcccggagccagagctgaagtcgctggtccacccaaacaaagcgaggaccagaacagcccccaactcactggggcaccagcggaagatacgcagggacgaacccagcggaaagaagccctggcccggggt

SEQ ID NO: 14292 - DNA, 1208 bp, Emericella nidulans
ccggtactgaaagatcagagaatgaatagctgcggtagatcagtttaggttaacacagttcgtgataactgcagcaggaatggtgggctcatacccgatgtcagagcgaacaagttcaatggtcctaaccccgctaggcgtcacggacagttacctctagactctctctgcagagggtctgaaacgcactacaaagagacactttccagtagaggctctccgacggcaggaaaagatggatcttctcgtagcactcatctgcattcattgcttggaagcacgcctctggaagggcagtgtggatcttcatttctttaatcaccatccgcggcgggagattgttgaagatggtgaaggctgtgtcgagcaaaaatgtccatgtcagaaccctaataaggtaggttagttgtcgtaagggatgaggatgtatagattgataagtgggcaacagcagggcttgcgcacctcacgaactcttcacgaacggcaaactctcgccagtcgaattcagatctggtctgttggctatagttcaagtgtcttgccatggggatcccaatatctctcgctgtctgctcaaatgtcagtcctgctatccaattcccgccaccttataaagttcccggggagcttactgagacgagcgtcgcgaaccggttgcgacgcactctacgcttactcgcgtcattgccctcccatgtctggtacaggcaaaccatgtacgcagcctggagcgcctgtatcttatttcgatgagcagatatttttgccgacgagaagaatgacaagtcgctgttgaagtcctcgtcaataaagaccagctcctcgacgcagttgaaccacattcgggcgttttcgttgtctgacgggtcaggggaaacgcatgctcctatacacacattcagtaacgcctcgataatgagggaaaatcgggggagggggaaggccagctcaccgatgagtgccatcgtggccagtacggacggtttcgcgtctacagggtcaaaactcggtcggtggacgatattcacatgtggatgccatatcgcccagtatgactgcagatatttccgcaagttcgatggcgaaaagaactgcaggcacatctgctctaggaccggcgaccagtcgagcgtcactgcgctattacgcggcttgatcatgaccacttctttcacgagcagcaggatttgatggttcttgagcga

SEQ ID NO: 14293 - DNA, 504 bp, Emericella nidulans
gacaggagatactgagaggatgggtgatcaacaatttaaccttttctgttctacatgttaaacaggggctcatggggggagctgttcagtacaccacgctttaagcatggcctaacagataccatgggctaacaacggattatgaggctcgaacgcgccgagtaatcttatgatacctatgaaaggagagctgccttgccgaacagacacgtacgtgactgacgcctaggagaccactagaagatgatgaaccatgatcccaacctatagaggccgtcaggactgccgtctagctgggttgatactagtgccctgggcgatcggaggcactgatgatacacttccggtagacctgtaagtgtcagaacaaaagtaaactactcacctggtgcatgatgatgtcgggaaccactcagactgacccatgactgatccagcgaacactaactggcatcggtgacgctgctgctatgaaaggcgctagagtcgcacattgtggcatta

SEQ ID NO: 14294 - DNA, 561 bp, Emericella nidulans
gcaactaggatttaggctgccgtcgctctagggatcttaaggcatcgccggcagggtccgcagattcgtttctttcgattcattgtatgcggcatttcatcttacagatagtcagttctgttgacttttttgggatcaaacctaatttcttgagctcgtcatggttaggcttccgtgccctaatactgggcccaaatgcaagtagggctgccaagcatctgcgtattcatactttgtactcaagacgcagaactagcctttgacaacatcacttgctcttaccttccaattcgtaaaagtaagatgaaagctgacacatatcacctttgatactcggtggtaaattgcttgagtgctctgtcaatgattgctatcattctgctaggatcttcatgttcagtagtaaagcttgagaccagaatcttagggaaaagcaggaatgtctaatcttgtctattggtgcagctgtcggcgtactgaagtattgcacgtagtaaagatgacgttaccaattcttatctacttctagggatgtcaagagacactatgtggctgtactga

SEQ ID NO: 14295 - DNA, 1630 bp, Emericella nidulans
cctcagatactggtcacttcagtatggttaggtaggctttagcttttttgactgacggcgggcacatgctcactccgattcttatacagggcactgcatctagcagatcttgtcaccgagcttaatggtaagaaaccgttccagtttattttccgtggagtgatagctcactaaccttattctagggttctgcggaggcacgtcgacttccttgttgagattcgtgtgaacggctactaacccgtaaaacagtaatgtctgtcttttcgtcccttcgctactgcctcggtgacccccatgactatggcgctatctgggcggctcttggatttatgccattcgggctcttcttcgatttcatggacggcaggatcgcgaggtggaggaagaagtcgtctctcatggggcaagaactggattctctcgcggacctggtaaggcataatactttcgttggtagttaccacggctaatcgacggcatctagatttccttcggcatggctccggccgccgctgcatttgcgcttggaattcgaaccccgctcgaccacctatttctcacgttcttcgtcctctgcggcttaacgcgcctcgcccgctttaatgtcaccgctgctgtcctcccgaaagacaagacaggcaagtcgaagtacttcgagggcacgcctatccccaccacactaagcatagttgcggttatggcctactgggtgtcgcaagaatggatcttggaagacattccgcttggcgttgctgcgcagggcaccacgctggagttccacccgattgttctgctccttgttctccacgggtgcctcatggtcagcaagaccctgcatattccgaagccatgaatagcataagcacatgacgagttctttcctcgaaacgctttccttagaaaagagatggatcatgagccacgcctatatacgggagggaaggagggcaacaaaaggattacgaggcatttcttggagctaggtaaacgtggccggcgacgaatggcatgatttgcagattcctttgggataggcggttactcttgcgttgtgcatgtgtattattaacccgaaaagcattattatacctaggtaccgataatggcctgtctggcttccattgggtatatagatattgctcttctgctcatctccacttgatcttatcaaactttccctgaagctcaacgtaggctcttaaaatatggaaagaccttcggcgctgttttcgggaatattaccacctcacttcaaagggttgcaacatataaccactggctattagccttcctaaacctgatagccccatgcaatgcagcaggggagaaaaggaaaagtgatttagttcaagctctgtaagtacctgtgcggcactcggttcctaccgtggcgcagaacatcaccgaggtcaacaccacaaagctgggtgttgtttcggttggattcggacactccgtcagatcttggatcggtttggtatcatatccctttttttactcagatgtagctctgctaaaaggcagttcgcttaccctcaccagctcctaagcttttggcagaaatggtatgagaatggaaacatcccactgactccagacttgcgagcattcctcacactgcaaattc

SEQ ID NO: 14296 - DNA, 2144 bp, Emericella nidulans
gggcttacccaggctccgtcagagtagttggctgaagtgatcaggtcgttgagctctcgtcccccatcgagggtattgtcatgcaggagctgaataaccctcggcaagacaactctcgcaattatctcaactccaaaactggcgcctggttcttaggaagcgaatttgcacgtcgatccggccctgaacacggcattgtcagtgttgcaatgaaccctggtgctgcccgcaccaaccttctgcgacacgccggatggactaagtttctcagttggccgttgctccatagtccgaagctagccgctctcactgagctgtacgccggtttatcgccggatatcaacctcgagaacaacggttgttatgtgattccatggggccgcattcataccactgtcgccccccatctgatgaatgcgctgaggtccaaacaagccggtggaactggaagggcgcagcagttctgggatttttgcgatgacaagaccaaggattatcattaagcgtggactggttcgttcaaggttcggttattcttgccctaagggacacttgtctattctacattgccatgagatggctttattgtattgaaacatgttattcgacgcccaatcgcattactacttttaacatcacattccgtttcggccttaaggaacactcgtagtctacgcagccattgattctactgccctctcgcacaggcgatggatttgcttccaccgagacaatatcagctcaactgtgtctttctccttctcggactttgacagctcgaccaaagaagctatagtagtagtgcactcctgcaggtatgcctctatccagtcacgtattataccggcagtcctgctggcgtcgaacccttgttcggaaacaccatcgacatattcccgccacttttgccggctcatatattttatactagcagcagccatactattgcggtctgcaccagatgcagtgatttcgtaattcctgatccggtctcagagtggctcaattgtgcgatgaaagacaaaaggagtcaaaatgggacgaggtaaatacgtacccaaaacattccctctccgccaactcctttttctcggatctcgtcaacttgggtagaattatatcgtcgagatacaccctatctgaggggttatcgtccaggtagaagccgtctgcccaaagagtattcggttagataaatggggcaagaacagaagaaaggtgtaactgcggacgggcctgaaaggaactaacattcaaccagtaggaagtcattcgaatgtggaccgtagctcatgtatatttcttcgcctttttctgttgttttgtcgattcttgttatctgggccgctcggcaggtttgtagatgggaggataatgggaatagttacgaaccataatgcctaccagctcggaatatatagctatctctgtcgaaagtgacctcgcacgactattaataagaaatcagtatgaatgatataaatgcagaagggatatcggcctagcctaaccgggccatatctatgcttctccaagaacacgaaaaaaagggaagtaacttactgcatcatctctatgattgaaataatccgcaaaggggaccatgccaattgcatcgttccagtcactcggctcgttcttgcctggcgagacgtagtagaagctccgtgagttgatgatggcccaattatacgcgacagccttccaatctgtttctgggaagactgaccggatcgagtagtatgtgtcatataatcgcttttcctgccgtggtagaaggttttgataccgcgtttcgtaagggcaggactgttcggagttcgtttgtgagtttggagctggcgtattcaaagggtctaacatcgagttccgaagacctgagatggaaggtggaagaagagccagcttgagccctgacttcgagtctgggttgttacggctgttctcgttgcggtcttgggctggaggttgcatgtctgaactggacgcccgcaaccaccccggccagaaaatcggcatgctcttctcaaaatcctcccaactcggccatacgctcctccaaacatctagtaaaggcttagtccaggagtcgccatgcgcaagcgaagactatcgagaagatgcaacgtctaggaatctgttca

SEQ ID NO: 14297 - DNA, 897 bp, Emericella nidulans
caaggtaaagcatcgcagcccacccgagcccacatggatgctgggaaagaacccatcaacccggttctgccgatgaacatatcaaatttcagttttgaggatcgcgtcggctggccaaggtttccttcaatcggatgctgtctctcaggtgcattccatcgatcaactctctttatgagttatcatcaggtacctttacgtactctgaatgtagttaggtaccagatatcgcaaacaacggctgactacctccaaaaggcaggtatgaaacgcatcccaggaataacatatatattctgtaggatcagatagaaatacaaaagaaaaaaaacatgatatattcgcggcactattgggacaagcctttccctcttgagattcacggttcatcacctccgtggcagcaacggtttattgggccactgcatcccgattttgtcaacacaacatcgattcttcaagcctctcttctcctttttgacacagcagccgtgatcgatcgggtgtcgattagggctgtttttcacctacttgggaccgcgcatccacttctccaagcgtatgcgggctccgttgacttgtctccatagagaatcttatctaatccctgtctagggccgctagacccagggaatcacaccacagtgaccaccatactttcattgttgactgctgtctctattagtaatagcgtgcctatccaagagaggcatctgacgacagtgcgacgcgaaaacctggtcgacggctgcggggccgagaaccaggtcatgatgacagctccatagcatgaagatacaaaagtgcctaggtacagagctcaaggttacagacagattactccatacagagaggggaagtacggagcagcacacccagactctactcaagagtaag

SEQ ID NO: 14298 - DNA, 489 bp, Emericella nidulans
ccgatggtcttctgtgtactccgcggcagggaccggaatgactgcttctccagcaggacagctacttcttgcagtgcgagacgcatccttggcacacgttcggagttctttcttatggccgggaacaaacgtccagaatagccggagtggtaactgagcggtagcatacccagccatatggctaaagaacaaacattcagactgaacagatacccaatggcattatgtaccgaacttcggaacggatccagcagcgcactctcggcagacggggaagggaagaggtaaagtctaccatagtctgccagctggtggatgactaactactgggcttgatccacgacatcgaacggcagagtgacttgagcactgatggccaacgagcggctctgcttgacagagtcagcatctcactgggacaatgagtcgcatcagactgggggggacgggccatacattctgcaaccatctgtgaacaagaggacagat

SEQ ID NO: 14299 - DNA, 559 bp, Emericella nidulans
tggactgctagctgtggcactcccggactgggcactccgctgatgtagctaagggcaggaccccaaaggtgttttgtgtgcacaatccagggaccgtcttatgacactagcgaagaggaggctgtggccctattgaggttagcgcgcgatctataagtccccgacgagcccatggtcgtgtgatgcaccacgccctcggcagatgatataaccttgcggaggctgaacattcggatcgggacggccaggcttgcgggcactgagaggtgctgtcattctggactcttccatgggcctcatgagagtgactcaccgcgctcagcatggaggccgaaggtaagaatgcgacacgatctaccggccaccagacatgtcagaagcgctatacgcacaaatctacagtatggatcggcaagcatagcggtcactgcaggcactaaaaagaacgagcactctgagaatgacgaatcttacactgacagatatccatgctgtattagaatctgacgagttgcttggatccctcgatgggtggtgggctctggaacgagtactggga

SEQ ID NO: 14300 - DNA, 494 bp, Emericella nidulans
ctggtatatttgcatgtgtaggggactcagggagtttgctctggcgggggatatcaatccgtactcagatttatcattgggattggaatcttagcctatgattcgattagggatgagactgcatatacttgggcatgtactgaggcctaaaggatattatctgcatgacatctagacggatatacatacgtgcctagactggtggggggcacaaagccaatgagtcctgaactggtataagtgcagactgcatgaatcactggaacttggctgatggggaagataactcatgagaaagggagaccgattagaactagatctgccaccacatgcgactggtggaacgctctacaacggcacatcaagagagcaagctagcactgatatgtggcgagaggcactggtcggccataattgagtggatacgctacctatgaagcatcacttatgtaggaaccagccacccagtctttgactgactcacagagggctgc

SEQ ID NO: 14301 - DNA, 522 bp, Emericella nidulans
cgtaggaagttcttggccggacacgcacggacaggacgaaccacgagggtgggaccacatcatactggcttttctccagcgcaggcgcacgcatggctgacatggacgagccctatggaaccgtacccactatgacagttacggtgcacattgaaaaggcgctggaaagcgcatgacctgcagtgatgcggagctccaatgataccgaactggacagggaattgagtgaacaggacaccacacagccgtggaccagccagcctgcgtcaatgaccgccgttttagcggcgtacatacagccttgcctggctggtaccacaccggacctgcgagaggagggtgactattgtgatcgcaagcgctgattgggcgcaaacagacttaacgagaagtagaccaacagcttcctacaacttggctggctagactacaaagatgatgcagctcatcctggtgactggtgccgtcagtatgctccctagactaggagtctaccaatcatgcacagcacatctgattgag

SEQ ID NO: 14302 - DNA, 496 bp, Emericella nidulans
gcgagcactcgcagcggaccgggtctaacccaacgcgatgacctacccgcgtcgactttttgggggcggataacttggctcttctaatttcccgtggtcttcccacatgaggcattcgggcggcgcaacttactctcgagcgcattggcagtggcggctctctccatgtacttcacggcgcatagctggtggattccggtagacactgagaatgatgcacggacaggctgccctgcgccgggcacatacgtttatggcggattttactctgaccgggagggagcagtgcctggtacttacggagcagcagcatacccaccctacgtccgatccatcggtatgtcgcttgctacggtcagaacgtggctcttaaacgtcatggtcgcaatcacgtgccacgtcgatgaggagcagctccaatgaccaaggcgcattgtgagagcatgccgagcggcgcatagtagctgaaaggaatactgacgttcgcgcctgagac

SEQ ID NO: 14303 - DNA, 497 bp, Emericella nidulans
cagtctggaagggcacgccgagacggataataacgaccatgtgcgaaatcatggaccgatacttctgtctacacaatagaccaggtcaccagctgggtggcctatagagacgatcaatgaacaacaccgtctataacgacaaaccattagctatgatctcgcaggcgctaacagcagacatcatccttaaggcatacgaactggtctcagccccatccaccgaagccaatccaacactctatccgctggtctttgagagcctgacacactacctgatacgatatgaggaccatacggagggaagccatgacattagaggggggggggaacgctcgtccacagtgggctggaacaacatggatgcaagagctcctgatagccaggcatggagcggggaaaagcacgcgcagaaccatcggcattgtacggtcggtgatgagctatgcggaccgcaggcggcagacgcaggctcgtcgctcgcacaggatcggacacga

SEQ ID NO: 14304 - DNA, 556 bp, Emericella nidulans
tggctgcacacgacgcgtttgctccggacattgagtgttctcccggaacagactttttcttgctcgccccgtgcgaacattccaaggagtgcatccttactaggcaacctggccgataacaaacctctggggctgagtgcctatccccctgggggtcaactttgtgcagtgagttaccccgagatgctcagacccgggacacctgttgttggaccatactatggatagttcacctgatggggctggtgatactatcgccaaacccggatgatacagggctatataggccactggactagagtgcatacctcgtcggattaggatagaatgtgcactcgctataggcctagctggctcactgacaaatggacagatccgcgatatgattgaacatgtgacatcttacgaggttgctgggaccctacaagcaaccgtgagtcgacactacaggaattccgaggccatttgcccctgaccaggggctgtaaattaggtagtagatggtacttgccaaacccccaacagcctggggataagcttttttctctacttgcct

SEQ ID NO: 14305 - DNA, 675 bp, Emericella nidulans
agagtgatcatttgtacacgagcaccgatctgtggcctgccgagggcaatgccgcatatttccttgcagcggtagtcaacctctttcgttagctcgcggtaggcttggaggcggtcaaacgcggtgctgggacctgcaatgtcgtcggatggccggttgagcgataatgcgaggcggccaaaatggtactgctgcattgctacggcgcaggaagtgaggctgtaaaatatttctgggaacggcatgtgactgggttcggttggggcaagctttggtcgttcaatgcgcaaacagggacgaaatgtttccggaatgcgctccacccaggattgaaactcaaatgagattttgagccatgaggcagttgtgggatgggagtcaggggagtcagaactggatctggtcgagttgatggattgtggggattggcctccaacccattgttcaagttgggactttttcgccgctgcgagataatttgtgagcttgttaaggaggcgtgtcagcacgttcgtcgcgacgtcttcttgcgaccaatggcttctggagacctctgatgactctagatttccttggtcatcaagtgaaaggcccgctgctcgccatagtgccaggtcatccggatcaaggtgggttggcaagcggttatagtacgaggctagataatccatcctt

SEQ ID NO: 14306 - DNA, 6645 bp, Emericella nidulans
aaccttcaagtcatagcgaaaaaccagaagttggctggtagctccgaaagatctggcgttgtgggttctactgaggcagacggtggcggtgacttagatgaagatctcatgggggatggccgatagtgcgaatatggttgttggacgaggtagaatctctttcgcattcaatagcatgcatgagaaatgatcaaaaagcaactagtatcaatagttggagctcaaccctatcagccgtatggaaagtcgactaagtgattgaagctgatactcagctatgttcatgctagccggtttttttgcacgtattctagacctagtttcacttatcattatgcattacatgtgtacttttaaatcatgcgtatgtggcacttgattctccactcgcctatgacacactctggttacataaggtgagtgcttactactcagcatgctcgtcctccgccagctgttaccgcacattctcgtttcacaagtgtgcttataacgtcttcctcttgttttccttaagtaacctgcgagccaaaaaatgtcgctcacagaatcgacggcgatcgacatcgcgaaagctgcgtcctcggcgtctcgccacctcgcgattctttcggaagcggaccgcaacgaagccctaacagcgttacacgcagcgctttcaaggaacaaggatgccatacttgaagcaaatgctagggatatccaggcggcaacacaggctgtcaacggcggcagtctcaatcatagtgtcttgaagaggctcgatttgtccagaccaggaaaatacgatgatatgttgcagggcattttaagtgtgaggagtttgagggatcccagtatgtttgcgtcagcactcctctcttacgtatctggttttctttatcccggggttttctgattatgttgaagttggaaatgtcacgttgagaaccctcctcgacgacggccttactcttgagaaggtcgcatgtcccatcggggtactgttgatcatttttgaggcccggcctgaggttattgcgaacattgctgcgttgtctatcaagtctggcaatgctgcaatactgaaaggtttgcttcttaagttttggtatgtagttctgaactcctgctaatattcaaaaggagggaaagaatccacggaatctttcgtaacgatcgcgaacgtgatctccgaagctatttctcacaccagggtgccgcagtcgtctattcagcttgtgaagaccagagcggctgtctccgatctactggcacaggactcgcttatcgatcttgtcatacctcgaggctccaatgacctcgttagattcgttaaagagaacacgaaaataccagttcttggtcatgcagatgggctctgctctgcatatatccattccgatgctgacccggaaattgccctcaaggttattgtggattccaaaaccgactatcccgccgcatgcaactcactagaaactttgcttgtacatcaagatgctctcaaggaagttctaccgcctcttgccaaagcacttattgcgaagggtgtcactctccggtgcgacgaatcctctaaggctgcgctcattgaaaacttgactctcaaggaagcggggatgcttcgggatgcctgcgagtctgatttcaggactgagtttcttgatcttacactagccgttaaaacaataccttccaattcgcctctcactgacgtcgaagcggcaatagcccatatcaattcgcattcttcgaaacatacggatataatcattacggaatcagaaaatattgctaatattttcatgaaaggcgttgacagtgctggggtgttctggaatgcgtccactagattcgctgacgggatgagatacgggtttggcactgaagtcggaatcagtaccaataagatacactcgagagggccagttggtttggatgggttgactatctataagtatttgattcgaggcagtggtcacagggctggtgattattttgacggcgaaggaggcagaaagtataagcatcagaacttagagctatcatagacaaacatgcaaattctagaagtttttcaagtgaatccatttttcctcatcccgatcgacgccactaccggaagttatcatttaatgtctttacattcaagccagctcggagtggcggccagttgagttcgttaaatcaaggcctcttctgacatactcaattcatctcggaataactgcttcacacacaaatctcaatcattccatttagaccttgaaaccgcgaggaccttctgcgaccacgagcacgctcgaactttcgacccttgcttcgcacatacggtttctaaacaaggtcagccccaaacctgcagaaactgaacataagacgatacaaaccttgtgcttgtggggtccgaagccaaagtgcttcaccgcttctctggcgttcttaggaccacggagaagaagagtgttggctccagttggcgcccgcaaagctagctggtccagggtgagagtctcaccaccagccttctcgatacgggctctggccgtcgcggtaaagcgcagagcggccacggaaagcttgggaacagtaaggagacggccatccccggtaacagttccgataacaacgatggtcttgccctggtgagattcggtaacgttcgaggcgatgcgggacagcgacacagggggacggttgatacgggacatgaaaaggcggcgcagcacaaccttgttgaagttcgattccgtgcggcctgaagttagtagttaataattaagtcctataatcgaaatttcgcgaattggaaggtcgaatcatacgggcaaggaagcggtagagcttcacgagaacctgcaagtagacgttctcgcttttcggcgccttgcggtgggtgctgcgcacatggtggcggtccaagtcgatacctatttacccatcgataatcagcaaagttgccctccaggaattatgaatagctgtggacgatcaaagcgggcgctcgggatgcagtgatagtcgtcaaagcgtcaagttgcttgagaaatgctggaacgtacccatggctgctgaagtttccgactcgaagttggctggctgtcgcacccagatacaaagtgaagctgtcgaaggtttcgatagatgattttctctccgtggacaaatgtgcgggtccaggccctgagccctaaattactccttcgggagtggctggacctacattgtggcttgggcttaatacgggtggtggcacagaccactagcgagaaactgcttatatagtatttactgtaacgtgagactgttggtaattcaagagcaataaatggccattgccataaatcctcacataggatcaggcttcgatcgccgctaagcagctcggtatatggatagaaaggtgtagtacagaatgcattcaacatactactatcacgtgtatgaacagtacatgaccgttgtgacgtatcagctcacacagcaagcgaggacgattcatttagagtggacgttagctctcccgacttggtggttaatatactacctttcattttcagtcacttttgagttcttgaagtgctgaatcagggatcttaaatattggaaatgatcatatatttctctttgaattattcgctgctcatctgttattatggcagggaagaaggacctcttatacttctacgtagccttgattgctctatcttagatgcccgtagtcgcactgaaaactactcaaagtacatgtattcaatacttacttggtattgctcctttacctccgttctgcagtacatgtcaagtcggtgacttttcgtcctttgggaggaaacggaatcattcccagttatcgttgctccaactccgtactgtggtgggttcccaaacacaagaaagagcgcttattctattggaacgcgagggagaattaaccatctcatctcctctaatactaacgagatatgagtaacgggctctgatgcctggaacaatatgcgaacatcaggatggccgctttcaaagcaaaatggctggtccatgcgagacagttacgcccgatctagtatcacctttcgtcaaagctcaataaaaaatcccgggtgagctcaaagctgagccaactgctcgccatgctgggagcaactttaaggaggttcggcgcgattcccttgaagagaccgcggacaccctcttcggccacaatcacttttacggcgtcgaagattgaagcatattggtagcccatattggacatcgtgttgatctggaaacgccttcggaggacatcgctagaaactcgtcaataccctctgtagtgcactaaactaggataactcttacaagggataggtgcatgtttgtgccacagcccctgagatggcaccggccagcaatttgcgaagagcactgggtgtggagtccccttcaggagtcaaatatttacgaactgattcgtatgtcataaagttcaagccaacctaggcaaagtcagctgatgtcactcaaggacgattgtccagtacgcctggaaatcatacataaggggcaacaccggctacggttggaatgataccacggtaaagcgctaaaaagccgccctcattcttatagactaaaaccatggtcgtaaacattcccggcaacttctcgccggcgctatcacgcttgagagccgcaaaagaggcagattgtatggacagccttgtacggaccaaatcaaggggataggttacaatgactggtcacgccaattgcgtaggcaatgttagtttggtcaaagtaagaataatgtgtttcgtagggttggtatacaaacctgaggttatcccagccgcccctccacaaatgagtcggcgtattggcgtcaaatccgcatcaggcgaaggctcagcgaactgcgaatgtcaattctgcaatacattacttccatatcgaggaaatacccttttatagaaattataactgccgaactgcaccgctgagtacgggataatccgtatacagttcgtgccatttccccgcaaaaagcctcgccagccttcctcccgtccaatcttttttagggcctgccagattgatagtttgtattcctccctcccgacactttggatctgaagaagaattttcaaacgttcgagcggcgatacgatggttctcgatacagcgccagctactcccccagctaggaaagctgccgtaacgggctcggcgactgcaactctagctccgtgcaggagggagcttctcggatatgtttcctattcaaatcatgagcgaaatggtcggggaataaatgcgcatcctacctgagtcgaagtgggtgcctctaattgcgagattttcgacaaagcacttttgtcaacgccatctgacccgtcatgacgggttgcttcctggcgattcagactcattccgcgtcgataaaggagacaatctaactagagatgaccgatttgtcttaacaatacctcctatcggcatcgagccagacgtcactccaaacaagctgtctttcgttcactttatggctgcgttgccgcgcgagtgagcccggcgtcaaccagttatatatacaagcggatacgcagcaggagcgagatattacaacaaccaaatttcgaatgctgtcctggccatgtgtatgcgattatagctgcatgatgcgacaaaggcaagtaaggcagcaggctgatttgcacgaacaatgtacagtgcttgataatgtttgcaacgcagacactgggagagaaatttggagtaggaataaaagtgatgaatatagttgtgatagcagaggctgttaggggtccggcactggtcttctaaggcctccgaaaatcgcctggaagaagtcggaaaaactcaactcgcctcgggtccttagccagtgcaaatatagatactgtaccgatactgaccaattgagcttaagatatggtaggaactcccaacgtatatggagaagggtggatcccagaactccaattattaagcgcgcgcctagcctacgcgagaacattgctacagagcactttttggttatatagcatatgacaatataacgctcatttgcagagtgaaccttcttccactactgctgtacagaattcagatggtagtattatgttctattatatactccgttggtcggtcgataggtaatatacaatgtaaagtcatcttccttaacataacaacctctgtagagccactgtagtgatcatacatataagccagtattactcggttgagaaaccagtagatatcacttagagtactttcttaaagaaaatccgtacagagtggtttgcatgatgagttgcaaactatggactaggtggacctgcttgtcatatgcttcattagtggcatgcgccgccccccgtagtagcctctacatacccccgtcagtctttttttcatcactcatatccaatactattactaccaacttacccggccccgaacccaacacctgaaccagtattctttcttcctcgaatatcttcacaagcagccaccatgtctcgcccttggtaccacgctgtacgtcacaggcttcggccatggtactcgagctcgcgaccttgcctacgaattcgaacggtatgtgccgctcgtcagtactacgcgctactatgacccattgaacccgtcctc

SEQ ID NO: 14307 - DNA, 762 bp, Emericella nidulans
atcgacaggggcgactacccactgcttcgtctccgaatccagttccttttcagcctgcctccactcgttcctcaccatctctgccctcttttcgtcccgaggcgtgatagttgcagggaactcctctggcatacaaacaaatccctgtgtcaagcgttcctggtctggaataatctccttgccacttgcgtccttcttcggcgaaatgttaaacgcccacagaattctactcattcccaagaacagactgcgctccgcaacatggatgcctggacagatcctgcgcccggcaccaaaagtgaaagcgtcgcgcttggaggcatctggattagcagctgcgtcaccgaggctctgtgtgtcgtctttataccggtctgggttgaactgtcgcgggttgggatgtcgcttctcgtcgtggtggatggcccagacattgttcatgacaccagcacccttggggatgaagtagcccatgtagctgtcatcctgggtgacggcatgaggaacggctccgaggatagtggttggcatccagcgaagggtctccttcatgcaactgcgaatgtactggaggtcggcgaggtcatccatgaccggcaatcggtccggaccgataacacggtcaatctcagcctgggctttgcgctgaatctcaggatacagcagcatcgcctggacgaatgcgtaaagcgtgctggaagttgtatccgagcccgcctccagcagcgtaccagatatgtacgccgcctggtcatctgagaa

SEQ ID NO: 14308 - DNA, 535 bp, Emericella nidulans
tttcgataagaacttagttgattgacttgggtgcacgggctgatcctgtttgtaccagccggcactgtcttgttgcccaacgggtgagcgaccaaactcatgctctacttgtgactcgctgacttgttaatagcgcgaagccaaacgttacgagcagcggcctagtcactactaacggtcacaggctgattgcgcccaacctgatccgatccaagcagtataaccgccatgtacgagcactggataatacgcgccgaccggaagacatagatcctgagcagccaccctccatattcgctagagtgagtctgaaggcgttaccagagcgattgccttgctgagggggcttggtactgggctgcagggccaaccgattgattgccgctaaagggctggcggtgaggacgacaggagcagctgatgtgtcctcatgatgctgcactgtgcaagagagattggaggagcgatgcagagatgcggactaagacggatgctgagcgctgattgtggcgtgaccgacgatatagaaaggcaa

SEQ ID NO: 14309 - DNA, 566 bp, Emericella nidulans
gcagtctattgatagtgctcacatgcccgggatgcttatacggaagaggtgaaacggaatagtcgtccattgtttagcaggtgcctatttaaaacgcggaaaggaatctctttagagagcaggttgcgcaggtttattacctagtatgacaggcggatatcataccgacagttgatgggcactacgcctatacatcgccagtacggaggcaatatcaccgtaatgtgatgatatgttaggcaaaactttcgctggcttggtaaacaagcgctttcacacagaggtgcgacagtgatatgttcttccggaaagagatagaaataataagggttattgttgcctgctcatccactatcagctgagagggaggactcactgtccagcatcctctatgccccgaggttcagctgctccaaggctcaactggagacctagaccttacatgactcctcaaacaatttctggtacctttgtcgataatataagctgtttaatattccacacgagcttatacggatggttaggaagtgcgctgtcagccgtttcgtaccccggcatgtaaagta
